United States Patent Application Publication US 2018/0126003 A1 - sequence listing, part 145

SEQ ID NO: 254864 - DNA, 2010 bp, Artificial Sequence
  derived and/or modified sequence
atggccctgctgctggtgagcctgctggccttcctgagcctgggcagcggctgccaccacagaatctgccactgcagcaacagagtgttcctgtgccaggagagcaaggtgaccgagatccccagcgacctgcccagaaacgccatcgagctgagattcgtgctgaccaagctgagagtgatccagaagggcgccttcagcggcttcggcgacctggagaagatcgagatcagccagaacgacgtgctggaggtgatcgaggccgacgtgttcagcaacctgcccaagctgcacgagatcagaatcgagaaggccaacaacctgctgtacatcaaccccgaggccttccagaacctgcccaacctgcagtacctgctgatcagcaacaccggcatcaagcacctgcccgacgtgcacaagatccacagcctgcagaaggtgctgctgtggctgaacaagaacggcatccaggagatccacaactgcgccttcaacggcacccagctggacgagctgaacctgagcgacaacaacaacctggaggagctgcccaacgacgtgttccacggcgccagcggccccgtgatcctggacatcagcagaaccagaatccacagcctgcccagctacggcctggagaacctgaagaagctgagagccagaagcacctacaacctgaagaagctgcccaccctggagaagctggtggccctgatggaggccagcctgacctaccccagccactgctgcgccttcgccaactggagaagacagatcagcgagctgcaccccatctgcaacaagagcatcctgagacaggaggtggactacatgacccaggccagaggccagagaagcagcctggccgaggacaacgagagcagctacagcagaggcttcgacatgacctacaccgagttcgactacgacctgtgcaacgaggtggtggacgtgacctgcagccccaagcccgacgccttcaacccctgcgaggacatcatgggctacaacatcctgagagtgctgatctggttcatcagcatcctggccatcaccggcaacatcatcgtgctggtgatcctgaccaccagccagtacaagctgaccgtgcccagattcctgatgtgcaacctggccttcgccgacctgtgcatcggcatctacctgctgctgatcgccagcgtggacatccacaccaagagccagtaccacaactacgccatcgactggcagaccggcgccggctgcgacgccgccggcttcttcaccgtgttcgccagcgagctgagcgtgtacaccctgaccgccatcaccctggagagatggcacaccatcacccacgccatgcagctggactgcaaggtgcagctgagacacgccgccagcgtgatggtgatgggctggatcttcgccttcgccgccgccctgttccccatcttcggcatcagcagctacatgaaggtgagcatctgcctgcccatggacatcgacagccccctgagccagctgtacgtgatgagcctgctggtgctgaacgtgctggccttcgtggtgatctgcggctgctacatccacatctacctgaccgtgagaaaccccaacatcgtgagcagcagcagcgacaccagaatcgccaagagaatggccatgctgatcttcaccgacttcctgtgcatggcccccatcagcttcttcgccatcagcgccagcctgaaggtgcccctgatcaccgtgagcaaggccaagatcctgctggtgctgttccaccccatcaacagctgcgccaaccccttcctgtacgccatcttcaccaagaacttcagaagagacttcttcatcctgctgagcaagtgcggctgctacgagatgcaggcccagatctacagaaccgagaccagcagcaccgtgcacaacacccaccccagaaacggccactgcagcagcgcccccagagtgaccagcggcagcacctacatcctggtgcccctgagccacctggcccagaactag

SEQ ID NO: 254865 - DNA, 1902 bp, Artificial Sequence
  derived and/or modified sequence
atggccctgctgctggtgagcctgctggccttcctgagcctgggcagcggctgccaccacagaatctgccactgcagcaacagagtgttcctgtgccaggagagcaaggtgaccgagatccccagcgacctgcccagaaacgccatcgagctgagattcgtgctgaccaagctgagagtgatccagaagggcgccttcagcggcttcggcgacctggagaagatcgagatcagccagaacgacgtgctggaggtgatcgaggccgacgtgttcagcaacctgcccaagctgcacgagatcagaatcgagaaggccaacaacctgctgtacatcaaccccgaggccttccagaacctgcccaacctgcagtacctgctgatcagcaacaccggcatcaagcacctgcccgacgtgcacaagatccacagcctgcagaaggtgctgctggacatccaggacaacatcaacatccacaccatcgagagaaacagcttcgtgggcctgagcttcgagagcgtgatcctgtggctgaacaagaacggcatccaggagatccacaactgcgccttcaacggcacccagctggacgagctgaacctgagcgacaacaacaacctggaggagctgcccaacgacgtgttccacggcgccagcggccccgtgatcctgagcgagctgcaccccatctgcaacaagagcatcctgagacaggaggtggactacatgacccaggccagaggccagagaagcagcctggccgaggacaacgagagcagctacagcagaggcttcgacatgacctacaccgagttcgactacgacctgtgcaacgaggtggtggacgtgacctgcagccccaagcccgacgccttcaacccctgcgaggacatcatgggctacaacatcctgagagtgctgatctggttcatcagcatcctggccatcaccggcaacatcatcgtgctggtgatcctgaccaccagccagtacaagctgaccgtgcccagattcctgatgtgcaacctggccttcgccgacctgtgcatcggcatctacctgctgctgatcgccagcgtggacatccacaccaagagccagtaccacaactacgccatcgactggcagaccggcgccggctgcgacgccgccggcttcttcaccgtgttcgccagcgagctgagcgtgtacaccctgaccgccatcaccctggagagatggcacaccatcacccacgccatgcagctggactgcaaggtgcagctgagacacgccgccagcgtgatggtgatgggctggatcttcgccttcgccgccgccctgttccccatcttcggcatcagcagctacatgaaggtgagcatctgcctgcccatggacatcgacagccccctgagccagctgtacgtgatgagcctgctggtgctgaacgtgctggccttcgtggtgatctgcggctgctacatccacatctacctgaccgtgagaaaccccaacatcgtgagcagcagcagcgacaccagaatcgccaagagaatggccatgctgatcttcaccgacttcctgtgcatggcccccatcagcttcttcgccatcagcgccagcctgaaggtgcccctgatcaccgtgagcaaggccaagatcctgctggtgctgttccaccccatcaacagctgcgccaaccccttcctgtacgccatcttcaccaagaacttcagaagagacttcttcatcctgctgagcaagtgcggctgctacgagatgcaggcccagatctacagaaccgagaccagcagcaccgtgcacaacacccaccccagaaacggccactgcagcagcgcccccagagtgaccagcggcagcacctacatcctggtgcccctgagccacctggcccagaactag

SEQ ID NO: 254866 - protein, 479 aa, Artificial Sequence
  derived and/or modified sequence
MTTLAGAVPRMMRPGPGQNYPRSGFPLEVSTPLGQGRVNQLGGVFINGRPLPNHIRHKIVEMAHHGIRPCVISRQLRVSHGCVSKILCRYQETGSIRPGAIGGSKPKQVTTPDVEKKIEEYKRENPGMFSWEIRDKLLKDAVCDRNTVPSVSSISRILRSKFGKGEEEEADLERKEAEESEKKAKHSIDGILSERASAPQSDEGSDIDSEPDLPLKRKQRRSRTTFTAEQLEELERAFERTHYPDIYTREELAQRAKLTEARVQVWFSNRRARWRKQAGANQLMAFNHLIPGGFPPTAMPTLPTYQLSETSYQPTSIPQAVSDPSSTVHRPQPLPPSTVHQSTIPSNPDSSSAYCLPSTRHGFSSYTDSFVPPSGPSNPMNPTIGNGLSPQVMGLLTNHGGVPHQPQTDYALSPLTGGLEPTTTVSASCSQRLDHMKSLDSLPTSQSYCPPTYSTTGYSMDPVTGYQYGQYGQSKPWTF

SEQ ID NO: 254867 - DNA, 1440 bp, Artificial Sequence
  derived and/or modified sequence
atgactactctcgccggggccgtgccccggatgatgcgaccgggccctgggcagaattatccaaggtctgggtttccactagaggtttcaaccccgctggggcaaggacgcgtcaaccagctaggaggcgtgtttataaacggacgcccactgcctaaccatatacgccacaagatcgtggagatggctcaccacggcattcggccctgcgtgatttcacgtcagcttagagtatcgcacggatgcgtgagcaaaatcctctgtcgatatcaagaaaccgggagtattcgaccaggagctattgggggttccaaacctaaacaagtgacgacaccagacgttgagaagaagatagaagagtacaagagagagaatccaggcatgttttcctgggagataagggataagctgttgaaggatgctgtctgcgatagaaacaccgttccatccgtgtcaagcatcagccggatcctgagatctaagtttggcaagggggaagaggaagaagccgatttagagcggaaggaggcagaggaaagcgagaagaaggcgaaacacagcattgacggcatcctgagtgaacgcgcatcagctccgcagagcgacgaggggtcagatattgattcagagcccgacttgcctctcaagcgcaaacagagaaggtcaaggacaacatttactgcggagcaattggaagagctcgagcgcgcctttgagaggactcactatcctgatatctataccagggaggagctagctcagagagcaaagctcaccgaggcccgcgtacaggtgtggtttagcaatagacgggcccgctggcggaagcaggccggagctaatcagctcatggccttcaatcacctgatcccggggggatttcctcccaccgccatgcctacattgccaacctaccagctgtccgagacgagctaccagccaacgtccatcccccaggccgtctccgacccctcttcaaccgtgcaccgaccgcagccccttcccccatctacagtccatcagtctacaatcccttctaatccggactccagctctgcctattgccttccatcaaccaggcatgggttctctagttataccgactcttttgtccctcccagtggaccctctaatcccatgaaccctaccatcggaaatggacttagcccacaggtgatgggactgctgacaaaccacggaggagtgccccatcagccacaaactgattacgccttaagtcctctaacaggtggactcgaacctactacaacagtgagcgcctcctgcagccaaaggctggatcacatgaaatcccttgactcacttccgacttcacagtcctattgccctccgacctactcaaccaccggctactccatggaccccgtgaccggctaccaatacggacagtatggccagtcaaaaccctggactttctag

SEQ ID NO: 254868 - DNA, 1440 bp, Artificial Sequence
  derived and/or modified sequence
atgaccaccctggccggggctgtgcccaggatgatgaggcctggccctggccagaactaccccaggagcggcttccccctggaggtgtccacccccctgggccagggccgggtgaaccagctgggcggcgtcttcatcaatggccggcccctgcccaaccacatccgccacaagatcgtggagatggcccaccacggcatccggccctgcgtcatcagccggcagctgcgggtgagccacggctgtgtgtccaagatcctgtgccgctaccaggagaccggcagcatccggcctggggccatcggcggcagcaagcccaagcaggtgaccaccccagatgtggagaagaagattgaggagtacaagcgggagaaccctggcatgttctcctgggagatccgggacaagctgctgaaggatgctgtgtgtgacaggaacacagtgcccagcgtgagcagcatcagccgcatcctgcggagcaagtttgggaagggggaggaggaggaggccgacctggagaggaaggaggccgaggagagcgagaagaaggccaagcacagcattgatggcatcctgtctgagcgggccagcgccccccagagtgatgagggcagtgacattgattctgagccagacctgcccctgaagaggaagcagaggaggagcaggaccaccttcaccgctgagcagctggaggagctggagcgggcctttgagaggacccactacccagacatctacacccgggaggagctggcccagagggccaagctgacagaggcccgggtgcaggtgtggttcagcaacagaagagcccgctggaggaagcaggccggggccaaccagctgatggccttcaaccacctgatccctgggggcttccccccaacagccatgcccaccctgcccacctaccagctgtctgagaccagctaccagcccaccagcatcccccaggccgtgtctgaccccagcagcacagtgcaccggccccagcccctgccccccagcacagtgcaccagagcaccatccccagcaacccagacagcagcagcgcctactgcctgcccagcaccaggcatggcttcagcagctacacagacagctttgtgccccccagcggccccagcaaccccatgaaccccaccatcggaaatggcctgagcccccaggtgatgggcctgctgaccaaccacggcggcgtgccccaccagccccagacagattatgccctgagccccctgaccggcggcctggagcccaccaccaccgtgtctgccagctgcagccagaggctggaccacatgaagagcctggacagcctgcccaccagccagagctactgcccccccacctacagcaccaccggctacagcatggaccctgtgacaggctaccagtatggccagtatggccagagcaagccctggaccttctag

SEQ ID NO: 254869 - DNA, 1440 bp, Artificial Sequence
  derived and/or modified sequence
atgaccaccctggccggcgccgtgccccggatgatgcggcccggccccggccagaattacccccggtctgggttccccctagaagttagcactccgctgggtcaggggagggtgaaccaactggggggtgtgtttataaatggcagaccgttacctaatcacatccgacataaaattgttgaaatggcccaccacggaattcgtccatgcgtaattagtcgccagctgcgtgtaagccatggctgcgtatccaagatcctctgccggtatcaggaaacaggatctatccgccccggagccatcggcggctcaaaaccaaagcaggtgacaacacccgacgtggagaaaaagatcgaggaatataagcgggagaacccaggcatgtttagctgggagatcagagacaaacttctgaaggacgctgtatgcgacaggaataccgttcctagtgtgagctccatttcgcgcatcctgcgttccaaattcggcaaaggcgaggaagaggaagctgaccttgagaggaaggaggccgaggaaagtgagaaaaaagctaagcactcaattgacgggatcctgagcgagagggcatctgccccccaatcagacgaaggcagcgacatagactccgagcccgatctcccgctgaagcgcaaacagcggcgatcaaggaccacgtttactgccgaacagctggaagaactggaacgggcgtttgagcgcacccactaccccgacatttacacccgggaggaacttgcccagagggccaaattgacagaggctcgggtccaggtgtggtttagcaaccgacgcgcccgttggcgcaagcaagcaggagccaaccaacttatggccttcaaccaccttattccaggcgggttccctccaactgccatgcccacgttgccaacgtaccagctaagtgagacttcttatcagccgacttcaatccctcaggcggtaagcgatcctagttctactgttcatagaccccagcctttaccaccctctaccgtgcaccagtccaccattccgtccaaccctgatagctccagtgcttactgtctcccctctactcgccacggcttcagctcgtacacagactcttttgtccccccaagcggcccctccaaccccatgaatccgactatagggaatggactatctcctcaggtgatgggtctcctgacaaatcacggtggcgtgccgcatcaacctcagactgactacgcactgagtccattaaccggcgggctcgagccgacgactaccgttagtgcatcctgctcccagcgtctcgaccacatgaagtccctcgatagtctccctacctcacagtcctactgcccacctacctattccaccacaggatatagcatggatccggtgactggctatcagtacggacagtacggacaatctaagccatggaccttttag

SEQ ID NO: 254870 - DNA, 3610 bp, Artificial Sequence
  derived and/or modified sequence
gtccctccctctctctccagccgttttggggaggggctctccacgctccggatagttcccgagggtcatccgcgccgcactcgcctttccgtttcgccttcacctggatataatttccgagcgaagctgcccccaggatgaccacgctggccggcgctgtgcccaggatgatgcggccgggcccggggcagaactacccgcgtagcgggttcccgctggaagtgtccactcccctcggccagggccgcgtcaaccagctcggcggtgtttttatcaacggcaggccgctgcccaaccacatccgccacaagatcgtggagatggcccaccacggcatccggccctgcgtcatctcgcgccagctgcgcgtgtcccacggctgcgtctccaagatcctgtgcaggtaccaggagactggctccatacgtcctggtgccatcggcggcagcaagcccaagcaggtgacaacgcctgacgtggagaagaaaattgaggaatacaaaagagagaacccgggcatgttcagctgggaaatccgagacaaattactcaaggacgcggtctgtgatcgaaacaccgtgccgtcagtgagttccatcagccgcatcctgagaagtaaattcgggaaaggtgaagaggaggaggccgacttggagaggaaggaggcagaggaaagcgagaagaaggccaaacacagcatcgacggcatcctgagcgagcgagcctcagcaccccaatcagatgaaggctctgatattgactctgaaccagatttaccactaaagaggaaacagcgcagaagccgaaccaccttcacagcagaacagctggaggaactggagcgtgcttttgagagaactcattaccctgacatttatactagggaggaactggcccagagggcgaagctcaccgaggcccgagtacaggtctggtttagcaaccgccgtgcaagatggaggaagcaagctggggccaatcaactgatggctttcaaccatctcattcccggggggttccctcccactgccatgccgaccttgccaacgtaccagctgtcggagacctcttaccagcccacatctattccacaagctgtgtcagatcccagcagcaccgttcacagacctcaaccgcttcctccaagcactgtacaccaaagcacgattccttccaacccagacagcagctctgcctactgcctccccagcaccaggcatggattttccagctatacagacagctttgtgcctccgtcggggccctccaaccccatgaaccccaccattggcaatggcctctcacctcaggtaatgggactcctgaccaaccacggtggggtacctcatcagccccagactgattacgcgctctcccctctcaccgggggtctggaacctaccaccacggtgtcggccagctgcagtcagagactagaccatatgaagagcttggacagtctgccaacatctcagtcctactgtccacccacctatagcaccacaggctacagtatggaccctgtcacaggctaccaatatgggcagtatggacaaagtaagccttggactttttagggggcaatttctcctggaagggagataaactcaactcttccttaagaaaggtgaattagaggcaagattaagccacacatgccggtatcaatttttttttttttttgcaaagccagctgactgttccagcaggggcttccttgtgtaattattttcttaactgatgtcaacaacatcttgcggttattaattgttgagacgtgaaacctgattgccactaggtaaaacacaagggttggccaaaatgaaataatccctgacattagaaacacatgttcttaatgaggtcagctccaggatcatatgggggataatcccagggacacaaagttgtgtcaaacttgtctcaggaataaaaatattagtctcaagcctttgatagcacggtattaaatatgacattgtcagcctgtagctgatcttgcccctgactgtgaattgtcccagcatgacctaaaaagctgcgtgtgtttccttacaggtgcctttcattatctcaagccagatatcgcgtaagtgaactgtccacttggagctaaaactggccctgtttctggtcttcgcagcctagatatgaagaatctgctctgaaaacaaaaaaaaattacccttttgttggggggggtggggcagtggtcccaataggagacaaaggagagtgattgattttcttcctccaatagttggtttcaaatccttttgaacacgttcgacaaaagcagtggagaagaggaagacctggagcaataaaagacaaatgcaacattttaaggcaatggtttcacatggttacatatcaaaacatcccaattctttagtgctgatcatcgaggagctagaacattccatttgcttgtgtgcgtgcgtgcgtgtgtgtgtgtgtgtgtgtattgagatttacccagactggtttgggcaagcagactgttctaaaatataatagaataccctaaagtataacatgtcgatgttcgatgctgatacttctacaactttaaaactgctcatttcatgaagcaagaatggaggaatccttgactcttacacactggaaattgaaataaagataaatgcaaccatttttaggaagctagactagctgtaaaggacctcctaaataaattatttgttactgtatcctcatttgtaatctagttgtcaataaatggcccggacatgtcttgctaacaggatatgggctaccaggaagaaggacttgtttccctttcctgtgtggggagaggtgtgtgacgtttttccagttcacatttatttggtagcccacctgggttggaggaagggcacggtggagagaaagtgacatgcattcacatatctgcttatcagtgtgcaatactgtgtacctcatggatgctttggcaatgcccaaggcgatataagcaaaatcagaagtatatttttgcaggtgcttttattttcacagcccataattcatagtgatagagtgcagtgatgtttgccatttgctggacaaccaacacccgggttgctcctttgattagagaccagatcagataattatgcttttaaactgattacgtttacattcttctcttttctatgaaaggcagggcaagaacagaagtgttcacatggctctcatgtacttttaaattatacaatgatatccaatattaaaagattataggaactgaggtttacatacgtttgtgtggtgacattttagaatgtcaataaatttgctttttgagatgttgagaggaacaagaaggtggaaggcagtgttatttatttctttctattcttggaaccacgaatgaggtaggcacaaatacattccttttagagttaagaactatgacgtagcgagttagtgagactagacatagtaccgaatttagttcatgcattggtcttagagggtgatggaacaagagaagtactatctttgtgttgcagcctcaaccaacaacaatgtgttgtaaaaatgtctttcatgtaaaaagtgcagtaaatatttactatttataatgaataaacagttatgaaaa

SEQ ID NO: 254871 - DNA, 1440 bp, Artificial Sequence
  derived and/or modified sequence
atgacgacactcgccggtgccgtgcctagaatgatgcggcctggccctggtcagaattacccacggtccgggtttcccttagaggtgagcacccctttaggacagggacgtgtaaatcagctggggggagtctttatcaacggaagaccgttacctaatcacatccgccataaaattgttgaaatggcccaccatgggatccgcccatgcgtgattagtcggcagttgagagtaagtcacggatgcgtcagcaagatactttgcagatatcaggaaacaggctcaattcggcctggggcaatcggagggtctaagcctaagcaggtgacgaccccggatgttgagaaaaagatagaagaatacaagcgcgagaacccaggcatgttttcctgggaaatccgcgataagctgttgaaagatgctgtgtgcgaccggaataccgtccctagcgtgagctcaatcagcagaatcctgaggagcaaattcggtaagggggaggaagaagaagccgatcttgaacggaaagaagccgaggaaagcgagaaaaaggctaaacacagcattgatggaattctctctgaaagagcttccgcaccacagtctgacgagggttccgacattgattctgaaccagatctgccactgaagcgaaagcagcgcagatcaaggacaaccttcacagcagagcagctggaggagttagagcgcgcatttgagagaacacattatcccgatatctatactcgcgaggagcttgctcagcgagccaagctgaccgaagcccgtgtacaggtctggttttctaaccgcagggccagatggcgcaagcaagccggagccaaccaattaatggcattcaatcatctcatccctggcggtttcccaccgacggctatgcccaccctgccaacctatcagctcagtgaaacatcataccagcccacctctatcccccaggcagtgagtgacccgagtagtactgtgcatagacctcagcccttgcctccttcaacagtacatcagagcaccatcccttcgaacccagacagttcgtctgcatactgtctaccatctacaagacatggcttcagctcctacaccgactcattcgtccctccaagcggcccatcaaatcccatgaaccccaccattggaaacggcctgtctccacaggttatgggcctcctgactaaccacgggggtgtccctcaccagccccagacggattacgccctctcaccactcacaggcggactggagccgacaacgaccgtatcggcatcttgttcgcaacgcctagatcatatgaaatctcttgactctctcccaacctcacagtcttattgtccgcctacatattcaactaccggctattcgatggaccccgttacaggatatcagtacggacaatatggccagagcaagccctggaccttctag

SEQ ID NO: 254872 - DNA, 1440 bp, Artificial Sequence
  derived and/or modified sequence
atgaccaccctggccggcgccgtgcccagaatgatgagacccggccccggccagaactaccccagaagcggcttccccctggaggtgagcacccccctgggccagggcagagtgaaccagctgggcggcgtgttcatcaacggcagacccctgcccaaccacatcagacacaagatcgtggagatggcccaccacggcatcagaccctgcgtgatcagcagacagctgagagtgagccacggctgcgtgagcaagatcctgtgcagataccaggagaccggcagcatcagacccggcgccatcggcggcagcaagcccaagcaggtgaccacccccgacgtggagaagaagatcgaggagtacaagagagagaaccccggcatgttcagctgggagatcagagacaagctgctgaaggacgccgtgtgcgacagaaacaccgtgcccagcgtgagcagcatcagcagaatcctgagaagcaagttcggcaagggcgaggaggaggaggccgacctggagagaaaggaggccgaggagagcgagaagaaggccaagcacagcatcgacggcatcctgagcgagagagccagcgccccccagagcgacgagggcagcgacatcgacagcgagcccgacctgcccctgaagagaaagcagagaagaagcagaaccaccttcaccgccgagcagctggaggagctggagagagccttcgagagaacccactaccccgacatctacaccagagaggagctggcccagagagccaagctgaccgaggccagagtgcaggtgtggttcagcaacagaagagccagatggagaaagcaggccggcgccaaccagctgatggccttcaaccacctgatccccggcggcttcccccccaccgccatgcccaccctgcccacctaccagctgagcgagaccagctaccagcccaccagcatcccccaggccgtgagcgaccccagcagcaccgtgcacagaccccagcccctgccccccagcaccgtgcaccagagcaccatccccagcaaccccgacagcagcagcgcctactgcctgcccagcaccagacacggcttcagcagctacaccgacagcttcgtgccccccagcggccccagcaaccccatgaaccccaccatcggcaacggcctgagcccccaggtgatgggcctgctgaccaaccacggcggcgtgccccaccagccccagaccgactacgccctgagccccctgaccggcggcctggagcccaccaccaccgtgagcgccagctgcagccagagactggaccacatgaagagcctggacagcctgcccaccagccagagctactgcccccccacctacagcaccaccggctacagcatggaccccgtgaccggctaccagtacggccagtacggccagagcaagccctggaccttctag

SEQ ID NO: 254873 - protein, 484 aa, Artificial Sequence
  derived and/or modified sequence
MTTLAGAVPRMMRPGPGQNYPRSGFPLEVSTPLGQGRVNQLGGVFINGRPLPNHIRHKIVEMAHHGIRPCVISRQLRVSHGCVSKILCRYQETGSIRPGAIGGSKPKQVTTPDVEKKIEEYKRENPGMFSWEIRDKLLKDAVCDRNTVPSVSSISRILRSKFGKGEEEEADLERKEAEESEKKAKHSIDGILSERASAPQSDEGSDIDSEPDLPLKRKQRRSRTTFTAEQLEELERAFERTHYPDIYTREELAQRAKLTEARVQVWFSNRRARWRKQAGANQLMAFNHLIPGGFPPTAMPTLPTYQLSETSYQPTSIPQAVSDPSSTVHRPQPLPPSTVHQSTIPSNPDSSSAYCLPSTRHGFSSYTDSFVPPSGPSNPMNPTIGNGLSPQVMGLLTNHGGVPHQPQTDYALSPLTGGLEPTTTVSASCSQRLDHMKSLDSLPTSQSYCPPTYSTTGYSMDPVTGYQYGQYGQSAFHYLKPDIA

SEQ ID NO: 254874 - protein, 505 aa, Artificial Sequence
  derived and/or modified sequence
MTTLAGAVPRMMRPGPGQNYPRSGFPLEVSTPLGQGRVNQLGGVFINGRPLPNHIRHKIVEMAHHGIRPCVISRQLRVSHGCVSKILCRYQETGSIRPGAIGGSKPKQVTTPDVEKKIEEYKRENPGMFSWEIRDKLLKDAVCDRNTVPSVSSISRILRSKFGKGEEEEADLERKEAEESEKKAKHSIDGILSERASAPQSDEGSDIDSEPDLPLKRKQRRSRTTFTAEQLEELERAFERTHYPDIYTREELAQRAKLTEARVQVWFSNRRARWRKQAGANQLMAFNHLIPGGFPPTAMPTLPTYQLSETSYQPTSIPQAVSDPSSTVHRPQPLPPSTVHQSTIPSNPDSSSAYCLPSTRHGFSSYTDSFVPPSGPSNPMNPTIGNGLSPQVMGLLTNHGGVPHQPQTDYALSPLTGGLEPTTTVSASCSQRLDHMKSLDSLPTSQSYCPPTYSTTGYSMDPVTGYQYGQYGQSAFHYLKPDIAWFQILLNTFDKSSGEEEDLEQ

SEQ ID NO: 254875 - DNA, 1518 bp, Artificial Sequence
  derived and/or modified sequence
atgacaaccctggccggcgctgtgcctcgaatgatgcgaccagggcccggtcagaattatcctaggtccggctttcctctggaagtcagcactcctctgggccaaggcagggttaatcagctgggtggagtctttattaatggcagacccctgcccaaccacataagacacaagattgtggaaatggcccaccacgggataagaccctgtgtgattagccgccaactgagagtgtcccacggctgcgtttcgaagatcctgtgtagatatcaggaaaccggttcaatccgtcccggagccattggagggagcaagcctaagcaggttaccacaccagacgtagagaaaaagatagaagagtacaaacgcgagaatcccggtatgttcagttgggaaattcgggataagcttctgaaagacgcggtgtgcgataggaacactgtgccaagcgtcagcagcatatcaagaatactgcgctctaaattcgggaagggggaagaggaggaggctgatttggaaagaaaggaggctgaagagtcagagaaaaaagctaagcatagtatcgacggcatcctgtcagagcgcgcctcagctccccagtcagatgaagggagcgacattgatagcgaaccagatctacctttgaagcgtaaacagcgcaggagccgcacaacctttaccgctgagcagttagaggagctcgagagagcctttgagcgaacacactatccagatatctacacacgcgaggagctggcccaacgcgccaagcttactgaggcacgcgtgcaggtctggttcagtaacaggcgagcccgttggcggaaacaggccggggccaatcaactaatggccttcaatcacttgatacctggcggctttccgcccactgctatgccaacgctgcctacgtatcaactgtcagagacctcctatcagccaacgtccattccccaagccgtctcagatcctagtagcactgtccacagacctcagccgctccctccctcaaccgtgcaccagtccactatcccttcgaatcctgacagtagctccgcctactgcctgccctcaaccaggcacggctttagctcctacaccgactcatttgtgccaccatctggacctagtaatcccatgaatccaaccattggtaatgggctttcacctcaagtgatgggcctgctgactaaccacggcggagttccccaccagcctcagacagactatgccctctcccccctgactggtggactggaaccaacaacgactgtgagtgccagctgttcacagcggctcgatcacatgaagagtttggacagcctgcccacgtcccagagctactgtccacccacctactcaacaacgggatatagcatggatcccgtgacaggctaccagtatggccagtatggtcagtcggctttccactatctgaagcctgacatcgcgtggtttcagatactgttaaacaccttcgataaaagcagtggtgaagaggaggacttagaacagtag

SEQ ID NO: 254876 - DNA, 1455 bp, Artificial Sequence
  derived and/or modified sequence
atgaccacactagccggcgccgtgcctcgaatgatgaggcccggccccggtcagaattaccctagatcaggctttcccttggaagttagcactccattggggcaaggacgggtgaaccagttaggaggggtgttcatcaacggtcggccactaccaaaccatatccggcacaaaattgtcgaaatggctcatcacggtatcaggccctgtgtcatcagccgccagctgcgggtttcccacgggtgtgttagcaagatactgtgcaggtatcaggagactgggtccatcagacccggagccattggagggagcaagccaaagcaagttaccacgcctgatgtggaaaaaaaaatagaagaatataaacgggagaacccaggcatgttttcttgggagatccgggataagcttctgaaagacgctgtctgcgaccgcaataccgttccctccgtgtcttcaatctcacggatcctgagaagcaaattcgggaagggagaggaggaggaagcggacttagaaagaaaagaagccgaagagagcgagaagaaggccaagcactcaatagatggaattctctcagaacgggcaagtgcgccccaatctgatgagggatcagacatcgactctgagcccgatctgcccctgaagcgcaagcagcgtcgatcgagaactacctttacagcagaacagctggaggagctggagcgcgcctttgaaagaacccattaccctgacatttacaccagagaggaactggcgcagagggcgaaattgactgaagctagagtccaggtttggttctccaaccgacgcgcaaggtggcgcaagcaggcgggagcaaaccagctgatggcctttaaccatctcatcccaggaggcttccctccaactgctatgcccacattgccgacctatcaactgtctgagacaagctaccagccaacctctatcccccaagccgtgagtgacccaagctccactgtgcatcgtccgcagccattgccgcccagcaccgtccatcaaagtacaattccttctaaccctgattcttcctctgcttattgtttgccaagcactcggcacggattttcatcctatacagactcattcgttcccccttcaggaccttccaatcctatgaaccctactattgggaacgggctgagtccgcaggttatgggcctcctgacaaatcatgggggggttcctcatcagccccagacagactacgcgttgtcccccctcactggcggactggagccaactacgactgtgtccgcatcgtgtagccaacgccttgaccatatgaaaagtttggacagtttacccacatcacaatcatactgtccccccacatactcaacaacgggctattctatggatcccgtgaccggataccaatatgggcagtacggtcaatcagcctttcattacctgaagccagatatagcctag

SEQ ID NO: 254877 - DNA, 1518 bp, Artificial Sequence
  derived and/or modified sequence
atgaccaccctggccggggctgtgcccaggatgatgaggcctggccctggccagaactaccccaggagcggcttccccctggaggtgtccacccccctgggccagggccgggtgaaccagctgggcggcgtcttcatcaatggccggcccctgcccaaccacatccgccacaagatcgtggagatggcccaccacggcatccggccctgcgtcatcagccggcagctgcgggtgagccacggctgtgtgtccaagatcctgtgccgctaccaggagaccggcagcatccggcctggggccatcggcggcagcaagcccaagcaggtgaccaccccagatgtggagaagaagattgaggagtacaagcgggagaaccctggcatgttctcctgggagatccgggacaagctgctgaaggatgctgtgtgtgacaggaacacagtgcccagcgtgagcagcatcagccgcatcctgcggagcaagtttgggaagggggaggaggaggaggccgacctggagaggaaggaggccgaggagagcgagaagaaggccaagcacagcattgatggcatcctgtctgagcgggccagcgccccccagagtgatgagggcagtgacattgattctgagccagacctgcccctgaagaggaagcagaggaggagcaggaccaccttcaccgctgagcagctggaggagctggagcgggcctttgagaggacccactacccagacatctacacccgggaggagctggcccagagggccaagctgacagaggcccgggtgcaggtgtggttcagcaacagaagagcccgctggaggaagcaggccggggccaaccagctgatggccttcaaccacctgatccctgggggcttccccccaacagccatgcccaccctgcccacctaccagctgtctgagaccagctaccagcccaccagcatcccccaggccgtgtctgaccccagcagcacagtgcaccggccccagcccctgccccccagcacagtgcaccagagcaccatccccagcaacccagacagcagcagcgcctactgcctgcccagcaccaggcatggcttcagcagctacacagacagctttgtgccccccagcggccccagcaaccccatgaaccccaccatcggaaatggcctgagcccccaggtgatgggcctgctgaccaaccacggcggcgtgccccaccagccccagacagattatgccctgagccccctgaccggcggcctggagcccaccaccaccgtgtctgccagctgcagccagaggctggaccacatgaagagcctggacagcctgcccaccagccagagctactgcccccccacctacagcaccaccggctacagcatggaccctgtgacaggctaccagtatggccagtatggccagagcgccttccactacctgaagccagacatcgcctggttccagatcctgctgaacacctttgacaagagcagtggagaggaggaggacctggagcagtag

SEQ ID NO: 254878 - DNA, 1455 bp, Artificial Sequence
  derived and/or modified sequence
atgaccaccctggccggggctgtgcccaggatgatgaggcctggccctggccagaactaccccaggagcggcttccccctggaggtgtccacccccctgggccagggccgggtgaaccagctgggcggcgtcttcatcaatggccggcccctgcccaaccacatccgccacaagatcgtggagatggcccaccacggcatccggccctgcgtcatcagccggcagctgcgggtgagccacggctgtgtgtccaagatcctgtgccgctaccaggagaccggcagcatccggcctggggccatcggcggcagcaagcccaagcaggtgaccaccccagatgtggagaagaagattgaggagtacaagcgggagaaccctggcatgttctcctgggagatccgggacaagctgctgaaggatgctgtgtgtgacaggaacacagtgcccagcgtgagcagcatcagccgcatcctgcggagcaagtttgggaagggggaggaggaggaggccgacctggagaggaaggaggccgaggagagcgagaagaaggccaagcacagcattgatggcatcctgtctgagcgggccagcgccccccagagtgatgagggcagtgacattgattctgagccagacctgcccctgaagaggaagcagaggaggagcaggaccaccttcaccgctgagcagctggaggagctggagcgggcctttgagaggacccactacccagacatctacacccgggaggagctggcccagagggccaagctgacagaggcccgggtgcaggtgtggttcagcaacagaagagcccgctggaggaagcaggccggggccaaccagctgatggccttcaaccacctgatccctgggggcttccccccaacagccatgcccaccctgcccacctaccagctgtctgagaccagctaccagcccaccagcatcccccaggccgtgtctgaccccagcagcacagtgcaccggccccagcccctgccccccagcacagtgcaccagagcaccatccccagcaacccagacagcagcagcgcctactgcctgcccagcaccaggcatggcttcagcagctacacagacagctttgtgccccccagcggccccagcaaccccatgaaccccaccatcggaaatggcctgagcccccaggtgatgggcctgctgaccaaccacggcggcgtgccccaccagccccagacagattatgccctgagccccctgaccggcggcctggagcccaccaccaccgtgtctgccagctgcagccagaggctggaccacatgaagagcctggacagcctgcccaccagccagagctactgcccccccacctacagcaccaccggctacagcatggaccctgtgacaggctaccagtatggccagtatggccagagcgccttccactacctgaagccagacatcgcctag

SEQ ID NO: 254879 - DNA, 1518 bp, Artificial Sequence
  derived and/or modified sequence
atgaccaccctggccggcgccgtgccccggatgatgcggcccggccctgggcagaactatccccgtagtgggtttccactggaagtgtccaccccactcggccagggacgcgttaaccagctgggcggggtttttattaacggcagaccactgcctaaccatatccggcacaagattgtcgagatggcccaccacgggatcaggccatgcgtcattagccggcagcttagggtgtcacacggctgcgtctcaaagattctgtgcaggtaccaggagactggcagcatacggccaggtgccatcggtggttcaaaacctaagcaagtgacaacccctgatgttgaaaaaaagattgaagagtacaagagagagaaccccggtatgttctcctgggaaattagagataaactcctgaaggacgctgtctgcgataggaatacagtcccctctgtgagctcgatcagccggatcttacgaagcaagttcggcaagggcgaagaggaagaggctgacctcgaacgcaaagaagcagaagagagtgagaagaaagcgaaacatagtattgacggtatactatcagaaagagcctccgctccccagtcagatgaagggagcgacatagattccgagccagacttaccgctcaaacggaaacaacggcgttcacgtacaaccttcaccgcagagcaattagaggaactggagcgcgctttcgaacgaactcattatcccgatatttataccagagaggaactggcccagagggccaagctgaccgaggcccgagtgcaagtatggttttccaaccgacgagcccgctggaggaaacaagctggcgctaaccaactaatggcctttaaccacctcattcctggcggcttccccccaactgccatgcccaccctaccaacctaccagctcagcgagacgtcctatcagcctacctcaatcccccaggcagtttccgatccatccagtacagtgcatcgaccacagcctctcccaccctcaacagtgcaccagtctaccattccatccaaccctgatagttcatcagcctactgcttgccttctacacgccacggattctccagttacacagacagctttgtcccccccagcggaccttccaacccaatgaaccctacgattggaaacgggttgtctcctcaagtgatgggactcctcaccaaccatgggggggtgcctcatcagcctcaaaccgattatgctctgtctcctttaacgggaggtttagaaccaaccacaaccgtcagcgccagctgtagccagaggttagatcacatgaagtcgctcgactctcttcccacttctcaaagttactgccccccaacatactccacaaccggctacagtatggatcccgtgacgggttatcaatatggacagtatggccagagcgcgtttcactatctaaaaccagatattgcgtggtttcagattctgctgaacacttttgataaatcaagcggcgaggaagaagatcttgaacagtag

SEQ ID NO: 254880 - DNA, 1455 bp, Artificial Sequence
  derived and/or modified sequence
atgaccaccctggccggcgccgtgccccggatgatgcggcccggcccggggcagaattatcctagatccggcttcccgttggaagttagtacgccgctgggtcagggcagagttaatcaactcgggggtgtcttcatcaacggtcggccactcccgaaccacataagacacaagatcgttgaaatggcccatcacggaattagaccctgtgtgatctccaggcagttgagggtatctcatggctgtgtctctaagattctgtgccgataccaggaaacgggttccatcagaccgggggctattggcggatcaaaacccaagcaagtgaccacccctgacgttgaaaagaaaatcgaagaatacaagcgcgaaaatcccggtatgttttcctgggaaatccgagacaaactgttgaaggatgctgtctgtgaccggaacacggtaccatctgttagtagtattagtcgcattctcagatcaaaatttggcaaaggtgaggaagaagaagctgacctggagagaaaagaagccgaagagagcgaaaagaaagccaaacactctatcgacgggattctgtccgaaagggccagtgcccctcagtccgacgaggggagtgacatagatagcgaacctgatttgcctttaaagagaaagcagagacgcagccgtacgaccttcacagccgagcaactggaagaactggaacgcgcttttgaacggacacactatccggatatttacaccagagaggaactggcacaacgcgccaagctgacagaggcccgtgtgcaagtctggttctcaaacagacgcgcgagatggcgcaagcaggccggtgcaaatcaattgatggcattcaatcatcttatccctgggggattcccacccactgcaatgcctacgctccccacataccagctatctgagactagctatcagccgacctccatcccccaggctgtatctgatccatccagcaccgtccatcgccctcagccacttcccccttccactgtgcaccaatcgacaatcccgtcaaatcccgacagcagttcagcgtattgcttaccttccacacggcacggcttctccagttacactgatagcttcgtacctccctcaggaccttcaaacccaatgaaccctaccattggaaatgggcttagcccgcaagtaatggggttgctcaccaatcacggtggagtcccacaccagccacagacagattacgctctatctcccctaacgggcggactcgagcccaccacaacagtgtcagcttcctgtagtcagaggctggaccacatgaaaagccttgacagcctccctacatcccagagctactgccctcccacttacagcaccacgggatactctatggatccggttaccgggtaccagtatggacagtacggccagtccgccttccactacctgaaaccagatatcgcttag

SEQ ID NO: 254881 - DNA, 3170 bp, Artificial Sequence
  derived and/or modified sequence
aggaggagactcaggcaggccgcgctccagcctcaccaggctccccggctcgccgtggctctctgagcccccttttcagggaccccagtcgctggaacatttgcccagactcgtaccaaacttttccgccctgggctcgggatcctggactccggggcctccccgtcctcccctttcccgggttccagctccggcctctggactaggaaccgacagcccccctccccgcgtccctccctctctctccagccgttttggggaggggctctccacgctccggatagttcccgagggtcatccgcgccgcactcgcctttccgtttcgccttcacctggatataatttccgagcgaagctgcccccaggatgaccacgctggccggcgctgtgcccaggatgatgcggccgggcccggggcagaactacccgcgtagcgggttcccgctggaagtgtccactcccctcggccagggccgcgtcaaccagctcggcggtgtttttatcaacggcaggccgctgcccaaccacatccgccacaagatcgtggagatggcccaccacggcatccggccctgcgtcatctcgcgccagctgcgcgtgtcccacggctgcgtctccaagatcctgtgcaggtaccaggagactggctccatacgtcctggtgccatcggcggcagcaagcccaagcaggtgacaacgcctgacgtggagaagaaaattgaggaatacaaaagagagaacccgggcatgttcagctgggaaatccgagacaaattactcaaggacgcggtctgtgatcgaaacaccgtgccgtcagtgagttccatcagccgcatcctgagaagtaaattcgggaaaggtgaagaggaggaggccgacttggagaggaaggaggcagaggaaagcgagaagaaggccaaacacagcatcgacggcatcctgagcgagcgagcctcagcaccccaatcagatgaaggctctgatattgactctgaaccagatttaccactaaagaggaaacagcgcagaagccgaaccaccttcacagcagaacagctggaggaactggagcgtgcttttgagagaactcattaccctgacatttatactagggaggaactggcccagagggcgaagctcaccgaggcccgagtacaggtctggtttagcaaccgccgtgcaagatggaggaagcaagctggggccaatcaactgatggctttcaaccatctcattcccggggggttccctcccactgccatgccgaccttgccaacgtaccagctgtcggagacctcttaccagcccacatctattccacaagctgtgtcagatcccagcagcaccgttcacagacctcaaccgcttcctccaagcactgtacaccaaagcacgattccttccaacccagacagcagctctgcctactgcctccccagcaccaggcatggattttccagctatacagacagctttgtgcctccgtcggggccctccaaccccatgaaccccaccattggcaatggcctctcacctcaggtaatgggactcctgaccaaccacggtggggtacctcatcagccccagactgattacgcgctctcccctctcaccgggggtctggaacctaccaccacggtgtcggccagctgcagtcagagactagaccatatgaagagcttggacagtctgccaacatctcagtcctactgtccacccacctatagcaccacaggctacagtatggaccctgtcacaggctaccaatatgggcagtatggacaaagtgcctttcattatctcaagccagatatcgcttggtttcaaatccttttgaacacgttcgacaaaagcagtggagaagaggaagacctggagcaataaaagacaaatgcaacattttaaggcaatggtttcacatggttacatatcaaaacatcccaattctttagtgctgatcatcgaggagctagaacattccatttgcttgtgtgcgtgcgtgcgtgtgtgtgtgtgtgtgtgtattgagatttacccagactggtttgggcaagcagactgttctaaaatataatagaataccctaaagtataacatgtcgatgttcgatgctgatacttctacaactttaaaactgctcatttcatgaagcaagaatggaggaatccttgactcttacacactggaaattgaaataaagataaatgcaaccatttttaggaagctagactagctgtaaaggacctcctaaataaattatttgttactgtatcctcatttgtaatctagttgtcaataaatggcccggacatgtcttgctaacaggatatgggctaccaggaagaaggacttgtttccctttcctgtgtggggagaggtgtgtgacgtttttccagttcacatttatttggtagcccacctgggttggaggaagggcacggtggagagaaagtgacatgcattcacatatctgcttatcagtgtgcaatactgtgtacctcatggatgctttggcaatgcccaaggcgatataagcaaaatcagaagtatatttttgcaggtgcttttattttcacagcccataattcatagtgatagagtgcagtgatgtttgccatttgctggacaaccaacacccgggttgctcctttgattagagaccagatcagataattatgcttttaaactgattacgtttacattcttctcttttctatgaaaggcagggcaagaacagaagtgttcacatggctctcatgtacttttaaattatacaatgatatccaatattaaaagattataggaactgaggtttacatacgtttgtgtggtgacattttagaatgtcaataaatttgctttttgagatgttgagaggaacaagaaggtggaaggcagtgttatttatttctttctattcttggaaccacgaatgaggtaggcacaaatacattccttttagagttaagaactatgacgtagcgagttagtgagactagacatagtaccgaatttagttcatgcattggtcttagagggtgatggaacaagagaagtactatctttgtgttgcagcctcaaccaacaacaatgtgttgtaaaaatgtctttcatgtaaaaagtgcagtaaatatttactatttataatgaataaacagttatgaaaactt

SEQ ID NO: 254882 - DNA, 2258 bp, Artificial Sequence
  derived and/or modified sequence
actcggtgtcaccacaggaggagactcaggcaggccgcgctccagcctcaccaggctccccggctcgccgtggctctctgagcccccttttcagggaccccagtcgctggaacatttgcccagactcgtaccaaacttttccgccctgggctcgggatcctggactccggggcctccccgtcctcccctttcccgggttccagctccggcctctggactaggaaccgacagcccccctccccgcgtccctccctctctctccagccgttttggggaggggctctccacgctccggatagttcccgagggtcatccgcgccgcactcgcctttccgtttcgccttcacctggatataatttccgagcgaagctgcccccaggatgaccacgctggccggcgctgtgcccaggatgatgcggccgggcccggggcagaactacccgcgtagcgggttcccgctggaagtgtccactcccctcggccagggccgcgtcaaccagctcggcggtgtttttatcaacggcaggccgctgcccaaccacatccgccacaagatcgtggagatggcccaccacggcatccggccctgcgtcatctcgcgccagctgcgcgtgtcccacggctgcgtctccaagatcctgtgcaggtaccaggagactggctccatacgtcctggtgccatcggcggcagcaagcccaagcaggtgacaacgcctgacgtggagaagaaaattgaggaatacaaaagagagaacccgggcatgttcagctgggaaatccgagacaaattactcaaggacgcggtctgtgatcgaaacaccgtgccgtcagtgagttccatcagccgcatcctgagaagtaaattcgggaaaggtgaagaggaggaggccgacttggagaggaaggaggcagaggaaagcgagaagaaggccaaacacagcatcgacggcatcctgagcgagcgagcctcagcaccccaatcagatgaaggctctgatattgactctgaaccagatttaccactaaagaggaaacagcgcagaagccgaaccaccttcacagcagaacagctggaggaactggagcgtgcttttgagagaactcattaccctgacatttatactagggaggaactggcccagagggcgaagctcaccgaggcccgagtacaggtctggtttagcaaccgccgtgcaagatggaggaagcaagctggggccaatcaactgatggctttcaaccatctcattcccggggggttccctcccactgccatgccgaccttgccaacgtaccagctgtcggagacctcttaccagcccacatctattccacaagctgtgtcagatcccagcagcaccgttcacagacctcaaccgcttcctccaagcactgtacaccaaagcacgattccttccaacccagacagcagctctgcctactgcctccccagcaccaggcatggattttccagctatacagacagctttgtgcctccgtcggggccctccaaccccatgaaccccaccattggcaatggcctctcacctcaggtaatgggactcctgaccaaccacggtggggtacctcatcagccccagactgattacgcgctctcccctctcaccgggggtctggaacctaccaccacggtgtcggccagctgcagtcagagactagaccatatgaagagcttggacagtctgccaacatctcagtcctactgtccacccacctatagcaccacaggctacagtatggaccctgtcacaggctaccaatatgggcagtatggacaaagtgcctttcattatctcaagccagatatcgcgtaagtgaactgtccacttggagctaaaactggccctgtttctggtcttcgcagcctagatatgaagaatctgctctgaaaacaaaaaaaaattacccttttgttggggggggtggggcagtggtcccaataggagacaaaggagagtgattgattttcttcctccaatagttggtttcaaatccttttgaacacgttcgacaaaagcagtggagaagaggaagacctggagcaataaaagacaaatgcaacattttaaggcaatggtttcacatggttacatatcaaaacatcccaattctttagtgctgatcatcgaggagctagaacattccatttgcttgtgtgcgtgcgtgcgtgtgtgtgtgtgtgtgtgtattgagatttacccagactggtttgggcaagcagactgttctaaaatat

SEQ ID NO: 254883 - DNA, 1518 bp, Artificial Sequence
  derived and/or modified sequence
atgacaacacttgccggagcagtgcctcgaatgatgcgcccaggtcccggtcagaattacccgagatctggtttccccctggaagtgtccacacccttgggtcagggacgagtcaaccagctcggaggcgtattcattaacgggagaccccttcccaatcatattcgtcataagattgtggagatggctcatcatggtattagaccttgcgtaatttcccgccagcttcgcgtatcacatggatgcgtaagcaagatcctttgtcgatatcaggagacagggtcgatccgacctggagcgataggcggttctaagccaaaacaggtaacaaccccagatgtcgagaaaaaaatcgaggaatataagagggagaacccgggtatgttctcctgggagatcagggacaaattgctgaaggatgccgtgtgtgaccggaatacagtgccaagtgtgagcagcatttctcgtatcctccggagtaagttcggaaagggcgaggaagaagaggcagacctggagcggaaggaggctgaggagtccgagaaaaaagctaagcattcaatcgatggaatcttgtctgagagggcctccgcacctcagagtgacgagggctctgatatcgactcggaacccgaccttcctttgaagcgaaaacagaggcggtcccgcacaaccttcacagccgagcaattggaagaactcgaaagggctttcgaaagaacacattacccagacatttacactagagaggagctggcacagcgcgcaaagttaacagaagcaagagttcaggtgtggttttccaatcgcagagccagatggaggaagcaggccggagccaatcagttgatggccttcaatcacctcataccgggtgggttccctcctacagctatgcctactctgccgacataccagctgtctgagacttcttaccagcctacttcaatcccacaggccgtttcagaccctagctctacagtgcaccgccctcagcctctgcccccaagcactgtacaccagtccactataccttccaatcccgactcctcgagcgcgtattgtttgccatccacaaggcatggctttagctcatataccgactcgttcgttccaccatcgggcccatctaaccctatgaacccaaccatcggtaatggtctgagtccccaggttatgggcttgctgacaaaccatgggggagtgccacaccagccccagacagattatgccttgtccccattaactggtggcctggaacctactaccaccgtgtcggcctcttgttcacagcggctggaccatatgaagtccctcgacagcctgcccaccagtcagtcttattgccctcccacatactctacgaccggatattccatggatcctgtaactggttatcaatacggtcagtatggacagagcgccttccattatttgaaacccgatattgcttggttccaaattttgctgaatacctttgacaaatcaagcggtgaggaggaggacctggagcagtag

SEQ ID NO: 254884 - DNA, 1455 bp, Artificial Sequence
  derived and/or modified sequence
atgactaccctcgccggagccgtccctcggatgatgcggcctgggccagggcaaaactatccgcgtagtggattccctttggaggtgtctactccactcgggcaaggtcgggtgaaccagctgggaggggtgttcatcaacggcaggcccttaccgaatcatattcggcacaaaatcgttgagatggcccaccatggcattagaccttgcgtgatcagccgccagttgcgcgtgtcccacggttgtgtgtccaagatcctctgccgataccaggagaccgggtccattcggccaggcgctattggtggctctaagccaaagcaggttactactccagacgttgagaagaaaatcgaagaatacaagcgggagaatcctggcatgttcagctgggagattcgggacaagctgctaaaggatgcagtatgcgacaggaataccgtaccctcagtgagcagtatctcccgaattctgaggtcaaagttcggcaaaggggaggaggaggaagccgacttggaaaggaaggaagcagaggagagcgagaagaaagcaaagcacagcatcgacggtattctcagcgagagagccagtgccccacagagcgatgagggctctgatattgatagtgagcctgacctaccactgaagcgtaagcaacggcgatcgcgcaccactttcacagccgagcagttggaggaattggagcgagcatttgaaaggacccactaccctgatatctacactcgggaagaactggcccagcgggcaaagctcacagaagccagggtccaggtgtggttctctaatcgcagagccaggtggcgtaagcaggctggcgcaaatcaactgatggcctttaatcacttgataccagggggtttcccaccgaccgctatgcccacactgcccacgtaccagctgtcagagacctcctaccagcccactagcatcccacaggctgtttctgatccatcttccacagtgcatcgaccccagcctctaccacctagcacagtccatcaatcaacaatcccgagcaatccggatagttctagcgcctattgtctcccttccactcgccatgggttctccagctatactgatagtttcgtcccacccagtggacccagtaacccaatgaacccaaccatcggaaatgggctctccccacaggtcatgggactcctgaccaaccacggcggtgtaccccaccagccgcagactgactacgcactgtcccctctgactggaggattggaacccactactacagtgtctgccagttgtagccagcgattggatcatatgaaaagtctggactctctccctacatcgcagagctattgccccccaacgtattctacaaccgggtattctatggaccccgttaccggatatcagtacgggcagtatggccagagcgctttccattacctgaaaccagacattgcatag

SEQ ID NO: 254885 - DNA, 1518 bp, Artificial Sequence
  derived and/or modified sequence
atgaccaccctggccggcgccgtgcccagaatgatgagacccggccccggccagaactaccccagaagcggcttccccctggaggtgagcacccccctgggccagggcagagtgaaccagctgggcggcgtgttcatcaacggcagacccctgcccaaccacatcagacacaagatcgtggagatggcccaccacggcatcagaccctgcgtgatcagcagacagctgagagtgagccacggctgcgtgagcaagatcctgtgcagataccaggagaccggcagcatcagacccggcgccatcggcggcagcaagcccaagcaggtgaccacccccgacgtggagaagaagatcgaggagtacaagagagagaaccccggcatgttcagctgggagatcagagacaagctgctgaaggacgccgtgtgcgacagaaacaccgtgcccagcgtgagcagcatcagcagaatcctgagaagcaagttcggcaagggcgaggaggaggaggccgacctggagagaaaggaggccgaggagagcgagaagaaggccaagcacagcatcgacggcatcctgagcgagagagccagcgccccccagagcgacgagggcagcgacatcgacagcgagcccgacctgcccctgaagagaaagcagagaagaagcagaaccaccttcaccgccgagcagctggaggagctggagagagccttcgagagaacccactaccccgacatctacaccagagaggagctggcccagagagccaagctgaccgaggccagagtgcaggtgtggttcagcaacagaagagccagatggagaaagcaggccggcgccaaccagctgatggccttcaaccacctgatccccggcggcttcccccccaccgccatgcccaccctgcccacctaccagctgagcgagaccagctaccagcccaccagcatcccccaggccgtgagcgaccccagcagcaccgtgcacagaccccagcccctgccccccagcaccgtgcaccagagcaccatccccagcaaccccgacagcagcagcgcctactgcctgcccagcaccagacacggcttcagcagctacaccgacagcttcgtgccccccagcggccccagcaaccccatgaaccccaccatcggcaacggcctgagcccccaggtgatgggcctgctgaccaaccacggcggcgtgccccaccagccccagaccgactacgccctgagccccctgaccggcggcctggagcccaccaccaccgtgagcgccagctgcagccagagactggaccacatgaagagcctggacagcctgcccaccagccagagctactgcccccccacctacagcaccaccggctacagcatggaccccgtgaccggctaccagtacggccagtacggccagagcgccttccactacctgaagcccgacatcgcctggttccagatcctgctgaacaccttcgacaagagcagcggcgaggaggaggacctggagcagtag

SEQ ID NO: 254886 - DNA, 1455 bp, Artificial Sequence
  derived and/or modified sequence
atgaccaccctggccggcgccgtgcccagaatgatgagacccggccccggccagaactaccccagaagcggcttccccctggaggtgagcacccccctgggccagggcagagtgaaccagctgggcggcgtgttcatcaacggcagacccctgcccaaccacatcagacacaagatcgtggagatggcccaccacggcatcagaccctgcgtgatcagcagacagctgagagtgagccacggctgcgtgagcaagatcctgtgcagataccaggagaccggcagcatcagacccggcgccatcggcggcagcaagcccaagcaggtgaccacccccgacgtggagaagaagatcgaggagtacaagagagagaaccccggcatgttcagctgggagatcagagacaagctgctgaaggacgccgtgtgcgacagaaacaccgtgcccagcgtgagcagcatcagcagaatcctgagaagcaagttcggcaagggcgaggaggaggaggccgacctggagagaaaggaggccgaggagagcgagaagaaggccaagcacagcatcgacggcatcctgagcgagagagccagcgccccccagagcgacgagggcagcgacatcgacagcgagcccgacctgcccctgaagagaaagcagagaagaagcagaaccaccttcaccgccgagcagctggaggagctggagagagccttcgagagaacccactaccccgacatctacaccagagaggagctggcccagagagccaagctgaccgaggccagagtgcaggtgtggttcagcaacagaagagccagatggagaaagcaggccggcgccaaccagctgatggccttcaaccacctgatccccggcggcttcccccccaccgccatgcccaccctgcccacctaccagctgagcgagaccagctaccagcccaccagcatcccccaggccgtgagcgaccccagcagcaccgtgcacagaccccagcccctgccccccagcaccgtgcaccagagcaccatccccagcaaccccgacagcagcagcgcctactgcctgcccagcaccagacacggcttcagcagctacaccgacagcttcgtgccccccagcggccccagcaaccccatgaaccccaccatcggcaacggcctgagcccccaggtgatgggcctgctgaccaaccacggcggcgtgccccaccagccccagaccgactacgccctgagccccctgaccggcggcctggagcccaccaccaccgtgagcgccagctgcagccagagactggaccacatgaagagcctggacagcctgcccaccagccagagctactgcccccccacctacagcaccaccggctacagcatggaccccgtgaccggctaccagtacggccagtacggccagagcgccttccactacctgaagcccgacatcgcctag

SEQ ID NO: 254887 - protein, 407 aa, Artificial Sequence
  derived and/or modified sequence
MTTLAGAVPRMMRPGPGQNYPRSGFPLEVSTPLGQGRVNQLGGVFINGRPLPNHIRHKIVEMAHHGIRPCVISRQLRVSHGCVSKILCRYQETGSIRPGAIGGSKPKQVTTPDVEKKIEEYKRENPGMFSWEIRDKLLKDAVCDRNTVPSVSSISRILRSKFGKGEEEEADLERKEAEESEKKAKHSIDGILSERASAPQSDEGSDIDSEPDLPLKRKQRRSRTTFTAEQLEELERAFERTHYPDIYTREELAQRAKLTEARVQVWFSNRRARWRKQAGANQLMAFNHLIPGGFPPTAMPTLPTYQLSETSYQPTSIPQAVSDPSSTVHRPQPLPPSTVHQSTIPSNPDSSSAYCLPSTRHGFSSYTDSFVPPSGPSNPMNPTIGNGLSPQVPFIISSQISLGFKSF

SEQ ID NO: 254888 - DNA, 1224 bp, Artificial Sequence
  derived and/or modified sequence
atgaccaccctggcaggtgccgttcccagaatgatgcgccccggacctggccaaaactacccccgctcaggttttcccctggaggtgtctaccccccttggtcaggggagggtcaaccagcttggcggggtgtttatcaacggtcgacctcttccaaaccacattcgccacaagattgtcgaaatggcacatcacgggattcgcccatgtgtaatcagtcggcagctacgcgtgagccatggatgcgtctctaaaatactgtgcaggtatcaagaaaccgggagcattaggcccggagccattgggggctccaaacccaaacaagtgaccacaccagacgtagaaaaaaagatagaggagtataagcgtgagaatcccggtatgttttcttgggagatccgagacaaactgttgaaggatgccgtgtgcgatcgcaataccgtgccttccgtaagctcgatcagcagaatactgagatccaaattcggaaaaggggaggaagaagaagccgatttagagcggaaggaggcagaggaatctgagaagaaggctaaacattcaattgatgggatcctgagcgaaagggcgagcgcacctcagtccgacgaggggagcgatattgattctgaaccagatctgcctctcaagcgcaagcagcggcgaagtagaacaacgtttacagcagaacagctggaggagctggagagagcgttcgaacggactcattatccagacatatacacgcgggaggaactagcgcagagggctaaactcacggaagcgagagtgcaagtttggttttcaaaccgtagggcccggtggcgcaaacaagcgggagctaatcagctgatggcgtttaatcaccttatccccgggggtttccctccaactgccatgcctaccctacctacgtaccagctgtctgaaactagctaccagcctacgagtattccacaggcagtctctgaccccagttccacagtgcaccgcccacagcccctgccaccctccacagtgcatcagagtaccatcccttcgaatcctgattccagctcagcttactgcctgccctctaccagacatgggtttagctcctacacagatagcttcgtgccaccctcaggaccatcaaatccaatgaaccccaccatcggcaatgggcttagtccgcaggtgccattcattatctcatctcagataagcctcggtttcaaatccttctag

SEQ ID NO: 254889 - DNA, 1224 bp, Artificial Sequence
  derived and/or modified sequence
atgaccaccctggccggggctgtgcccaggatgatgaggcctggccctggccagaactaccccaggagcggcttccccctggaggtgtccacccccctgggccagggccgggtgaaccagctgggcggcgtcttcatcaatggccggcccctgcccaaccacatccgccacaagatcgtggagatggcccaccacggcatccggccctgcgtcatcagccggcagctgcgggtgagccacggctgtgtgtccaagatcctgtgccgctaccaggagaccggcagcatccggcctggggccatcggcggcagcaagcccaagcaggtgaccaccccagatgtggagaagaagattgaggagtacaagcgggagaaccctggcatgttctcctgggagatccgggacaagctgctgaaggatgctgtgtgtgacaggaacacagtgcccagcgtgagcagcatcagccgcatcctgcggagcaagtttgggaagggggaggaggaggaggccgacctggagaggaaggaggccgaggagagcgagaagaaggccaagcacagcattgatggcatcctgtctgagcgggccagcgccccccagagtgatgagggcagtgacattgattctgagccagacctgcccctgaagaggaagcagaggaggagcaggaccaccttcaccgctgagcagctggaggagctggagcgggcctttgagaggacccactacccagacatctacacccgggaggagctggcccagagggccaagctgacagaggcccgggtgcaggtgtggttcagcaacagaagagcccgctggaggaagcaggccggggccaaccagctgatggccttcaaccacctgatccctgggggcttccccccaacagccatgcccaccctgcccacctaccagctgtctgagaccagctaccagcccaccagcatcccccaggccgtgtctgaccccagcagcacagtgcaccggccccagcccctgccccccagcacagtgcaccagagcaccatccccagcaacccagacagcagcagcgcctactgcctgcccagcaccaggcatggcttcagcagctacacagacagctttgtgccccccagcggccccagcaaccccatgaaccccaccatcggaaatggcctgagcccccaggtgcccttcatcatcagcagccagatcagcctgggcttcaagagcttctag

SEQ ID NO: 254890 - DNA, 1224 bp, Artificial Sequence
  derived and/or modified sequence
atgaccaccctggccggcgccgtgccccggatgatgcggcccggccccggacaaaattacccacggtctggcttcccactggaggtctccactcctttgggccagggaagggtgaatcagctcggaggagtgtttattaacgggcgccccctcccaaaccatattcgacacaaaatcgtagagatggcacaccacggaatcagaccttgcgtcatttcccggcagctgcgggtgagtcacgggtgtgtgtcaaagatcctgtgccggtatcaggagactgggtccattcgccccggcgccattggaggatccaagcctaagcaggtgactaccccggatgtggaaaagaaaattgaggagtataagcgtgaaaatcctggaatgtttagctgggagatccgtgacaaactcttgaaagacgctgtctgtgacagaaatactgtaccctcagtgtcatccatttcaagaatactgaggtcgaagttcggaaaaggcgaggaggaggaagcagacttggagcgcaaggaagcagaagaaagtgaaaaaaaggccaaacattccattgacggcattctgtctgagagagcctccgcgccccaaagtgatgaagggtcagacattgacagtgagcctgatctccctctgaagagaaagcaacggcgctctaggaccaccttcacagccgaacagcttgaggagctggaaagagcattcgaaagaacccattatcctgatatctataccagggaggagctggcccagagagccaaactgactgaggcccgagtacaggtctggtttagcaacaggcgcgcccggtggcgcaaacaagcaggcgccaaccagctaatggcatttaaccaccttattccaggtggttttcctcccacagcaatgccaactttgcccacctaccaactctcggagacaagttaccaacctaccagcattccgcaggccgtatcagacccttcgtcaaccgtgcaccggcctcagcctttaccaccatccaccgtgcatcaatccacaatacctagtaatcccgactcaagcagtgcttattgcctacccagtactagacatggctttagttcatacaccgactctttcgtgcctccttctggcccgagcaaccctatgaacccaactatcgggaatggactatcaccccaagttccattcattatctcaagccaaatcagcctcggtttcaaatccttctag

SEQ ID NO: 254891 - DNA, 1715 bp, Artificial Sequence
  derived and/or modified sequence
actcggtgtcaccacaggaggagactcaggcaggccgcgctccagcctcaccaggctccccggctcgccgtggctctctgagcccccttttcagggaccccagtcgctggaacatttgcccagactcgtaccaaacttttccgccctgggctcgggatcctggactccggggcctccccgtcctcccctttcccgggttccagctccggcctctggactaggaaccgacagcccccctccccgcgtccctccctctctctccagccgttttggggaggggctctccacgctccggatagttcccgagggtcatccgcgccgcactcgcctttccgtttcgccttcacctggatataatttccgagcgaagctgcccccaggatgaccacgctggccggcgctgtgcccaggatgatgcggccgggcccggggcagaactacccgcgtagcgggttcccgctggaagtgtccactcccctcggccagggccgcgtcaaccagctcggcggtgtttttatcaacggcaggccgctgcccaaccacatccgccacaagatcgtggagatggcccaccacggcatccggccctgcgtcatctcgcgccagctgcgcgtgtcccacggctgcgtctccaagatcctgtgcaggtaccaggagactggctccatacgtcctggtgccatcggcggcagcaagcccaagcaggtgacaacgcctgacgtggagaagaaaattgaggaatacaaaagagagaacccgggcatgttcagctgggaaatccgagacaaattactcaaggacgcggtctgtgatcgaaacaccgtgccgtcagtgagttccatcagccgcatcctgagaagtaaattcgggaaaggtgaagaggaggaggccgacttggagaggaaggaggcagaggaaagcgagaagaaggccaaacacagcatcgacggcatcctgagcgagcgagcctcagcaccccaatcagatgaaggctctgatattgactctgaaccagatttaccactaaagaggaaacagcgcagaagccgaaccaccttcacagcagaacagctggaggaactggagcgtgcttttgagagaactcattaccctgacatttatactagggaggaactggcccagagggcgaagctcaccgaggcccgagtacaggtctggtttagcaaccgccgtgcaagatggaggaagcaagctggggccaatcaactgatggctttcaaccatctcattcccggggggttccctcccactgccatgccgaccttgccaacgtaccagctgtcggagacctcttaccagcccacatctattccacaagctgtgtcagatcccagcagcaccgttcacagacctcaaccgcttcctccaagcactgtacaccaaagcacgattccttccaacccagacagcagctctgcctactgcctccccagcaccaggcatggattttccagctatacagacagctttgtgcctccgtcggggccctccaaccccatgaaccccaccattggcaatggcctctcacctcaggtgcctttcattatctcaagccagatatcgcttggtttcaaatccttttgaacacgttcgacaaaagcagtggagaagaggaagacctggagcaataaaagacaaatgcaacattttaaggcaatggtttcacatggttacatatcaaaacatcccaattc

SEQ ID NO: 254892 - DNA, 1224 bp, Artificial Sequence
  derived and/or modified sequence
atgactacgttggctggggctgtgcccaggatgatgcgcccagggcctgggcagaactatccccgttccgggtttccattggaggtgagcaccccactgggtcaggggagggtgaaccagctcggaggagtatttattaacgggcgaccactgccaaatcacatacgccacaagatcgttgagatggcccaccacggtatcagaccttgtgtgatttcccgccagctccgggtctctcatggctgtgtcagtaagattctgtgtcggtaccaggagaccgggtccatccgtccaggagcgattggcggatcaaagccaaagcaagtcactacgcctgatgtggaaaaaaagattgaagagtataagcgcgagaacccgggtatgtttagctgggaaatccgggacaaactgttaaaagatgccgtttgcgaccggaacactgtgccatccgtctccagtatcagccgcatccttcgcagcaaattcggcaagggtgaggaagaagaggcagacctcgaaaggaaggaggcggaagagagtgaaaaaaaagctaaacatagtattgacggcatccttagtgaacgagcctctgcccctcagtctgacgagggctccgatattgatagtgagccagacctgcctctgaaaaggaaacaacggagatctcgcaccacattcaccgctgaacagctagaagagctcgaacgcgcttttgagagaactcactatccggacatatacacccgtgaggaactggcccagagagctaaactcaccgaggcacgagtacaggtgtggttctctaaccggagagccaggtggaggaaacaggcgggtgccaaccagctcatggcttttaatcacctgattcctggaggctttcctcccacagcaatgccgactctgccaacctaccagttgtcggaaactagttaccaaccgactagtatcccccaagcggtgtcagatccctcctccaccgtccataggcctcagccactgccgccatcaaccgtacaccaatctactatacccagcaaccctgattcatcctccgcttactgccttccttcgacaagacacggtttttcatcttacactgatagctttgtcccaccatccggcccatcgaatccaatgaatccaaccataggcaacggattgtctcctcaggtcccatttattatctcatcccagatctcacttggtttcaaatccttctag

SEQ ID NO: 254893 - DNA, 1224 bp, Artificial Sequence
  derived and/or modified sequence
atgaccaccctggccggcgccgtgcccagaatgatgagacccggccccggccagaactaccccagaagcggcttccccctggaggtgagcacccccctgggccagggcagagtgaaccagctgggcggcgtgttcatcaacggcagacccctgcccaaccacatcagacacaagatcgtggagatggcccaccacggcatcagaccctgcgtgatcagcagacagctgagagtgagccacggctgcgtgagcaagatcctgtgcagataccaggagaccggcagcatcagacccggcgccatcggcggcagcaagcccaagcaggtgaccacccccgacgtggagaagaagatcgaggagtacaagagagagaaccccggcatgttcagctgggagatcagagacaagctgctgaaggacgccgtgtgcgacagaaacaccgtgcccagcgtgagcagcatcagcagaatcctgagaagcaagttcggcaagggcgaggaggaggaggccgacctggagagaaaggaggccgaggagagcgagaagaaggccaagcacagcatcgacggcatcctgagcgagagagccagcgccccccagagcgacgagggcagcgacatcgacagcgagcccgacctgcccctgaagagaaagcagagaagaagcagaaccaccttcaccgccgagcagctggaggagctggagagagccttcgagagaacccactaccccgacatctacaccagagaggagctggcccagagagccaagctgaccgaggccagagtgcaggtgtggttcagcaacagaagagccagatggagaaagcaggccggcgccaaccagctgatggccttcaaccacctgatccccggcggcttcccccccaccgccatgcccaccctgcccacctaccagctgagcgagaccagctaccagcccaccagcatcccccaggccgtgagcgaccccagcagcaccgtgcacagaccccagcccctgccccccagcaccgtgcaccagagcaccatccccagcaaccccgacagcagcagcgcctactgcctgcccagcaccagacacggcttcagcagctacaccgacagcttcgtgccccccagcggccccagcaaccccatgaaccccaccatcggcaacggcctgagcccccaggtgcccttcatcatcagcagccagatcagcctgggcttcaagagcttctag

SEQ ID NO: 254894 - protein, 403 aa, Artificial Sequence
  derived and/or modified sequence
MTTLAGAVPRMMRPGPGQNYPRSGFPLEVSTPLGQGRVNQLGGVFINGRPLPNHIRHKIVEMAHHGIRPCVISRQLRVSHGCVSKILCRYQETGSIRPGAIGGSKPKQVTTPDVEKKIEEYKRENPGMFSWEIRDKLLKDAVCDRNTVPSVSSISRILRSKFGKGEEEEADLERKEAEESEKKAKHSIDGILSERASAPQSDEGSDIDSEPDLPLKRKQRRSRTTFTAEQLEELERAFERTHYPDIYTREELAQRAKLTEARVQVWFSNRRARWRKQAGANQLMAFNHLIPGGFPPTAMPTLPTYQLSETSYQPTSIPQAVSDPSSTVHRPQPLPPSTVHQSTIPSNPDSSSAYCLPSTRHGFSSYTDSFVPPSGPSNPMNPTIGNGLSPQVPFIISSQISRK

SEQ ID NO: 254895 - DNA, 1212 bp, Artificial Sequence
  derived and/or modified sequence
atgactaccttagccggcgccgtccctcgcatgatgcgacccggacccggtcagaactatcctaggagtggtttcccacttgaggtgagcacccccttgggccaggggcgggtcaaccaactgggcggggtgttcatcaatggtcgccctttgcccaatcatattcggcataagattgtcgagatggcacaccacggaatccgaccttgcgtcatctcgcggcagctaagagtgagccacgggtgtgtttctaagattctgtgccgctaccaggagacaggcagcatcagacctggtgccattggtggctccaaacccaaacaggtgactacaccagatgtggaaaagaaaatcgaagagtataagagggaaaatccgggaatgttttcgtgggagattagggacaaactgctgaaagatgctgtctgcgaccggaataccgtcccatccgtcagctccatctcccgcatcctgaggagcaaatttgggaaaggtgaggaagaagaagctgacctggagcgaaaggaggccgaagaaagcgagaaaaaggctaaacattccattgacgggatcttgagcgagcgggcatcggccccccagtcagatgaaggaagtgacattgactctgaacccgatctgcccttaaaacggaaacagcgcaggtcccgtaccacattcaccgctgagcaactggaggaattggagcgagcttttgagaggactcactaccctgatatttatacccgcgaggaactggcccagagagcgaagctaaccgaagcccgcgtgcaggtctggttctctaataggcgggctagatggcgtaagcaggccggcgccaaccagctgatggccttcaaccacctcatcccaggcgggttccctccgacagctatgccaactctccctacttaccaactcagtgagacgtcctaccaacctacatcgatcccccaagccgtatccgacccctcttccaccgttcaccggccccaacctctccctccatccacggtgcaccagagcacgattccaagcaatcccgattcttcctccgcatattgtctgcctagtacgaggcacggcttttcaagttacacggacagcttcgtgccccccagtggcccgtcgaaccccatgaacccaaccattggcaatgggctgtcaccgcaggtacccttcattatatcatcacagatcagccggaagtag

SEQ ID NO: 254896 - DNA, 1212 bp, Artificial Sequence
  derived and/or modified sequence
atgaccaccctggccggggctgtgcccaggatgatgaggcctggccctggccagaactaccccaggagcggcttccccctggaggtgtccacccccctgggccagggccgggtgaaccagctgggcggcgtcttcatcaatggccggcccctgcccaaccacatccgccacaagatcgtggagatggcccaccacggcatccggccctgcgtcatcagccggcagctgcgggtgagccacggctgtgtgtccaagatcctgtgccgctaccaggagaccggcagcatccggcctggggccatcggcggcagcaagcccaagcaggtgaccaccccagatgtggagaagaagattgaggagtacaagcgggagaaccctggcatgttctcctgggagatccgggacaagctgctgaaggatgctgtgtgtgacaggaacacagtgcccagcgtgagcagcatcagccgcatcctgcggagcaagtttgggaagggggaggaggaggaggccgacctggagaggaaggaggccgaggagagcgagaagaaggccaagcacagcattgatggcatcctgtctgagcgggccagcgccccccagagtgatgagggcagtgacattgattctgagccagacctgcccctgaagaggaagcagaggaggagcaggaccaccttcaccgctgagcagctggaggagctggagcgggcctttgagaggacccactacccagacatctacacccgggaggagctggcccagagggccaagctgacagaggcccgggtgcaggtgtggttcagcaacagaagagcccgctggaggaagcaggccggggccaaccagctgatggccttcaaccacctgatccctgggggcttccccccaacagccatgcccaccctgcccacctaccagctgtctgagaccagctaccagcccaccagcatcccccaggccgtgtctgaccccagcagcacagtgcaccggccccagcccctgccccccagcacagtgcaccagagcaccatccccagcaacccagacagcagcagcgcctactgcctgcccagcaccaggcatggcttcagcagctacacagacagctttgtgccccccagcggccccagcaaccccatgaaccccaccatcggaaatggcctgagcccccaggtgcccttcatcatcagcagccagatcagcaggaagtag

SEQ ID NO: 254897 - DNA, 1212 bp, Artificial Sequence
  derived and/or modified sequence
atgaccaccctggccggcgccgtgccccggatgatgcggcccggccccggccaaaactacccccgaagtggattccccttggaagtaagcacacccttgggccaggggcgcgtcaatcagctcgggggggtcttcatcaatggaaggccacttcccaaccacatccgtcacaaaatcgtggagatggcgcaccacggaattcggccttgcgtcatatcacggcagctccgcgtttcccacggctgcgtcagtaagatactgtgccggtaccaggagaccggcagtattaggcctggggccattggcggcagcaaacctaagcaggtgacgacaccggatgtggagaaaaagatcgaggagtacaagagagagaatcctggtatgtttagctgggagattagagacaaactcctgaaagatgctgtgtgtgataggaacacggtgccctccgtaagcagcatctcacggattttgcggagcaaattcggcaagggtgaggaggaggaggccgacttggagcgtaaggaggctgaggaatctgagaagaaggccaaacattctattgacggcattctgagcgaacgcgcctcagctccccagtcagacgaagggtcggatatcgattcggaacctgacctgcccctgaagcgcaagcagcggcgtagccggaccacgttcacggccgagcagcttgaggagctggaacgtgctttcgaaaggacccattatcccgatatctacaccagggaagaacttgcccagcgggccaaattgaccgaggccagagtgcaggtctggtttagtaaccgacgggccaggtggagaaagcaggccggtgccaaccagctgatggctttcaatcatctcatccccgggggcttcccgcccaccgcaatgccaactttgccaacgtatcagctgtccgaaacctcttaccagcctacttccattccccaggcagtaagtgatcctagcagcacagtgcacaggccacagcccctgccgccaagcaccgtgcaccagagtaccatcccttccaaccccgattcctccagcgcatactgtcttcccagcacgcgccatggcttttctagctacacagactcctttgtgcccccttccggcccatctaaccccatgaatcccacgatcggaaacggcctttcccctcaagtgcctttcatcattagctctcagatcagccgaaaatag

SEQ ID NO: 254898 - DNA, 3109 bp, Artificial Sequence
  derived and/or modified sequence
actcggtgtcaccacaggaggagactcaggcaggccgcgctccagcctcaccaggctccccggctcgccgtggctctctgagcccccttttcagggaccccagtcgctggaacatttgcccagactcgtaccaaacttttccgccctgggctcgggatcctggactccggggcctccccgtcctcccctttcccgggttccagctccggcctctggactaggaaccgacagcccccctccccgcgtccctccctctctctccagccgttttggggaggggctctccacgctccggatagttcccgagggtcatccgcgccgcactcgcctttccgtttcgccttcacctggatataatttccgagcgaagctgcccccaggatgaccacgctggccggcgctgtgcccaggatgatgcggccgggcccggggcagaactacccgcgtagcgggttcccgctggaagtgtccactcccctcggccagggccgcgtcaaccagctcggcggtgtttttatcaacggcaggccgctgcccaaccacatccgccacaagatcgtggagatggcccaccacggcatccggccctgcgtcatctcgcgccagctgcgcgtgtcccacggctgcgtctccaagatcctgtgcaggtaccaggagactggctccatacgtcctggtgccatcggcggcagcaagcccaagcaggtgacaacgcctgacgtggagaagaaaattgaggaatacaaaagagagaacccgggcatgttcagctgggaaatccgagacaaattactcaaggacgcggtctgtgatcgaaacaccgtgccgtcagtgagttccatcagccgcatcctgagaagtaaattcgggaaaggtgaagaggaggaggccgacttggagaggaaggaggcagaggaaagcgagaagaaggccaaacacagcatcgacggcatcctgagcgagcgagcctcagcaccccaatcagatgaaggctctgatattgactctgaaccagatttaccactaaagaggaaacagcgcagaagccgaaccaccttcacagcagaacagctggaggaactggagcgtgcttttgagagaactcattaccctgacatttatactagggaggaactggcccagagggcgaagctcaccgaggcccgagtacaggtctggtttagcaaccgccgtgcaagatggaggaagcaagctggggccaatcaactgatggctttcaaccatctcattcccggggggttccctcccactgccatgccgaccttgccaacgtaccagctgtcggagacctcttaccagcccacatctattccacaagctgtgtcagatcccagcagcaccgttcacagacctcaaccgcttcctccaagcactgtacaccaaagcacgattccttccaacccagacagcagctctgcctactgcctccccagcaccaggcatggattttccagctatacagacagctttgtgcctccgtcggggccctccaaccccatgaaccccaccattggcaatggcctctcacctcaggtgcctttcattatctcaagccagatatcgcgtaagtgaactgtccacttggagctaaaactggccctgtttctggtcttcgcagcctagatatgaagaatctgctctgaaaacaaaaaaaaattacccttttgttggggggggtggggcagtggtcccaataggagacaaaggagagtgattgattttcttcctccaatagttggtttcaaatccttttgaacacgttcgacaaaagcagtggagaagaggaagacctggagcaataaaagacaaatgcaacattttaaggcaatggtttcacatggttacatatcaaaacatcccaattctttagtgctgatcatcgaggagctagaacattccatttgcttgtgtgcgtgcgtgcgtgtgtgtgtgtgtgtgtgtattgagatttacccagactggtttgggcaagcagactgttctaaaatataatagaataccctaaagtataacatgtcgatgttcgatgctgatacttctacaactttaaaactgctcatttcatgaagcaagaatggaggaatccttgactcttacacactggaaattgaaataaagataaatgcaaccatttttaggaagctagactagctgtaaaggacctcctaaataaattatttgttactgtatcctcatttgtaatctagttgtcaataaatggcccggacatgtcttgctaacaggatatgggctaccaggaagaaggacttgtttccctttcctgtgtggggagaggtgtgtgacgtttttccagttcacatttatttggtagcccacctgggttggaggaagggcacggtggagagaaagtgacatgcattcacatatctgcttatcagtgtgcaatactgtgtacctcatggatgctttggcaatgcccaaggcgatataagcaaaatcagaagtatatttttgcaggtgcttttattttcacagcccataattcatagtgatagagtgcagtgatgtttgccatttgctggacaaccaacacccgggttgctcctttgattagagaccagatcagataattatgcttttaaactgattacgtttacattcttctcttttctatgaaaggcagggcaagaacagaagtgttcacatggctctcatgtacttttaaattatacaatgatatccaatattaaaagattataggaactgaggtttacatacgtttgtgtggtgacattttagaatgtcaataaatttgctttttgagatgttgagaggaacaagaaggtggaaggcagtgttatttatttctttctattcttggaaccacgaatgaggtaggcacaaatacattccttttagagttaagaactatgacgtagcgagttagtgagactagacatagtaccgaatttagttcatgcattggtcttagagggtgatggaacaagagaagtactatctttgtgttgcagcctcaaccaacaacaatgtgttgtaaaaatgtctttcatgtaaaaagtgcagtaaatatttactatttataatgaataaacagttatgaaaactt

SEQ ID NO: 254899 - DNA, 1212 bp, Artificial Sequence
  derived and/or modified sequence
atgactactctggccggagccgtgcccagaatgatgagacctggccctggtcaaaattaccctcgctcgggcttccccttggaagtgtccacacctctcggccagggccgagtcaatcagcttgggggagtcttcataaacgggcgtccccttcccaaccatattcgccacaaaattgtggaaatggcccaccacggtatccgcccatgtgtgatttcccgacaactcagggtctcacacggttgtgtgtccaagatcctctgcagatatcaggagaccggctccatccgtccgggagccatcggaggctctaagcctaagcaggtgacaactcctgatgtggagaaaaaaatcgaggagtacaagcgcgagaatcctggcatgttcagttgggagattcgtgacaaactcctgaaagacgcggtgtgtgatagaaacactgttccctctgtgtcttcaatctctagaattctccgcagcaagttcggcaaaggcgaggaggaggaggcggacctcgagcgtaaagaggcagaagagtccgaaaagaaggcaaaacactccatcgatggcatcctgtccgaaagagcaagcgcacctcagtctgatgagggatccgatatcgatagcgagccagatctcccactcaagaggaagcagaggaggtctcgcaccaccttcactgccgaacaactggaagagttagaacgcgcttttgaacgaacacattacccagacatctatacccgcgaagagcttgctcagcgggctaaactgacagaggcccgtgttcaagtatggttctccaacagacgcgcacggtggcggaagcaggctggcgctaaccaactgatggccttcaatcatcttattcccggtggcttccccccaaccgcaatgcccaccttaccaacatatcaattgtccgagacaagttatcagcccacttccattccgcaggcagtatcagacccaagctcaacagtgcaccgcccacaaccgctgcctccatcaactgtccaccagtcgactattcccagcaatcccgattcatcttctgcttattgtcttccatctacacgccacgggttcagtagttatacggactctttcgtcccccctagtggcccatccaatcctatgaatccaacaatcgggaatggtctgagcccacaggtgcccttcatcatctcatcacaaattagccgcaaatag

SEQ ID NO: 254900 - DNA, 1212 bp, Artificial Sequence
  derived and/or modified sequence
atgaccaccctggccggcgccgtgcccagaatgatgagacccggccccggccagaactaccccagaagcggcttccccctggaggtgagcacccccctgggccagggcagagtgaaccagctgggcggcgtgttcatcaacggcagacccctgcccaaccacatcagacacaagatcgtggagatggcccaccacggcatcagaccctgcgtgatcagcagacagctgagagtgagccacggctgcgtgagcaagatcctgtgcagataccaggagaccggcagcatcagacccggcgccatcggcggcagcaagcccaagcaggtgaccacccccgacgtggagaagaagatcgaggagtacaagagagagaaccccggcatgttcagctgggagatcagagacaagctgctgaaggacgccgtgtgcgacagaaacaccgtgcccagcgtgagcagcatcagcagaatcctgagaagcaagttcggcaagggcgaggaggaggaggccgacctggagagaaaggaggccgaggagagcgagaagaaggccaagcacagcatcgacggcatcctgagcgagagagccagcgccccccagagcgacgagggcagcgacatcgacagcgagcccgacctgcccctgaagagaaagcagagaagaagcagaaccaccttcaccgccgagcagctggaggagctggagagagccttcgagagaacccactaccccgacatctacaccagagaggagctggcccagagagccaagctgaccgaggccagagtgcaggtgtggttcagcaacagaagagccagatggagaaagcaggccggcgccaaccagctgatggccttcaaccacctgatccccggcggcttcccccccaccgccatgcccaccctgcccacctaccagctgagcgagaccagctaccagcccaccagcatcccccaggccgtgagcgaccccagcagcaccgtgcacagaccccagcccctgccccccagcaccgtgcaccagagcaccatccccagcaaccccgacagcagcagcgcctactgcctgcccagcaccagacacggcttcagcagctacaccgacagcttcgtgccccccagcggccccagcaaccccatgaaccccaccatcggcaacggcctgagcccccaggtgcccttcatcatcagcagccagatcagcagaaagtag

SEQ ID NO: 254901 - protein, 226 aa, Artificial Sequence
  derived and/or modified sequence
MAVRASFENNCEIGCFAKLTNTYCLVAIGGSENFYRCGGSPGAYGGGEACAGVKSSGSGRVPAPLPRHHRVHVPTVCSRASSPIPSPWCTRLSPAAASSGACVWETEEILADVLKVEVFRQTVADQVLVGSYCVFSNQGGLVHPKTSIEDQDELSSLLQVPLVAGTVNRGSEVIAAGMVVNDWCAFCGLDTTSTELSVVESVFKLNEAQPSTIATSMRDSLIDSLT

SEQ ID NO: 254902 - DNA, 1017 bp, Artificial Sequence
  derived and/or modified sequence
tccaaggtacagtcgccgcgtgcggagcttgttactggttacttggcctcatggcggtccgagcttcgttcgagaacaactgtgagatcggctgctttgccaagctcaccaacacctactgtctggtagcgatcggaggctcagagaacttctacaggtgcggcgggagccccggggcttacggtggcggggaggcgtgcgcaggagtcaagagctccggcagtgggagggtgccggcccctctgccccgccaccaccgagtccatgtccctacagtgtgttcgagggcgagctctccgataccatccccgtggtgcacgcgtctatcgccggctgccgcatcatcgggcgcatgtgtgtgggagacagaagaaattctggcagatgtgctcaaggtggaagtcttcagacagacagtggccgaccaggtgctagtaggaagctactgtgtcttcagcaatcagggagggctggtgcatcccaagacttcaattgaagaccaggatgagctgtcctctcttcttcaagtcccccttgtggcggggactgtgaaccgaggcagtgaggtgattgctgctgggatggtggtgaatgactggtgtgccttctgtggcctggacacaaccagcacagagctgtcagtggtggagagtgtcttcaagctgaatgaagcccagcctagcaccattgccaccagcatgcgggattccctcattgacagcctcacctgagtcaccttccaagttgttccatgggctcctggctctggactgtggccaaccttctccacattccgcccaatctgtaccggatgctggcagggaggtggcagagagctcactgggactgaggggctgggcacccaacccttttccacctgtgcttatcgcctggatctatcattactgcaaaaacctgctctgttgtgctggctggcaggccctgtggctgctggctgagggttctgctgtcctgtgccaccccattaaagtgcagttccctccgggccattctgaa

SEQ ID NO: 254903 - DNA, 681 bp, Artificial Sequence
  derived and/or modified sequence
atggcagtgcgtgcgagcttcgagaataactgcgaaataggatgcttcgcaaaattgaccaatacctattgtttggtggccattggtggttccgaaaatttttatcgctgtggcgggtcacctggcgcctatggcggcggagaagcctgtgcaggggtcaaatcaagcggttccgggcgcgtgcctgcacccctgccccgacatcatcgcgtacatgtaccgacggtctgcagtcgggcctcctcacccatcccaagcccttggtgcacccggctgagtcccgcagccgcctcttcgggcgcatgcgtttgggagacagaggaaattctagctgatgtacttaaggtcgaggtgttccggcagactgtggccgaccaggttttggttgggtcatactgcgtcttttcaaaccaaggaggtctcgttcacccaaagaccagtattgaagatcaggacgagctgtcgtccttattgcaagtcccactcgtcgcaggaacagtcaatagggggtctgaggtgatcgccgctggaatggtggtgaatgattggtgcgccttttgcggccttgacaccacctcgactgagctgtccgtggtggagtcagtcttcaagctcaatgaagctcagccctctacaatcgcaacctcgatgcgtgacagtctcatcgacagtctgacatag

SEQ ID NO: 254904 - DNA, 681 bp, Artificial Sequence
  derived and/or modified sequence
atggctgtgcgggccagctttgagaacaactgtgaaattggctgctttgccaagctgaccaacacctactgcctggtggccatcggcggcagcgagaacttctaccgctgtggcggcagccctggggcctacggcggcggggaggcctgtgccggcgtgaagagcagcggcagcggccgggtgcctgcccccctgcccaggcaccaccgggtgcacgtgcccaccgtgtgcagccgggccagcagccccatccccagcccctggtgcacccggctgagccctgctgctgccagcagcggggcctgtgtgtgggagacagaggagatcctggctgatgtgctgaaggtggaggtgttccggcagacagtggccgaccaggtgctggtgggcagctactgtgtgttcagcaaccagggcggcctggtgcaccccaagaccagcattgaggaccaggatgagctgagcagcctgctgcaggtgcccctggtggccggcaccgtgaacagaggcagcgaggtgattgctgctggcatggtggtgaatgactggtgtgccttctgtggcctggacaccaccagcacagagctgtctgtggtggagagcgtcttcaagctgaatgaggcccagcccagcaccatcgccacctccatgagggacagcctgattgacagcctgacctag

SEQ ID NO: 254905 - DNA, 681 bp, Artificial Sequence
  derived and/or modified sequence
atggccgtgcgggccagcttcgagaacaactgcgagatcggctgcttcgccaaactgactaatacctactgtctggtagccatcgggggatcggaaaatttttaccgttgcgggggcagccctggggcttacggcgggggcgaagcctgtgccggcgttaaaagttctggaagcgggagggtgcctgccccactgcctcgacatcatcgcgttcacgtgcctacggtgtgctcaagagcctcatctcctatcccaagtccttggtgtacgagactcagtcccgcagccgcctcttctggcgcttgtgtgtgggaaaccgaggagatactcgctgacgtgctgaaggtggaagtgttccggcagacagtggcagaccaggtgttggttgggtcttactgcgtctttagcaaccaaggtgggttagtgcatcccaaaacttcaatcgaagaccaggatgaactgtcttccctattacaagttccgctggtagcggggacagtaaatcggggctccgaagtgatagctgccgggatggttgtgaacgattggtgcgctttctgtgggctggacaccacctcgactgagctgtctgtggtggaaagtgtatttaagctgaatgaagcgcagccatcaaccattgcaaccagtatgagggactcccttattgatagtttaacctag

SEQ ID NO: 254906 - DNA, 681 bp, Artificial Sequence
  derived and/or modified sequence
atggccgtgagggcttcattcgaaaacaactgcgaaatcgggtgcttcgccaagctgaccaacacatactgccttgtcgctatcgggggatctgagaacttttataggtgcggaggctcgcccggtgcttacggtgggggtgaggcctgtgccggagtgaaatcttctggctccggaagggtgccagcccctctcccgcgacaccacagagtccatgtccccacagtttgctcaagagccagcagtccgatacctagcccatggtgtactcgtctgagtcctgccgctgcttcaagcggggcatgtgtgtgggagaccgaggagatccttgccgacgtgctcaaggtggaggtgttcaggcaaaccgtggcggaccaggtcctggtcggctcctactgcgtcttttccaatcaaggcggattggtgcacccaaagacttccatcgaagatcaagacgaactgagttcacttctccaagtgccactggtcgcaggaaccgtcaataggggcagtgaggtgatcgcagccggtatggtggtgaacgattggtgtgcattctgcggtctggacactacaagtacagagctgagtgtagttgaatccgtgttcaagctgaatgaagcgcagccaagcaccatcgcgacctcaatgcgggattcgcttattgacagcctgacttag

SEQ ID NO: 254907 - DNA, 681 bp, Artificial Sequence
  derived and/or modified sequence
atggccgtgagagccagcttcgagaacaactgcgagatcggctgcttcgccaagctgaccaacacctactgcctggtggccatcggcggcagcgagaacttctacagatgcggcggcagccccggcgcctacggcggcggcgaggcctgcgccggcgtgaagagcagcggcagcggcagagtgcccgcccccctgcccagacaccacagagtgcacgtgcccaccgtgtgcagcagagccagcagccccatccccagcccctggtgcaccagactgagccccgccgccgccagcagcggcgcctgcgtgtgggagaccgaggagatcctggccgacgtgctgaaggtggaggtgttcagacagaccgtggccgaccaggtgctggtgggcagctactgcgtgttcagcaaccagggcggcctggtgcaccccaagaccagcatcgaggaccaggacgagctgagcagcctgctgcaggtgcccctggtggccggcaccgtgaacagaggcagcgaggtgatcgccgccggcatggtggtgaacgactggtgcgccttctgcggcctggacaccaccagcaccgagctgagcgtggtggagagcgtgttcaagctgaacgaggcccagcccagcaccatcgccaccagcatgagagacagcctgatcgacagcctgacctag

SEQ ID NO: 254908 - protein, 354 aa, Artificial Sequence
  derived and/or modified sequence
MEVEAVCGGAGEVEAQDSDPAPAFSKAPGSAGHYELPWVEKYRPVKLNEIVGNEDTVSRLEVFAREGNVPNIIIAGPPGTGKTTSILCLARALLGPALKDAMLELNASNDRGIDVVRNKIKMFAQQKVTLPKGRHKIIILDEADSMTDGAQQALRRTMEIYSKTTRFALACNASDKIIEPIQSRCAVLRYTKLTDAQILTRLMNVIEKERVPYTDDGLEAIIFTAQGDMRQALNNLQSTFSGFGFINSENVFKVCDEPHPLLVKEMIQHCVNANIDEAYKILAHLWHLGYSPEDIIGNIFRVCKTFQMAEYLKLEFIKEIGYTHMKIAEGVNSLLQMAGLLARLCQKTMAPVAS

SEQ ID NO: 254909 - DNA, 1065 bp, Artificial Sequence
  derived and/or modified sequence
atggaggtagaggcagtgtgtgggggggctggcgaggttgaagcccaggactctgaccctgccccagcatttagcaaggctccagggtctgccgggcactatgagctgccctgggtggaaaagtaccggcctgtgaaactgaatgagatagtcggcaacgaagacactgtcagccgacttgaggtattcgctcgggaggggaacgtgccaaatatcataattgcagggccccctggaaccggtaagacaacgagcatactgtgccttgctcgagccttactcggccccgctttgaaggatgccatgctcgaactgaatgccagcaacgaccgggggatcgatgtcgtcagaaacaagataaaaatgtttgctcagcagaaggtgaccctccctaagggcaggcataaaatcattatactcgatgaagcagatagtatgaccgacggagctcagcaagcgctgcgccgcaccatggagatttattcaaagactacccgctttgccctcgcctgcaacgcctccgacaagattatcgagcctatccagagtcgatgtgctgtgcttcggtacaccaaactgaccgacgcgcaaatcctgactagactgatgaacgtgattgaaaaggaacgggtgccttataccgacgatggtctggaggccatcattttcacagcccagggtgatatgcgccaggctttaaacaatctgcaatctaccttctccgggtttggattcattaattccgaaaacgtgtttaaagtttgcgacgaaccacacccgctgctagtcaaggagatgattcagcactgtgtgaacgccaacattgatgaggcctacaaaattctggctcatttgtggcacctgggatactcccccgaggacatcatcggtaacatcttccgggtttgtaaaacattccaaatggcggaatacttgaaactggaatttattaaggagatcggatacacccatatgaaaatcgcagagggggtcaactcgctgctacagatggcaggactgctggcacgactctgccaaaagacgatggctcctgtggccagctag

SEQ ID NO: 254910 - DNA, 1065 bp, Artificial Sequence
  derived and/or modified sequence
atggaggtggaggccgtgtgtggcggggccggggaggtggaggcccaggacagcgaccctgccccagccttcagcaaggcccctggcagcgctggccactatgagctgccctgggtggagaagtacagacctgtgaagctgaatgagatcgtgggcaatgaagacacagtgtcccggctggaggtgtttgcccgggagggcaatgtgcccaacatcatcatcgccggccccccaggcaccgggaagaccaccagcatcctgtgcctggcccgggccctgctgggccctgccctgaaggatgccatgctggagctgaatgccagcaatgaccggggcattgatgtggtgaggaacaagatcaagatgtttgcccagcagaaggtgaccctgcccaagggccgccacaagatcatcatcctggatgaagctgacagcatgacagatggagcccagcaggccctgcggaggaccatggagatctacagcaagaccaccaggtttgccctggcctgcaatgccagtgacaagatcatcgagcccatccagagccgctgtgctgtgctgcgctacaccaagctgacagatgcccagatcctgacccggctgatgaatgtcatcgagaaggagcgggtgccctacacagatgatggcctggaggccatcatcttcaccgcccagggcgacatgaggcaggccctgaacaacctgcagagcaccttcagcggcttcggcttcatcaacagtgaaaatgtgttcaaggtgtgtgatgagccccaccccctgctggtgaaggagatgatccagcactgtgtgaatgccaacattgatgaggcctacaagatcctggcccacctgtggcacctgggctacagccctgaggacatcatcggcaacatcttccgggtgtgcaagaccttccagatggccgagtacctgaagctggagttcatcaaggagatcggctacacccacatgaagattgctgagggcgtgaacagcctgctgcagatggccggcctgctggcccggctgtgccagaagaccatggcccctgtggccagctag

SEQ ID NO: 254911 - DNA, 1065 bp, Artificial Sequence
  derived and/or modified sequence
atggaggtggaggccgtgtgcggcggcgccggcgaggtggaggcccaagactcagatcccgcacctgcctttagcaaggcgcctggcagcgcagggcactacgaattaccgtgggtcgagaaatacagaccagtcaaattgaacgaaattgtaggcaacgaggatacggttagtcgccttgaggtcttcgcccgggagggcaatgtgcctaacattattatagcaggcccccccgggaccgggaagactacatcgatcctatgtttagcgagggcattactgggtccagcattaaaggacgctatgctagaactgaacgcatccaatgaccgtggcattgatgttgtccggaataaaatcaagatgtttgcccagcagaaggtaactctgcctaaaggacggcacaagatcattatcttagacgaagccgattctatgacagatggcgcccagcaggccctccggagaactatggaaatttattccaagacgacaaggttcgcactcgcctgtaacgcatccgataaaatcatcgaaccgatccagagccgctgcgccgtgctccggtataccaaactaactgacgcgcagatcttgacccgccttatgaacgtgatcgagaaggagagggtcccgtacacagacgatggactggaggccatcattttcacagcacaaggagatatgagacaagccctcaacaatctgcagtctaccttttctggcttcggatttattaacagtgaaaatgttttcaaagtgtgtgatgaaccccacccactgttagtgaaggagatgattcagcactgtgtgaatgctaatattgacgaggcttataaaattctcgcccacctctggcatctggggtattctcccgaagacatcataggaaacattttcagggtgtgtaaaaccttccagatggctgaataccttaaactggagtttattaaggagatcggatatacccacatgaagatcgctgaaggggttaatagcctcttacagatggctggtctgctggccaggctctgtcaaaaaaccatggctcccgtagcctcttag

SEQ ID NO: 254912 - DNA, 1065 bp, Artificial Sequence
  derived and/or modified sequence
atggaggtcgaagcagtgtgcggcggtgctggagaggtggaagcacaagattcagaccccgcacccgcattcagcaaggcccctgggtcagctggccactatgaactcccgtgggtcgagaaatatcgacccgttaagctcaatgaaatagtgggaaatgaggataccgtctccagactggaagtgtttgcaagagaggggaacgtaccgaatatcattattgcaggcccaccagggactggtaagaccacaagcatactttgccttgcacgggcattacttggacctgccctgaaggacgcaatgctcgaactgaacgccagtaacgacaggggaatagatgtggttcggaataagattaagatgttcgctcagcagaaggttaccctcccaaagggcagacataaaatcatcatcctggacgaggcggatagcatgacggacggtgcacagcaggccttaaggcgaacgatggagatctattccaagacgactcggtttgctttggcttgcaatgcctcagacaagattattgagcctattcaatctcgatgtgccgtgctccgctataccaaactcactgacgcccagatcttaacacgacttatgaatgtgatcgaaaaagagcgagttccctacacagatgatggcctggaagctatcattttcaccgcccagggcgacatgcggcaggccctgaacaatctacaatctactttttccgggttcgggttcataaatagtgagaacgtctttaaggtttgcgatgaacctcatcctctgttggtgaaagaaatgatacagcactgcgttaatgcaaatatagacgaggcatacaagatcctggcccatctctggcacctggggtatagccctgaagatattatcgggaacatatttagggtctgcaagacgttccagatggcagagtatctgaagctggagtttatcaaggaaatcggctacacacacatgaagatagccgaaggggtcaatagccttctccaaatggccggtctgctggctaggctctgtcaaaagaccatggcccctgtggcaagctag

SEQ ID NO: 254913 - DNA, 1065 bp, Artificial Sequence
  derived and/or modified sequence
atggaggtagaagctgtttgtggtggagcaggtgaagtagaggctcaggattctgaccctgctcctgcattcagcaaagcaccgggttccgcgggacattacgagctgccgtgggtggaaaagtatcgcccggtgaagctgaacgagattgtggggaacgaggacacagtgagccgcctggaggtctttgctagagaaggtaacgtccccaacatcatcattgcaggaccgcctgggaccggaaagacaacatcgattctgtgtctggcaagggcactactgggaccggctctgaaggatgctatgctggagctgaacgcgagtaatgatcgcggcatcgatgtggtcagaaacaaaatcaagatgtttgcacagcagaaggtcactctgcctaaaggtagacacaagatcatcatcttagacgaagcagactcaatgaccgacggggcacaacaagctctccgccgaaccatggaaatctacagtaaaacaactaggtttgcgctcgcatgtaatgcttccgacaaaataatcgagccaattcagtcaaggtgtgccgttttgcgctatacaaagttgactgacgcccaaattctgacaagactcatgaacgtgatagaaaaagaacgcgtgccatatacagatgatggcctcgaagccattatttttactgcacagggagatatgaggcaagctctgaataatttgcaatctaccttcagtggattcggatttataaactccgagaatgtgtttaaggtctgtgacgaacctcacccactgctggtcaaagagatgattcaacactgcgtaaacgccaatatcgatgaagcatacaaaattcttgctcatctatggcatctgggatactcacctgaggacatcataggaaatatatttcgggtctgtaaaacatttcagatggccgagtatttaaaactggaattcatcaaggaaatcggatatacgcacatgaagatcgccgagggagtaaactccctgttgcagatggcagggctgctggctcgtctgtgccagaagacaatggccccggtggcgtcctag

SEQ ID NO: 254914 - DNA, 1065 bp, Artificial Sequence
  derived and/or modified sequence
atggaggtagaagccgtgtgcggtggagcaggcgaagtcgaagcccaggattcggaccccgcgccagcctttagcaaagccccaggaagtgctggccactacgaactaccctgggttgaaaagtatagacctgtgaaattaaacgaaatagtggggaatgaagacaccgtctcacgcctagaagtgttcgcacgggaaggaaatgtgcctaacatcataatcgcagggccaccggggaccggaaaaactaccagtattctgtgtttggcccgcgccttactgggacctgccctgaaagatgcaatgctcgagctcaatgcctccaatgatagaggtatcgacgttgtgagaaataaaatcaagatgtttgcacagcagaaagtaactctccccaaaggcaggcacaaaatcatcattctggacgaggctgacagtatgaccgatggagctcagcaggctctccgccggactatggaaatttattcaaaaaccacacggttcgcgcttgcatgtaacgcctccgataagatcatcgaaccaatccaaagtagatgtgctgtgctcagatatacaaagcttacagatgcccagatccttacccgtctgatgaatgtgatcgagaaagagcgggttccctatacagacgacggacttgaggctatcatcttcaccgcccagggagatatgcgccaggcccttaataatctacagagcactttcagcggttttggattcatcaacagtgaaaacgtgtttaaggtgtgtgatgagccccatcctttattagtaaaagaaatgatccaacattgtgttaatgccaacatcgacgaagcctataagattctggcacacctctggcatttgggctattccccagaggacatcattggcaatatatttagagtttgtaaaacttttcagatggctgagtacttgaagctggaatttatcaaggagattgggtatacacatatgaagatcgctgaaggagtcaattccttactccagatggcaggattgctggccaggctgtgtcagaagaccatggcgcccgtagcttcctag

SEQ ID NO: 254915 - DNA, 1695 bp, Artificial Sequence
  derived and/or modified sequence
ggggcttgcgtggcggcgtcaaggggcggtgcctcgggtggcgggaagaggaggcgcgagaatggaggtggaggccgtctgtggtggcgcgggcgaggtggaggcccaggactctgaccctgcccctgccttcagcaaggcccccggcagcgccggccactacgaactgccgtgggttgaaaaatataggccagtaaagctgaatgaaattgtcgggaatgaagacaccgtgagcaggctagaggtctttgcaagggaaggaaatgtgcccaacatcatcattgcgggccctccaggaaccggcaagaccacaagcattctgtgcttggcccgggccctgctgggcccagcactcaaagatgccatgttggaactcaatgcttcaaatgacaggggcattgacgttgtgaggaataaaattaaaatgtttgctcaacaaaaagtcactcttcccaaaggccgacataagatcatcattctggatgaagcagacagcatgaccgacggagcccagcaagccttgaggagaaccatggaaatctactctaaaaccactcgcttcgcccttgcttgtaatgcttcggataagatcatcgagcccattcagtcccgctgtgcagtcctccggtacacaaagctgaccgacgcccagatcctcaccaggctgatgaatgttatcgagaaggagagggtaccctacactgatgacggcctagaagccatcatcttcacggcccagggagacatgaggcaggcgctgaacaacctgcagtccaccttctcaggatttggcttcattaacagtgagaacgtgttcaaggtctgtgacgagccccacccactgctggtaaaggagatgatccagcactgtgtgaatgccaacattgacgaagcctacaagattcttgctcacttgtggcatctgggctactcaccagaagatatcattggcaacatctttcgagtgtgtaaaactttccaaatggcagaatacctgaaactggagtttatcaaggaaattggatacactcacatgaaaatagcggaaggagtgaactctcttttgcagatggcaggcctcctggcaaggctgtgtcagaagacaatggccccggtggccagttagagcagagacttcactgactgacttacaggtgccctattctgaggtacaggagccgcggctttctgatgggggaaaatgccgccttaggctggagccaacatgactgtcctttaaactccagtggctggccaggcacggtagctcacgcctgtaatcccaacactttgggaggccgaggcaggtggatcacctgaggtcagaagttcaagaccagcctggccaacatggggaaaccctgtctttactaaaaatataaaaattagctgggtgtggtggcgggcacctgtaatcccagctactcgggaggctgtggcaggagaatcgcttgaacccaggaggtggaggttgcagtgagccaagatcacaccattgcactccagcctgggcgacagagtctccatctggggaaaaaaattaaataaataaactcccgtgacttgcatgtttgcttctgggacgtctgtgccccgcaagtgtttgagtttggcctccaccccattgatgcggtgacggggcggaaaggcgcagagaagctgagggcggtctctgatctgtgtgtgggttgacat

SEQ ID NO: 254916 - DNA, 1065 bp, Artificial Sequence
  derived and/or modified sequence
atggaggtggaggccgtgtgcggcggcgccggcgaggtggaggcccaggacagcgaccccgcccccgccttcagcaaggcccccggcagcgccggccactacgagctgccctgggtggagaagtacagacccgtgaagctgaacgagatcgtgggcaacgaggacaccgtgagcagactggaggtgttcgccagagagggcaacgtgcccaacatcatcatcgccggcccccccggcaccggcaagaccaccagcatcctgtgcctggccagagccctgctgggccccgccctgaaggacgccatgctggagctgaacgccagcaacgacagaggcatcgacgtggtgagaaacaagatcaagatgttcgcccagcagaaggtgaccctgcccaagggcagacacaagatcatcatcctggacgaggccgacagcatgaccgacggcgcccagcaggccctgagaagaaccatggagatctacagcaagaccaccagattcgccctggcctgcaacgccagcgacaagatcatcgagcccatccagagcagatgcgccgtgctgagatacaccaagctgaccgacgcccagatcctgaccagactgatgaacgtgatcgagaaggagagagtgccctacaccgacgacggcctggaggccatcatcttcaccgcccagggcgacatgagacaggccctgaacaacctgcagagcaccttcagcggcttcggcttcatcaacagcgagaacgtgttcaaggtgtgcgacgagccccaccccctgctggtgaaggagatgatccagcactgcgtgaacgccaacatcgacgaggcctacaagatcctggcccacctgtggcacctgggctacagccccgaggacatcatcggcaacatcttcagagtgtgcaagaccttccagatggccgagtacctgaagctggagttcatcaaggagatcggctacacccacatgaagatcgccgagggcgtgaacagcctgctgcagatggccggcctgctggccagactgtgccagaagaccatggcccccgtggccagctag

SEQ ID NO: 254917 - protein, 142 aa, Artificial Sequence
  derived and/or modified sequence
MSHGAGLVRTTCSSGSALGPGAGAAQPSASPLEGLLDLSYPRTHAALLKVAQMVTLLIAFICVRSSLWTNYSAYSYFEVVTICDLIMILAFYLVHLFRFYRVLTCISWPLSIFGFMATFLCMASIWLSYKISCVTQSTDAAV

SEQ ID NO: 254918 - DNA, 429 bp, Artificial Sequence
  derived and/or modified sequence
atgagccacggcgcgggtttagtgagaacgacctgttcttccggcagcgcgctaggcccgggtgcaggcgccgcacagccgtctgcctcccccctggaggggctgctggacctgagttatcccaggacacatgccgctctgctgaaagttgctcagatggtcactttgctcattgcatttatctgcgttcgctcgagcctctggacaaactatagcgcatattcctatttcgaggtcgtgacaatctgcgatctcattatgatcctggccttttatttggtgcacctgtttagattttaccgtgtacttacctgcatttcatggcctctctccatctttggtttcatggccactttcctatgtatggcatccatttggttgtcctataagatctcatgcgttactcagtctactgatgcggctgtttag

SEQ ID NO: 254919 - DNA, 429 bp, Artificial Sequence
  derived and/or modified sequence
atgagccatggagctggcctggtgaggaccacctgcagcagcggcagcgccctgggccctggggccggggccgcccagcccagcgccagccccctggagggcctgctggacctgagctaccccaggacccatgctgccctgctgaaggtggcccagatggtgaccctgctgattgccttcatctgtgtgcgcagcagcctgtggaccaactacagcgcctacagctactttgaggtggtgaccatctgtgacctgatcatgatcctggccttctacctggtgcacctgttccgcttctacagagtgctgacctgcatctcctggcccctgagcatcttcggcttcatggccaccttcctgtgcatggccagcatctggctgagctacaagatcagctgtgtgacccagagcacagatgctgctgtgtag

SEQ ID NO: 254920 - DNA, 429 bp, Artificial Sequence
  derived and/or modified sequence
atgagccacggcgccggcctggtgcggaccacctgcagcagcggctctgcattaggcccaggagccggagctgctcagcccagtgcttcacctttggaaggactactggacctctcatacccccggacgcacgcagctcttctaaaggtagcgcagatggtcaccctactgatcgcattcatctgcgtcaggtctagcctgtggacaaactactccgcctattcctattttgaggtcgtcacaatatgcgaccttatcatgatcttagccttctatctggtgcatctgttcagattctatagggtgctaacgtgcatctcttggcccctttctatcttcggctttatggccacctttctgtgtatggctagtatatggctttcctataagatcagttgcgtgacccaatccacggacgctgctgtctag

SEQ ID NO: 254921 - DNA, 429 bp, Artificial Sequence
  derived and/or modified sequence
atgagccacggtgccggactggtaaggaccacatgcagttcagggagtgctctgggccctggtgcaggcgcagcccagccctctgctagtccgctagagggactgttggacctgagttaccctcgtacccatgcagccctgttaaaagtcgctcagatggtaacactgttgatcgcctttatatgcgtacggtcttccctatggacaaactattcagcctactcatactttgaagtggtgactatttgtgatcttattatgatcctggccttctacctggtccacctgttcagattctacagggtgctgacttgtatatcctggccactatctatctttggattcatggccactttcctctgtatggcgagtatttggctgtcgtataaaataagctgcgtaactcaaagcacagatgcggcagtgtag

SEQ ID NO: 254922 - DNA, 1214 bp, Artificial Sequence
  derived and/or modified sequence
ccgggactgccgctacctttctggaaggcgccggccggccagtcaccggagggatcccgccagaggcggctccgcgtctccagcagcggggcagggacccgggcgccccgccctcgccagcgcccgcccccgcccgcccccggcccgccctctgtatctggcccctgggcagctgcccggggaggcggccagcgagctggggccgcgcaatgtcgcacggagccgggctcgtccgcaccacgtgcagcagcggcagcgcgctcggacccggggccggcgcggcccagcccagcgcgagccccttggaggggctgctggacctcagctacccccgcacccacgcggccctgctgaaagtggcgcaaatggtcaccctgctgattgccttcatctgtgtgcggagctccctgtggaccaactacagcgcctacagctactttgaagtggtcaccatttgcgacttgataatgatcctcgccttttacctggtccacctcttccgcttctaccgcgtgctcacctgtatcagctggcccctgtcgatctttggtttcatggccaccttcctctgcatggcaagcatatggctgtcctataagatctcgtgtgtaacccagtccacagatgcagccgtctgatgaggccacaacccctaggcccctcaggagctttgcagagaggaggacgtgtactccaggcgaggcctctggacctgtgttcctgtgccaaagtcctgtcaggctggtgggcaccaggaaaggcctgcaccctcttcctgctctcccaggaagccagctccctgagctcctgagccagccggaaactcttcctccagccttccggggagaacatccctcccattctgggaaaggaaagcagcctccagggaaatgttttctgccttcctgcttctagaaccacctcaggtactgatgaaccccacttagcacagctgaaggggtttgtgaatactcccgcctaaatcccttctacttcactcctcaggggagtgaagtgccttaagaaacaaagccctgtcctaatttatctagcttgtcagtccggtcttagagataccctctttcctgaagtgaggcgtgcctgtagaaacactatgtggtcagcctgtccccaaggagatcttgtgtctcctctccatctctgcctttgttaccagtgtgcatgtgtttgtgtgttttttaataaaatattga

SEQ ID NO: 254923 - DNA, 429 bp, Artificial Sequence
  derived and/or modified sequence
atgagccacggcgccggcctggtgagaaccacctgcagcagcggcagcgccctgggccccggcgccggcgccgcccagcccagcgccagccccctggagggcctgctggacctgagctaccccagaacccacgccgccctgctgaaggtggcccagatggtgaccctgctgatcgccttcatctgcgtgagaagcagcctgtggaccaactacagcgcctacagctacttcgaggtggtgaccatctgcgacctgatcatgatcctggccttctacctggtgcacctgttcagattctacagagtgctgacctgcatcagctggcccctgagcatcttcggcttcatggccaccttcctgtgcatggccagcatctggctgagctacaagatcagctgcgtgacccagagcaccgacgccgccgtgtag

SEQ ID NO: 254924 - protein, 288 aa, Artificial Sequence
  derived and/or modified sequence
MPEAGFQATNAFTECKFTCTSGKCLYLGSLVCNQQNDCGDNSDEENCLLVTEHPPPGIFNSELEFAQIIIIVVVVTVMVVVIVCLLNHYKVSTRSFINRPNQSRRREDGLPQIMHAPRSRDRFTAPSFIQRDRFSRFQPTYPYVQHEIDLPPTISLSDGEEPPPYQGPCTLQLRDPEQQMELNRESVRAPPNRTIFDSDLIDIAMYSGGPCPPSSNSGISASTCSSNGRMEGPPPTYSEVMGHHPGASFLHHQRSNAHRGSRLQFQQNNAESTIVPIKGKDRKPGNLV

SEQ ID NO: 254925 - DNA, 867 bp, Artificial Sequence
  derived and/or modified sequence
atgcccgaagccggcttccaggcaaccaatgccttcacggagtgcaagtttacctgtacgagcgggaagtgtctctatctgggcagtctggtgtgcaatcagcaaaacgattgcggggataactcggacgaagagaactgtctgctagttacagaacaccccccaccgggtatcttcaactcagagcttgaattcgctcagataattatcattgtggtggttgtgacagtcatggtcgtggttattgtgtgcttgctcaatcattacaaagtctcaacccgatccttcatcaacaggcccaaccagagtaggcgaagggaagacggactaccgcagattatgcacgccccccgttctagggacagatttacagccccttcctttattcaaagagacagattttccagatttcagccaacctatccttacgttcaacacgaaatcgatttgcctcctaccatatctctgtccgatggcgaagagccccctccctaccaaggaccttgcaccttgcagctgcgcgacccagaacagcagatggagctgaaccgggagtcagtacgcgctccccctaatagaacaatctttgattcagatcttattgatatcgcgatgtactccggcggcccttgcccaccctctagtaattctggcatttcggctagcacctgcagtagcaacggtcggatggaagggcctcccccaacgtattcagaggtgatggggcatcatcccggggccagttttttgcaccaccagaggagtaacgcgcaccggggctctaggctccaattccagcagaataacgccgaaagcacgattgtgccgatcaaggggaaagacaggaaacctggaaatctggtgtag

SEQ ID NO: 254926 - DNA, 867 bp, Artificial Sequence
  derived and/or modified sequence
atgcctgaggccggcttccaggccaccaatgccttcacagagtgcaagttcacctgcaccagcggcaagtgcctgtacctgggcagcctggtgtgcaaccagcagaatgactgtggggacaacagtgatgaggagaactgcctgctggtgacagagcaccccccacctggcatcttcaacagcgagctggagtttgcccagatcatcatcatcgtggtggtggtgacagtgatggtggtggtgattgtgtgcctgctgaaccactacaaggtgtccaccaggagcttcatcaaccggcccaaccagagcagaagaagagaagatggcctgccccagatcatgcacgcccccaggagccgggaccgcttcaccgcccccagcttcatccagagggaccgcttcagccgcttccagcccacctacccctacgtgcagcacgagattgacctgccccccaccatcagcctgagtgatggagaggagcccccaccctaccagggcccctgcaccctgcagctgcgggaccctgagcagcagatggagctgaaccgggagagcgtgcgggccccacccaacagaaccatctttgacagcgacctgattgatattgccatgtacagcggcggcccctgcccccccagcagcaacagcggcatcagcgccagcacctgcagcagcaatggaaggatggagggccccccacccacctacagcgaggtgatgggccaccaccctggggccagcttcctgcaccaccagaggagcaatgcccaccggggcagccggctgcagttccagcagaacaatgctgagagcaccatcgtgcccatcaagggcaaggacaggaagccaggcaacctggtgtag

SEQ ID NO: 254927 - DNA, 867 bp, Artificial Sequence
  derived and/or modified sequence
atgcccgaggccggcttccaggccaccaacgccttcaccgagtgcaagtttacatgcactagcggcaaatgtttgtatctgggttccctggtgtgtaaccagcagaacgattgtggagacaattcagatgaggagaattgcctgcttgtgacagaacacccccccccaggcatcttcaactctgagctggagttcgctcagatcatcataatcgtggtagtggttacagtgatggtggtcgttattgtttgtttgctgaatcactacaaggtctctaccagaagctttattaatagaccgaatcagtccaggagacgggaagacggcctgcctcagatcatgcacgctcctcgctcccgagatcgattcacggctccttcattcatccagcgggacagatttagtcgattccaacctacatacccctatgtccagcacgagatagatctccctcctactatttcattgtctgatggagaagagccaccaccctatcagggaccttgcacactgcagctgcgggaccccgagcaacagatggaactaaacagagagtctgtccgagcaccacccaacagaacgattttcgacagcgatcttatcgacatagcgatgtacagcgggggcccttgtcctcctagttcaaatagtgggatatctgcatccacttgcagttccaatggacgcatggagggcccacctcctacatactccgaagtgatgggacatcatccaggtgcctcatttctccatcaccagcggagcaatgcgcaccgcggcagccgtttgcagttccagcagaacaacgctgagtccactatcgtccctataaaaggcaaggacagaaaacccggaaatttagtgtag

SEQ ID NO: 254928 - DNA, 867 bp, Artificial Sequence
  derived and/or modified sequence
atgcctgaagccggattccaagctaccaatgcctttactgaatgcaagttcacttgtacctctgggaagtgcctgtacctcgggtccctggtgtgtaaccaacagaacgactgtggagacaattccgacgaagagaactgcctgcttgtcacggagcaccccccaccagggatcttcaatagtgagctcgagttcgcacagattatcatcatcgttgtggtggtgactgtgatggttgtcgtgatcgtctgtctgctgaaccactacaaagtctctaccagaagctttattaatcgacctaaccaatcgcgacgccgtgaggatggcttgccccagataatgcacgcacctagaagtcgggaccgattcaccgccccttccttcatccagcgagacaggttttcccggtttcagcccacatacccttacgtgcagcacgaaatagatctcccccctacaatatcgctgtccgatggggaggaaccacccccataccaaggtccctgtaccctccagctgcgcgaccctgagcagcaaatggaactgaaccgcgagtctgtccgcgcaccccctaaccgtaccatcttcgattccgacctgatcgatattgctatgtattctggaggaccctgccccccttcgagtaactcgggcatttctgcttcaacctgcagtagcaacggccgaatggaggggcctcccccaacttattccgaggtgatggggcatcaccctggcgcaagttttcttcatcatcagagaagtaatgcccacagaggcagtcgcttacaatttcagcagaacaacgctgaatctacaattgttccaatcaagggaaaagataggaagcccggaaaccttgtgtag

SEQ ID NO: 254929 - DNA, 8632 bp, Artificial Sequence
  derived and/or modified sequence
gctgggtctccgagccccggaggaagcaggcgtgtgttgaatttctctctgcccctcaccttggaataaacaggaagcgacaagcacccagcccggcccggcacttgcctttgtgaaggggtctgccctgcacagcctttaggaagcttcctcgggaccccttcccggtgcgccgccccgggtgggcctgggggcgcgccctcggttcaagctctacgttcgtgacatcaaacctcctgttgggccatttccgagaactcccatcagtttctgtatagtgtaaaagtttcagaggcggagcacagagagctgcggctgggacaaggagcacccgcgtgcaggtgcgaccctgcaggatgctggcagcggcgtggccaggggcgcccgtgttctgagggcctgagggccagcccctccacccgcgccatggcctccgcgccctggctggacggctgacgggagcagggaccgccgccgcccaggtgccacacccaggtaccgcccgcccgcgcgagagccgggcaggtgggccgcggatgctcccagaggccggcccagcagagcgatggacttggacaggctaagatggaagtgacctgagcctcgcccggcggcttcctcgacgggacagcgcaagagttggagcacaggcttgtccggggagcagtatgccggaagctggttttcaggccacaaatgctttcacagagtgcaaattcacctgcaccagtggtaaatgcttgtatcttggttcgctggtctgtaaccaacagaacgactgtggggacaacagtgacgaagagaactgtctcctggtgaccgagcacccgcctccgggcatcttcaactcggagctggagttcgcccaaatcatcatcatcgtcgtggtggtcacggtgatggtggtggtcatcgtctgcctgctgaaccactacaaagtctccacgcggtccttcatcaaccgcccgaaccagagccggaggcgggaggacgggctgccgcagatcatgcatgccccgcggtccagggacaggttcacagcgccgtccttcatccagagggatcgcttcagccgcttccagcccacctacccctatgtgcagcacgagattgatcttcctcccaccatctccctgtccgacggtgaagagccacctccttaccaggggccctgcaccctgcagctccgggaccctgaacagcagatggaactcaaccgagagtccgtgagggccccacccaaccgaaccatatttgacagtgatttaatagacattgctatgtatagcgggggtccatgcccacccagcagcaactcgggcatcagtgcaagcacctgcagcagtaacgggaggatggaggggccaccccccacatacagcgaggtgatgggccaccacccaggcgcctctttcctccatcaccagcgcagcaacgcacacaggggcagcagactgcagtttcagcagaacaatgcagagagcacaatagtacccatcaaaggcaaagataggaagcctgggaacctggtctgattccttccaacgtgcacttcagctggagaaagaaaccaagaagggaagcggccgctgggcccctcctgcgcacagtgttgttcagtttcacatggtacaaataagtaaaaccaaatgagcaaacacggtctttgtttctgattccttttaggggaattgcatgcaaactagactgaaatgatacaaacttccatctggtctgaccgcaaacagtgtttatttggggacaggggttgggatgggggtgtgggcaggggaaaacagagaacgggatgctttgaagataccatgaaataaaacccacagaggtatttgatgtatttaattgtgaaaggagactttgcagataaatgaggccagaatggcatgttttataattaactgaataaagaaggaagcattattatatattattgtggggaagaaccagccagttcgctttttctcctaaggtgtggaacttttattttgttttaaaaatatgaatcaaaattcctgtgttgtgtgccaaggtataaagtggagaagttagatgagtgcaaggagctcctttgtgttgtgatgatgtgttttaaaagttgcactatcttaatgttgaaaatatttacaagggaactgttttacgtgaagttctgtatgttgtcttttcacctgtggattgtaatcaggcccaaggaatatcctggagtggtccccagaagcatccaagaaaagatatttggggacgtagcctaacattttaccaacttacgtaaatcaaaaaagtcattattgttgcaggagtttgcatcaaatagcagtgcatcgctgaagcttttggagacttttggatggaagataagatagggaagattaagttccagcatttctgacttgttattttgagttactctgctactcttaggctgcatagtttatgagaaaatgaacacatgcatttatggatccagtatcatgcagtgctgccctcatcctccagcagtgcaatttcttcagtaatttagatttttttcactatagcatgaaatatattcaaatacataccttattttatgcaataaattgtttaaaatgcaaggtggttattctgcatactgttgaaatatgtgactcctcagtatattcccattgcctctccccctttcctcgacagcttagttcagttctgcagggctgctcagttcacaggaggctcccagcagccaccccacatccagcctacacagaacttcgtgtgggagtggtgtgggtggtggtttcttatgctttggaagcccctagaaataatgacggaagaatgccatgttgctgatcgtggtaataagccattgtgggttattgtatgtcactagtattagcatagcattcttaaaggaatgcagtgctcaaaacctacccaaattcccgcaggattctaccaaacccttccccaggccagcttttgtactgaaggcaagaactggacagtcagagaacagtggagggggcaagtgactgaagagcaccgggtaaaaagcacaacatgcagttaaaatgcaactagaaaactaattttaaatattgttagttttaatattcctgatatttacaaatattcattcttatatacaatgaaaaaaataactttcttctgcagatgtaagcactggcttttataagagcagcagccaacacgtttagcagacactgcgcgtggagaagggcttatctgcagtacactctgccatgtggagggtgggcctctgtggcctcttcacataacaagatgagctggaatgatgattccatgactcccacctatgcagccttaaagccaaatccgcgtgtgtgtgtttgtgtctgtctgtgggtctcgaaggtgatccgtcggtgcggtggctctgtgctgtaactggagagactgttccaaaccccaagagttgtctgatcctagtctgttcccttctgcttcttacctctgtagataggtcactggtttttgtttgtttgttttgaggattggaatttccattacattcatcctttgcacacagtaacatccacagaactagtccaactcttaaaaggagagaggaaaaacacaggcaccagttgtcagctcatgcttacaacctgtgtggaagtatatacagttgagagtcacagtggaggttctgagactggattcagtcttgttccagtgacagttggaaggcctctgctggagagacaccagctctcagggcagagattggcttggggccagaaggaccctccccaaccctggagacaccctgaaggttcactggctctccagattagcctctcttcctctgtcaggcaaagatgaggagcccgtgttcccatcgggccctgctggcagggacttgcagtggattcttggtcaggtgtgcccacagatgcggaggcgaggtgagtgattccatcatttcagttctcacctgcagttttggtgaagcaggagatgcaccccacagctctagctctcaaatggcttcacagtccttacttctctacctgcctcaagaaggggctcagagcagagacttgtgaattccttagtaactgtgagtatatgaatgtgttgcacatgtccacagtattggcgagataattacataattcagatacctttaatcatctttcaagaaagaggctcctcccattcaaccaccctagagaactgcctttgttaaatagttatttaaagactcatacatatcaaaccatgactttgaaaggtcttcgaggctggggctctgtaatgaattagtttaaaagccaaggtcataacatgaattgatggtcaatttcccttcagcagaaggaaaaggtgatttagatcagtagctcttttgaaggttgtggctgacctgttcataccgtgtcgcctcatggctagtgtggcgttgaaagagtagcgactgggaagatacaacttacacagtggggcctattgttctttcaagaaccctttttttagcttatagaacccatgggtccagtttagtaacgagtgatttaggcaatcaatgataggtttataatcttagattattccagcaaagtgtggattgcattgttaggaagaacatttggtgggaatgaacactcctgggcataccgctgacttttgtcccttgttcccggtgtaggagacccaaggcatcttgaatcccatctataagaacacaatcttccagcatacgtttgctttttcagaaactctagcattctctttaaatactgacgcaatccttaatggaaaagagatttcatgaagcaaattatgtatttcaatagttcttctatttttagtgtccaaaatttactaatacagaagcttgacaagcatgtcctcaccctccccaccacataaacacatggacacacacccaagccacaagaaatcccaagagagcagaagcgaatttttaaaagatttatcgtgaggactgcatttccattcactaattttggctcaaacttatgaggcaggaaataggggccaacagtaaatgggggaggcctcctgacaccagcagaggaattttgtacccaggcgaggacttcttgaacttctgcgtatctccgtttgatctctttcacctttatttcatcttcataagaatgagaaaggctcaaaaggaagcacttttagaaatcttctctgacctagaagaatccatccaaatccctgccttcctctctgaaccaacagttcccttctctgacaggggccatcctctatcttccatccagcggctcttctttttaggaaggctctggtgcagagcacttcaaatatgtcctcaggccagatactgattgctagtagagagacacccggcacccagtccgaagccctccctcaaaggaccggctcatggcgttggtcactggcaggctcagagacattctgctgtgggcgcagggagcccggccccccatgcagccatgactggatgcgcccccatctcgggggcttgctgcactgcttgtttattgaattttgctacttagaatggcaacattaactttgtgtaccattcattttttaaaaattttccaaagctcggcagtgtatgaaagaaaaaactgggaaagatacttggtttctgttaacttttgtgttgcttgcttaagtgattaaagccagtgcttggagccaagccttcatgccacgaacatgctccacagcctgccctttgctctcctgctcacactgaccaagaatgccgcgtgcttggcctactgaggtgaaaggacaattgaatgacaggtgggcaaagggagaacttccccttcttggtgcgaggaaagtcacaaatttaaaaatgttgcttccagcccagatcctaaatgctagttctcagcagctgcgtggcttaccgttcgccatttccaccaccgccagctgccagcaccgctacagatcacagagatgtgaacagacaatggaaagcactcttagccttgcagtggtctacattttttaggaaccaatatttcagcattctttattacccggcacgctgtgtcctttgcagagttcaagtttatgttactgccagggtcagacagtcatttgctgctgctgctgctgctgctgcttctcgaactggatgcattaggaagctgctgtctgagtgtaggaatgtcttgctaagaaagcaatgtcttccttcatccttttctttcttccctctgcgtgtccttgtttttgtgtaatgcgggagagggttagagctatagagattatatatacactatccgtgcacattatatatatgtagatatacccctatcatgtcagagatctgcatgtcagtttttcagcaactaaggtgcctcatgttctgagttcagcagatataggaaccaagccgccccctcctgcacttgatgctcccacctttgttgtgcctcacttaaaatggtgcttttttcagttgtctgtcttttcttatgtttttatttgtaaggtgctgtatataagttgaatatattatgcacatatcctacccaatgggtagaacaaaaagttgttaatactgtaatataatgtatagatgataccaattttaacagaaatggcatagaatttgtgaatgcctatgtgctttgtcctcttttgtaaggaaatttgcaaatggatgcatacagattaaagtctatgtagtttattttcctattaaatatcaatattataacacaagagaaagaagtgtgaacaaacaagcaacagtttatgaccagcgtatatatagcaatggaaagttgcatctttgctgtgaaaacactttaaagaaaatactttttaaaaaatcccacagctttttggttgccactagacgcttcttattttaatcattttagtaatgctcagctggaccagtgttagttatatttgagtcagaaaaatgttgtttttcaacttgctttataatctcctgcatctatctcctgctgtagcatcacgaaggtgtcaggcaacagtgaaaagtgcacatttttgttgttgcagaaactgtgtcagaggaataagtaaatcagcctgcagcagaagactttgttcagctccagaggcatctgtgaccgtctgtgtccaagtctctctgtgcctttttcttttacaaactgaagctgtggagccaatgaagtaacagtagagattgtagggaaagaatacctcaggaaaaacaaatacacttacaagaagaccctgttcttagaaaatgtgtttagttatgggttagcactagaagagacttggctgtcagccagccaagtgaaggacctctcatccattcccattcatgtcccatcataatacggacccaaaaagcaaactcggttttgccatcagttagaaattacgttttggattgtatattgttacatctctcttccggcttagtttttagtgtctgattgtgacctctgcatttatcttcaaataccctaattttaaaacaaaagaacaagaaaagtttataacaccatgttcactaaaaccacggttgaatcttgggtgtgggcatcctttcgagtgttgtccataagagcagttcgtggaattttgcccatctgacccatattatcagcttattctgccaccagagtagagtctaataaattccaaagtttttatttgctccatggtgtatgttctgactttgaaaatgtcagattctataatcatacccctaacatccaggaaacaaatgacagattatctttaaactgaaattgactctacaatgcaacccttaatgctgaatggattaaaaaagtcagcccttttagtatctgtttgaaagggccgtaaaaagttgacacttttgttgttgtggatcctgcgtgtctagacccacgtgttgtttccatcgtatactgtagggtgcaccccttgggattcatcattaagaactgaggctcactgttgtcagaaacaaagctcccaccccccaggttcaaccttgtgggagaactgttgagcatgagaatgttctagactcagaggtactaaaatttgttaccacatcattgcttcctttctacaggacgaattgaggcttaaactttactgttaatgatactggttcattttaatgtgcttgttggtatgttgctatttttcatttcatagctttcaaaaatcatgctaattgtatacttgtctagtttaaggctattttaaaatatgtacaatactattcacagcatttagttcgtttaatttttattataaagcaatctactaaaaaagtacaactgtatttgaacttttcaatagttgtttgtgagctatgataatcaaaagtcattaaagtcttttttaacaaacattcgtgcttacttttcaacataattcccagttatatacagaaaaagatttccacctgtcacgtatctgcctcttttacctgagcaatggtgtagttcttagacctaaggtctgtaattgcaatacttttaaagaaagatgttgctctaagtgctgtttgttagttatgaaatcagatttttctgcttgttcttaatgctgtggtcaaaccatagcacaaaatcattaaaaataatcagcggcatac

SEQ ID NO: 254930 - DNA, 867 bp, Artificial Sequence
  derived and/or modified sequence
atgcccgaggccggcttccaggccaccaacgccttcaccgagtgcaagttcacctgcaccagcggcaagtgcctgtacctgggcagcctggtgtgcaaccagcagaacgactgcggcgacaacagcgacgaggagaactgcctgctggtgaccgagcaccccccccccggcatcttcaacagcgagctggagttcgcccagatcatcatcatcgtggtggtggtgaccgtgatggtggtggtgatcgtgtgcctgctgaaccactacaaggtgagcaccagaagcttcatcaacagacccaaccagagcagaagaagagaggacggcctgccccagatcatgcacgcccccagaagcagagacagattcaccgcccccagcttcatccagagagacagattcagcagattccagcccacctacccctacgtgcagcacgagatcgacctgccccccaccatcagcctgagcgacggcgaggagccccccccctaccagggcccctgcaccctgcagctgagagaccccgagcagcagatggagctgaacagagagagcgtgagagccccccccaacagaaccatcttcgacagcgacctgatcgacatcgccatgtacagcggcggcccctgcccccccagcagcaacagcggcatcagcgccagcacctgcagcagcaacggcagaatggagggccccccccccacctacagcgaggtgatgggccaccaccccggcgccagcttcctgcaccaccagagaagcaacgcccacagaggcagcagactgcagttccagcagaacaacgccgagagcaccatcgtgcccatcaagggcaaggacagaaagcccggcaacctggtgtag

SEQ ID NO: 254931 - protein, 518 aa, Artificial Sequence
  derived and/or modified sequence
MADADEGFGLAHTPLEPDAKDLPCDSKPESALGAPSKSPSSPQAAFTQQGMEGIKVFLHERELWLKFHEVGTEMIITKAGRRMFPSYKVKVTGLNPKTKYILLMDIVPADDHRYKFADNKWSVTGKAEPAMPGRLYVHPDSPATGAHWMRQLVSFQKLKLTNNHLDPFGHIILNSMHKYQPRLHIVKADENNGFGSKNTAFCTHVFPETAFIAVTSYQNHKITQLKIENNPFAKGFRGSDDMELHRMSRMQSKEYPVVPRSTVRQKVASNHSPFSSESRALSTSSNLGSQYQCENGVSGPSQDLLPPPNPYPLPQEHSQIYHCTKRKEEECSTTDHPYKKPYMETSPSEEDSFYRSSYPQQQGLGASYRTESAQRQACMYASSAPPSEPVPSLEDISCNTWPSMPSYSSCTVTTVQPMDRLPYQHFSAHFTSGPLVPRLAGMANHGSPQLGEGMFQHQTSVAHQPVVRQCGPQTGLQSPGTLQPPEFLYSHGVPRTLSPHQYHSVHGVGMVPEWSDNS

SEQ ID NO: 254932 - protein, 468 aa, Artificial Sequence
  derived and/or modified sequence
MEGIKVFLHERELWLKFHEVGTEMIITKAGRRMFPSYKVKVTGLNPKTKYILLMDIVPADDHRYKFADNKWSVTGKAEPAMPGRLYVHPDSPATGAHWMRQLVSFQKLKLTNNHLDPFGHIILNSMHKYQPRLHIVKADENNGFGSKNTAFCTHVFPETAFIAVTSYQNHKITQLKIENNPFAKGFRGSDDMELHRMSRMQSKEYPVVPRSTVRQKVASNHSPFSSESRALSTSSNLGSQYQCENGVSGPSQDLLPPPNPYPLPQEHSQIYHCTKRKEEECSTTDHPYKKPYMETSPSEEDSFYRSSYPQQQGLGASYRTESAQRQACMYASSAPPSEPVPSLEDISCNTWPSMPSYSSCTVTTVQPMDRLPYQHFSAHFTSGPLVPRLAGMANHGSPQLGEGMFQHQTSVAHQPVVRQCGPQTGLQSPGTLQPPEFLYSHGVPRTLSPHQYHSVHGVGMVPEWSDNS

SEQ ID NO: 254933 - protein, 422 aa, Artificial Sequence
  derived and/or modified sequence
MDIVPADDHRYKFADNKWSVTGKAEPAMPGRLYVHPDSPATGAHWMRQLVSFQKLKLTNNHLDPFGHIILNSMHKYQPRLHIVKADENNGFGSKNTAFCTHVFPETAFIAVTSYQNHKITQLKIENNPFAKGFRGSDDMELHRMSRMQSKEYPVVPRSTVRQKVASNHSPFSSESRALSTSSNLGSQYQCENGVSGPSQDLLPPPNPYPLPQEHSQIYHCTKRKEEECSTTDHPYKKPYMETSPSEEDSFYRSSYPQQQGLGASYRTESAQRQACMYASSAPPSEPVPSLEDISCNTWPSMPSYSSCTVTTVQPMDRLPYQHFSAHFTSGPLVPRLAGMANHGSPQLGEGMFQHQTSVAHQPVVRQCGPQTGLLHNRHFLEKERERGERERRRETVAKRTPRTRFFISPNVHICTQGRWMLI

SEQ ID NO: 254934 - protein, 349 aa, Artificial Sequence
  derived and/or modified sequence
MADADEGFGLAHTPLEPDAKDLPCDSKPESALGAPSKSPSSPQAAFTQQGMEGIKVFLHERELWLKFHEVGTEMIITKAGRRMFPSYKVKVTGLNPKTKYILLMDIVPADDHRYKFADNKWSVTGKAEPAMPGRLYVHPDSPATGAHWMRQLVSFQKLKLTNNHLDPFGHIILNSMHKYQPRLHIVKADENNGFGSKNTAFCTHVFPETAFIAVTSYQNHKITQLKIENNPFAKGFRGSDDMELHRMSRMQSKEYPVVPRSTVRQKVASNHSPFSSESRALSTSSNLGSQYQCENGVSGPSQDLLPPPNPYPLPQEHSQIYHCTKRKGECDHPWSICFLSYLFLSLGWG

SEQ ID NO: 254935 - DNA, 3921 bp, Artificial Sequence
  derived and/or modified sequence
catgccttatgcaagagacctcagtcccccggaacaactcgatttccttccaatagaggtctgaggtggactcccacctcccttcgtgaagagttccctcctctcccccttcctaagaaagtcgatcttggctctatttgtgtcttatgttcatcaccctcattcctccggagaaagccgggttggtttatgtctttatttattcccggggccaagacgtccggaacctgtggctgcgcagacccggcactgataggcgaagacggagagaaatttacctcccgccgctgccccccagccaaacgtgacagcgcgcgggccggttgcgtgactcgtgacgtctccaagtcctataggtgcagcggctggtgagatagtcgctatcgcctggttgcctctttattttactggggtatgcctggtaataaacagtaatatttaatttgtcggagaccacaaaccaaccttgagctgggaggtacgtgctcttcttgacagacgttggaagaagacctggcctaaagaggtctcttttggtggtccttttcaaagtcttcacctgagccctgctctccagcgaggcgcactcctggcttttgcgctccaaagaagaggtgggatagttggagagcagaaccttgcgcgggcacagggccctgggcgcaccatggccgacgcagacgagggctttggcctggcgcacacgcctctggagcctgacgcaaaagacctgccctgcgattcgaaacccgagagcgcgctcggggcccccagcaagtccccgtcgtccccgcaggccgccttcacccagcagggcatggagggaatcaaagtgtttctccatgaaagagaactgtggctaaaattccacgaagtgggcacggaaatgatcataaccaaggctggaaggcggatgtttcccagttacaaagtgaaggtgacgggccttaatcccaaaacgaagtacattcttctcatggacattgtacctgccgacgatcacagatacaaattcgcagataataaatggtctgtgacgggcaaagctgagcccgccatgcctggccgcctgtacgtgcacccagactcccccgccaccggggcgcattggatgaggcagctcgtctccttccagaaactcaagctcaccaacaaccacctggacccatttgggcatattattctaaattccatgcacaaataccagcctagattacacatcgtgaaagcggatgaaaataatggatttggctcaaaaaatacagcgttctgcactcacgtctttcctgagactgcgtttatagcagtgacttcctaccagaaccacaagatcacgcaattaaagattgagaataatccctttgccaaaggatttcggggcagtgatgacatggagctgcacagaatgtcaagaatgcaaagtaaagaatatcccgtggtccccaggagcaccgtgaggcaaaaagtggcctccaaccacagtcctttcagcagcgagtctcgagctctctccacctcatccaatttggggtcccaataccagtgtgagaatggtgtttccggcccctcccaggacctcctgcctccacccaacccatacccactgccccaggagcatagccaaatttaccattgtaccaagaggaaagaggaagaatgttccaccacagaccatccctataagaagccctacatggagacatcacccagtgaagaagattccttctaccgctctagctatccacagcagcagggcctgggtgcctcctacaggacagagtcggcacagcggcaagcttgcatgtatgccagctctgcgccccccagcgagcctgtgcccagcctagaggacatcagctgcaacacgtggccaagcatgccttcctacagcagctgcaccgtcaccaccgtgcagcccatggacaggctaccctaccagcacttctccgctcacttcacctcggggcccctggtccctcggctggctggcatggccaaccatggctccccacagctgggagagggaatgttccagcaccagacctccgtggcccaccagcctgtggtcaggcagtgtgggcctcagactggcctgcagtcccctggcacccttcagccccctgagttcctctactctcatggcgtgccaaggactctatcccctcatcagtaccactctgtgcacggagttggcatggtgccagagtggagcgacaatagctaaagtgaggcctgcttcacaacagacatttcctagagaaagagagagagagaggagaaagagagagaaggagagagacagtagccaagagaaccccacggacaagatttttcatttcacccaatgttcacatctgcactcaaggtcgctggatgctgatctaatcagtagcttgaaaccacaattttaaaaatgtgactttcttgttttgtctcaaaacttaaaaaaacaaacacaaaaagatgagtcccaccccccactaccaccacacccatcaaccagccacattcacgctactccccagatctcttcccccattccttcttttgggctctagaaagtcttgcctcattgagtgtttttccctagtgcgtagttggagtctgtccctgtcttggtgttaatgttgacattgttatataataaatgataatatatttttttctttcaattttcttaatgggacccagtcccttatttggggggaggtctgaggcaagtatatttcaaaatatgtacttgcgggattcccttcaagtaaaccatccctgaaacctaaattcacgtttccccttgactaagaaaagcacctacctctgccatgtgatgtttctgaaaagcctctgtatgtccccatttgctttggttttgtcctgccttctccaatatcacgtgctcagttttgcctctacttacccatggagtcaggataacactgacgctccctggcatcctatcttattcagccctaccatcttgccagctctgtctttccagctgtctgtcgctaaaacgtggcctatagcttcccttccggaaagcttgctttgaaaaacttaaaaagcccccgtttacatgtaggcaggactgtgataacagtgcaagctctgtgttgacaagagttgtggacaaaaagccaaaataaatattcttcctgattaaaaaaattttttttgaaaaaaacaaggccagccccaaccttccaaacctccatcaccaacaacccaaactggatgtcaagcaaaatgcacaattcctacagaagaggcaagacacagtcaccaatgatatctcgccaaagaaaccacgcccacaccaatgccaacacaaaactgtgtttactgaaagccgaaaacagtattaaaaaaagtgtgtaagtaaagtgttatggtagggttcttcagatgtaatattttactggtactatttatttataaataggaattctaattaagtaataacatgaaatgaaacccagcataggagctggccaagagcttttaattttattgatactcaaaaccaagtttgtgtttttttgtttttttttgtttttttcctctttcgaatgtgctttgctttttttgattaaaaagaattttttttttccttttttataaacagaccctaataaagagaacagggtaagatgtgaggctgagtgtgtttaagtacgtgagagagtgtgagtgtgtttgtaagtgagtgtccctatgcgattatgtctctttacgttgctaaggggggagggtgaggattaagtactcgtgccttatatttgtgtgccaattaatgcctaataaataccatgtgcttaaacaagtaaaaaaaaaaaaaaaaaaaaaaaaaaaaaaaaaaaaaaaaaaaaaaaaaaaaaaaaaaaaaaaaaaaaaaaaaaaaaaaaaaaaaaaaaaaaaaaa

SEQ ID NO: 254936 - DNA, 1557 bp, Artificial Sequence
  derived and/or modified sequence
atggccgacgccgacgagggcttcggcctggcccacacccccctggagcccgacgccaaggacctgccctgcgacagcaagcccgagagcgccctgggcgcccccagcaagagccccagcagcccccaggccgccttcacccagcagggcatggagggcatcaaggtgttcctgcacgagagagagctgtggctgaagttccacgaggtgggcaccgagatgatcatcaccaaggccggcagaagaatgttccccagctacaaggtgaaggtgaccggcctgaaccccaagaccaagtacatcctgctgatggacatcgtgcccgccgacgaccacagatacaagttcgccgacaacaagtggagcgtgaccggcaaggccgagcccgccatgcccggcagactgtacgtgcaccccgacagccccgccaccggcgcccactggatgagacagctggtgagcttccagaagctgaagctgaccaacaaccacctggaccccttcggccacatcatcctgaacagcatgcacaagtaccagcccagactgcacatcgtgaaggccgacgagaacaacggcttcggcagcaagaacaccgccttctgcacccacgtgttccccgagaccgccttcatcgccgtgaccagctaccagaaccacaagatcacccagctgaagatcgagaacaaccccttcgccaagggcttcagaggcagcgacgacatggagctgcacagaatgagcagaatgcagagcaaggagtaccccgtggtgcccagaagcaccgtgagacagaaggtggccagcaaccacagccccttcagcagcgagagcagagccctgagcaccagcagcaacctgggcagccagtaccagtgcgagaacggcgtgagcggccccagccaggacctgctgcccccccccaacccctaccccctgccccaggagcacagccagatctaccactgcaccaagagaaaggaggaggagtgcagcaccaccgaccacccctacaagaagccctacatggagaccagccccagcgaggaggacagcttctacagaagcagctacccccagcagcagggcctgggcgccagctacagaaccgagagcgcccagagacaggcctgcatgtacgccagcagcgccccccccagcgagcccgtgcccagcctggaggacatcagctgcaacacctggcccagcatgcccagctacagcagctgcaccgtgaccaccgtgcagcccatggacagactgccctaccagcacttcagcgcccacttcaccagcggccccctggtgcccagactggccggcatggccaaccacggcagcccccagctgggcgagggcatgttccagcaccagaccagcgtggcccaccagcccgtggtgagacagtgcggcccccagaccggcctgcagagccccggcaccctgcagccccccgagttcctgtacagccacggcgtgcccagaaccctgagcccccaccagtaccacagcgtgcacggcgtgggcatggtgcccgagtggagcgacaacagctag

SEQ ID NO: 254937 - DNA, 1407 bp, Artificial Sequence
  derived and/or modified sequence
atggagggcatcaaggtgttcctgcacgagagagagctgtggctgaagttccacgaggtgggcaccgagatgatcatcaccaaggccggcagaagaatgttccccagctacaaggtgaaggtgaccggcctgaaccccaagaccaagtacatcctgctgatggacatcgtgcccgccgacgaccacagatacaagttcgccgacaacaagtggagcgtgaccggcaaggccgagcccgccatgcccggcagactgtacgtgcaccccgacagccccgccaccggcgcccactggatgagacagctggtgagcttccagaagctgaagctgaccaacaaccacctggaccccttcggccacatcatcctgaacagcatgcacaagtaccagcccagactgcacatcgtgaaggccgacgagaacaacggcttcggcagcaagaacaccgccttctgcacccacgtgttccccgagaccgccttcatcgccgtgaccagctaccagaaccacaagatcacccagctgaagatcgagaacaaccccttcgccaagggcttcagaggcagcgacgacatggagctgcacagaatgagcagaatgcagagcaaggagtaccccgtggtgcccagaagcaccgtgagacagaaggtggccagcaaccacagccccttcagcagcgagagcagagccctgagcaccagcagcaacctgggcagccagtaccagtgcgagaacggcgtgagcggccccagccaggacctgctgcccccccccaacccctaccccctgccccaggagcacagccagatctaccactgcaccaagagaaaggaggaggagtgcagcaccaccgaccacccctacaagaagccctacatggagaccagccccagcgaggaggacagcttctacagaagcagctacccccagcagcagggcctgggcgccagctacagaaccgagagcgcccagagacaggcctgcatgtacgccagcagcgccccccccagcgagcccgtgcccagcctggaggacatcagctgcaacacctggcccagcatgcccagctacagcagctgcaccgtgaccaccgtgcagcccatggacagactgccctaccagcacttcagcgcccacttcaccagcggccccctggtgcccagactggccggcatggccaaccacggcagcccccagctgggcgagggcatgttccagcaccagaccagcgtggcccaccagcccgtggtgagacagtgcggcccccagaccggcctgcagagccccggcaccctgcagccccccgagttcctgtacagccacggcgtgcccagaaccctgagcccccaccagtaccacagcgtgcacggcgtgggcatggtgcccgagtggagcgacaacagctag

SEQ ID NO: 254938 - DNA, 1050 bp, Artificial Sequence
  derived and/or modified sequence
atggccgacgccgacgagggcttcggcctggcccacacccccctggagcccgacgccaaggacctgccctgcgacagcaagcccgagagcgccctgggcgcccccagcaagagccccagcagcccccaggccgccttcacccagcagggcatggagggcatcaaggtgttcctgcacgagagagagctgtggctgaagttccacgaggtgggcaccgagatgatcatcaccaaggccggcagaagaatgttccccagctacaaggtgaaggtgaccggcctgaaccccaagaccaagtacatcctgctgatggacatcgtgcccgccgacgaccacagatacaagttcgccgacaacaagtggagcgtgaccggcaaggccgagcccgccatgcccggcagactgtacgtgcaccccgacagccccgccaccggcgcccactggatgagacagctggtgagcttccagaagctgaagctgaccaacaaccacctggaccccttcggccacatcatcctgaacagcatgcacaagtaccagcccagactgcacatcgtgaaggccgacgagaacaacggcttcggcagcaagaacaccgccttctgcacccacgtgttccccgagaccgccttcatcgccgtgaccagctaccagaaccacaagatcacccagctgaagatcgagaacaaccccttcgccaagggcttcagaggcagcgacgacatggagctgcacagaatgagcagaatgcagagcaaggagtaccccgtggtgcccagaagcaccgtgagacagaaggtggccagcaaccacagccccttcagcagcgagagcagagccctgagcaccagcagcaacctgggcagccagtaccagtgcgagaacggcgtgagcggccccagccaggacctgctgcccccccccaacccctaccccctgccccaggagcacagccagatctaccactgcaccaagagaaagggcgagtgcgaccacccctggagcatctgcttcctgagctacctgttcctgagcctgggctggggctag

SEQ ID NO: 254939 - DNA, 1557 bp, Artificial Sequence
  derived and/or modified sequence
atggccgatgccgacgaaggcttcggcctggcccacactcccctggagccggacgccaaggacctaccatgcgattcgaaaccagagtctgcgctaggtgctcccagtaagagtcccagctctccccaggccgccttcacacaacaagggatggagggaattaaagttttcttgcacgaaagagaactgtggctaaaatttcacgaagttggtacagagatgattatcactaaggcgggccgccgcatgttcccttcttacaaggtgaaggttaccgggctgaatccaaaaaccaaatatattttgctgatggatatcgtgcccgcagatgatcaccggtataagttcgccgataataagtggtcagtaaccggcaaggccgagccagcaatgcctggaagactctacgtgcaccccgattctcctgcaacaggtgcccactggatgcggcagttagtgagtttccagaaattaaaacttactaacaatcatctggatccctttggtcacataatcttaaattctatgcataagtatcagccacgcctgcacatcgtgaaggccgacgaaaacaacggcttcgggtccaagaacaccgctttctgcacgcacgtcttccccgagacagcattcatcgccgtgaccagttaccagaatcataaaatcacccagcttaagatcgagaataaccctttcgcgaagggatttagaggaagcgatgacatggagttacaccggatgagtaggatgcaatccaaagagtatcctgtcgtgcctcgaagcaccgtccgacagaaggtagcctccaatcacagccctttttccagcgagagcagagctcttagtacaagttccaatcttgggagtcagtaccagtgcgaaaacggcgtatctgggccaagccaagacctactccccccaccgaatccatacccgttacctcaggaacacagccaaatttatcattgcactaaacgcaaggaagaggaatgctcaacaactgaccacccttacaagaaaccctatatggagactagtccttctgaggaggacagcttctaccggtcaagctacccacagcagcaaggactcggcgcctcctataggacagagtctgctcaacggcaggcttgtatgtacgccagttccgcaccaccatctgagccagttccctcattagaagatatatcttgcaatacctggccatctatgccctcttacagctcatgtacagtgaccacggttcagccgatggaccggctgccctaccaacacttcagcgcacacttcacatctgggcctctagtgcctagactggcaggaatggcgaatcacggcagcccacagctgggggagggcatgtttcagcatcaaacatctgtagcacaccaacctgtcgtaaggcagtgtgggccgcagaccggactccagtctccaggcaccttacagccgcctgagttcctctactcacatggggtccctcgtactttgtcacctcatcagtatcattctgtgcatggggtcggaatggtcccagagtggtccgataacagttag

SEQ ID NO: 254940 - DNA, 1407 bp, Artificial Sequence
  derived and/or modified sequence
atggaaggcattaaggtattcctgcatgagagagagctctggctgaaatttcacgaagtgggaacagaaatgataattactaaggctgggaggcggatgttcccttcatacaaggtcaaggtgacaggcctcaatcctaagactaagtacatcttgctaatggatatcgtgcctgctgacgatcatcgctacaagttcgccgataataaatggtctgtaacgggcaaggccgagcctgcgatgcccgggaggctttacgtgcatccggattctcctgcgactggcgcccactggatgcgacagcttgtctcgtttcaaaagttgaagctgaccaataatcacctggatccattcgggcatataattctcaattcaatgcacaaataccagcctagacttcacatcgtcaaagccgacgagaataatggatttggatctaagaacacagccttctgtacccatgtgtttcctgagactgccttcatagctgtcactagttaccagaaccataagattacccaacttaagattgagaataatccctttgccaagggatttaggggcagcgatgatatggaattgcaccgcatgtctcggatgcagtcaaaagaatatccagtggtccccagaagcacagtacgtcagaaagtcgcctcgaatcactccccctttagctcagagtctagggcgctaagcactagctccaacctgggtagtcagtatcagtgtgaaaatggggtctcaggcccttcccaagacttgctcccacctccgaacccatatccactgccccaggagcattctcagatctaccactgcacaaagcggaaagaggaggagtgctccacaacagaccacccttacaaaaagccatatatggagactagtccctccgaggaagactcattttatcgatcgtcgtatccccagcagcaaggactgggagcaagctatcggaccgagtccgcgcagcgacaggcctgtatgtacgcatcatctgcgcctccaagcgaacccgtccctagcttggaggatatttcttgcaatacttggccctctatgcccagctattcctcatgcactgtgaccaccgtccaacctatggacagacttccctatcagcacttctcagcacactttacaagtggacccctggtcccccgtctcgccggcatggctaatcacggcagccctcagctaggggagggcatgtttcagcaccagacaagcgtggctcatcagcccgtggtgaggcagtgcgggccccaaactggactacagtctccagggacactccaacctcctgagtttctgtactcccatggcgtgcctcggactctgagcccgcaccagtaccactccgtgcacggtgtgggcatggtgccagagtggagcgacaacagttag

SEQ ID NO: 254941 - DNA, 1557 bp, Artificial Sequence
  derived and/or modified sequence
atggccgacgcagacgaaggcttcggactggcgcacactcccctggagcctgatgcaaaagatctgccctgtgacagtaaacctgaatctgctctgggcgccccctcaaaaagcccctccagcccccaggcagcctttacccagcaaggaatggaagggataaaagtgtttcttcacgagcgagagctttggctgaaatttcatgaagtgggcaccgagatgataatcactaaggccggcaggaggatgtttccaagctacaaggtaaaggtcaccgggcttaatcctaaaactaaatacatcttactgatggacatcgttcccgcggatgaccaccgttacaaattcgccgataacaagtggtcagtaacggggaaagccgaacccgcaatgcccggacggttatatgtacatccggactctcccgcaacaggtgcccactggatgagacaactggtctcgtttcaaaagctgaagctgacgaacaatcaccttgaccccttcggacatatcatcctaaacagtatgcacaaataccaaccaagattacacatagtcaaagctgatgaaaacaacggatttgggtcaaaaaacacagcattctgtacccacgttttcccagagactgcatttatcgccgttaccagctatcagaatcacaaaattacacagcttaagatcgaaaacaacccattcgctaaaggtttcaggggtagtgacgatatggaactgcaccgaatgtctaggatgcagtctaaggaataccccgtggtaccgagaagcaccgtccgccagaaggtagcgtccaatcactcgcctttcagcagcgaatccagagccctgtctaccagtagcaacctgggaagccagtaccagtgtgaaaatggcgtgagcgggccctcccaagacctgctgcccccgcccaacccgtacccgctgccacaggaacacagccagatctatcattgtaccaagcggaaagaggaagagtgctccaccacagatcacccctacaagaagccttatatggagacaagtccctctgaagaggatagtttttataggagtagttaccctcagcagcagggcctgggcgcctcatatcgaacagagagtgctcagcgccaagcctgtatgtatgccagtagtgcacctccttccgaacccgttccgtctctcgaagacatttcatgcaacacgtggccatccatgcctagttactcctcatgcaccgtgacgaccgtgcagcctatggaccggcttccctatcagcacttcagcgcccactttacgagtggacccctggtacccagactcgccggtatggcaaatcatggtagcccccagctgggtgaaggaatgtttcagcaccagacaagcgtggcacatcagcccgtcgtgaggcaatgtgggccacagactgggctgcagtccccgggtacgcttcaaccccctgagttcctctactcccacggggtaccacgtactctttcccctcaccagtatcatagtgtgcacggcgtcggaatggtcccagaatggtctgacaactcatag

SEQ ID NO: 254942 - DNA, 1050 bp, Artificial Sequence
  derived and/or modified sequence
atggccgacgcagatgagggttttggccttgctcacactccgctcgagcctgatgctaaggacctgccatgtgactccaagccggaaagcgctctgggagctcctagtaaatcaccatccagtcctcaggcagcctttactcagcaaggaatggagggcattaaggtgtttctacacgaaagggaactctggctcaaattccacgaggtgggtacagagatgatcattacgaaggccggccggcgaatgttccccagctacaaggtgaaggtcactggcctaaatccaaaaaccaaatacattttgcttatggatattgtcccagccgatgatcatcgatataaattcgcagacaataaatggagtgttacgggtaaggctgagcccgcgatgccaggcaggctgtatgttcaccctgattctccagctaccggcgcccactggatgagacagcttgtgtccttccagaagctcaagctgaccaacaatcaccttgatccgtttggccatattatcctaaattctatgcacaaataccagcctagactgcatatagtgaaggctgacgaaaataacgggtttggtagtaagaacaccgccttctgtacccatgtgttcccagagaccgcttttatagccgtgaccagctatcagaatcataaaataacccagctgaaaatagaaaacaacccattcgcaaaggggtttagagggtcggacgatatggaactgcacagaatgtccaggatgcagtcaaaggaatatcctgtcgtgccccgcagtaccgtaaggcagaaggtagcttctaaccattcccccttttcatcagagagtagggccctctccacaagtagcaacctcggatctcaataccagtgtgaaaatggggtgagcgggcccagccaggatcttttgcctcctccaaatccttatcccctccctcaggagcactcccagatctaccactgtactaagcgaaagggcgagtgtgatcacccttggtctatctgcttcttgtcctacctgttcttgtctctaggctggggatag

SEQ ID NO: 254943 - DNA, 1557 bp, Artificial Sequence
  derived and/or modified sequence
atggctgatgctgatgagggcttcggcctggcccacacccccctggagccagatgccaaggacctgccctgtgacagcaagccagagagcgccctgggcgcccccagcaagagccccagcagcccccaggccgccttcacccagcagggcatggagggcatcaaggtgttcctgcacgagcgggagctgtggctgaagttccacgaggtgggcacagagatgatcatcaccaaggccggccgcaggatgttccccagctacaaggtgaaggtgacaggcctgaaccccaagaccaagtacatcctgctgatggacatcgtgcctgcagatgaccaccgctacaagtttgctgacaacaagtggagcgtgacaggcaaggccgagcccgccatgcctggccgcctgtatgtgcacccagacagccctgccaccggggcccactggatgaggcagctggtgtccttccagaagctgaagctgaccaacaaccacctggaccccttcggccacatcatcctgaacagcatgcacaagtaccagccccggctgcacatcgtgaaggcagatgagaacaacggcttcggcagcaagaacacagccttctgcacccacgtgtttcctgagacagccttcatcgctgtgaccagctaccagaaccacaagatcacccagctgaagattgagaacaacccctttgccaagggcttccggggcagtgatgacatggagctgcacaggatgagcaggatgcagagcaaggagtaccctgtggtgcccaggagcacagtgcggcagaaggtggccagcaaccacagccccttcagcagcgagagccgggccctgagcaccagcagcaacctgggcagccagtaccagtgtgaaaatggagtgtctggccccagccaggacctgctgcccccacccaacccctaccccctgccccaggagcacagccagatctaccactgcaccaagaggaaggaggaggagtgcagcaccacagaccacccctacaagaagccctacatggagaccagccccagcgaggaggacagcttctaccgcagcagctacccccagcagcagggcctgggcgccagctacagaacagagagcgcccagaggcaggcctgcatgtatgccagcagcgcccctccttctgagcctgtgcccagcctggaggacatcagctgcaacacctggcccagcatgcccagctacagcagctgcaccgtgaccaccgtgcagcccatggaccggctgccctaccagcacttcagcgcccacttcaccagcggccccctggtgccccggctggccggcatggccaaccacggcagcccccagctgggggagggcatgttccagcaccagacctctgtggcccaccagcctgtggtgcggcagtgtggcccccagacaggcctgcagagccctggcaccctgcagcccccagagttcctgtacagccatggagtgcccaggaccctgagcccccaccagtaccacagcgtgcacggcgtgggcatggtgcctgagtggagcgacaacagctag

SEQ ID NO: 254944 - DNA, 1407 bp, Artificial Sequence
  derived and/or modified sequence
atggagggcatcaaggtgttcctgcacgagcgggagctgtggctgaagttccacgaggtgggcacagagatgatcatcaccaaggccggccgcaggatgttccccagctacaaggtgaaggtgacaggcctgaaccccaagaccaagtacatcctgctgatggacatcgtgcctgcagatgaccaccgctacaagtttgctgacaacaagtggagcgtgacaggcaaggccgagcccgccatgcctggccgcctgtatgtgcacccagacagccctgccaccggggcccactggatgaggcagctggtgtccttccagaagctgaagctgaccaacaaccacctggaccccttcggccacatcatcctgaacagcatgcacaagtaccagccccggctgcacatcgtgaaggcagatgagaacaacggcttcggcagcaagaacacagccttctgcacccacgtgtttcctgagacagccttcatcgctgtgaccagctaccagaaccacaagatcacccagctgaagattgagaacaacccctttgccaagggcttccggggcagtgatgacatggagctgcacaggatgagcaggatgcagagcaaggagtaccctgtggtgcccaggagcacagtgcggcagaaggtggccagcaaccacagccccttcagcagcgagagccgggccctgagcaccagcagcaacctgggcagccagtaccagtgtgaaaatggagtgtctggccccagccaggacctgctgcccccacccaacccctaccccctgccccaggagcacagccagatctaccactgcaccaagaggaaggaggaggagtgcagcaccacagaccacccctacaagaagccctacatggagaccagccccagcgaggaggacagcttctaccgcagcagctacccccagcagcagggcctgggcgccagctacagaacagagagcgcccagaggcaggcctgcatgtatgccagcagcgcccctccttctgagcctgtgcccagcctggaggacatcagctgcaacacctggcccagcatgcccagctacagcagctgcaccgtgaccaccgtgcagcccatggaccggctgccctaccagcacttcagcgcccacttcaccagcggccccctggtgccccggctggccggcatggccaaccacggcagcccccagctgggggagggcatgttccagcaccagacctctgtggcccaccagcctgtggtgcggcagtgtggcccccagacaggcctgcagagccctggcaccctgcagcccccagagttcctgtacagccatggagtgcccaggaccctgagcccccaccagtaccacagcgtgcacggcgtgggcatggtgcctgagtggagcgacaacagctag

SEQ ID NO: 254945 - DNA, 1050 bp, Artificial Sequence
  derived and/or modified sequence
atggctgatgctgatgagggcttcggcctggcccacacccccctggagccagatgccaaggacctgccctgtgacagcaagccagagagcgccctgggcgcccccagcaagagccccagcagcccccaggccgccttcacccagcagggcatggagggcatcaaggtgttcctgcacgagcgggagctgtggctgaagttccacgaggtgggcacagagatgatcatcaccaaggccggccgcaggatgttccccagctacaaggtgaaggtgacaggcctgaaccccaagaccaagtacatcctgctgatggacatcgtgcctgcagatgaccaccgctacaagtttgctgacaacaagtggagcgtgacaggcaaggccgagcccgccatgcctggccgcctgtatgtgcacccagacagccctgccaccggggcccactggatgaggcagctggtgtccttccagaagctgaagctgaccaacaaccacctggaccccttcggccacatcatcctgaacagcatgcacaagtaccagccccggctgcacatcgtgaaggcagatgagaacaacggcttcggcagcaagaacacagccttctgcacccacgtgtttcctgagacagccttcatcgctgtgaccagctaccagaaccacaagatcacccagctgaagattgagaacaacccctttgccaagggcttccggggcagtgatgacatggagctgcacaggatgagcaggatgcagagcaaggagtaccctgtggtgcccaggagcacagtgcggcagaaggtggccagcaaccacagccccttcagcagcgagagccgggccctgagcaccagcagcaacctgggcagccagtaccagtgtgaaaatggagtgtctggccccagccaggacctgctgcccccacccaacccctaccccctgccccaggagcacagccagatctaccactgcaccaagaggaaaggagaatgtgaccacccctggagcatctgcttcctgagctacctgttcctgagcctgggctggggctag

SEQ ID NO: 254946 - DNA, 1557 bp, Artificial Sequence
  derived and/or modified sequence
atggccgacgccgacgagggcttcggcctggcccacacccccctggaaccggatgccaaggacctgccttgcgacagcaagccagaaagcgcccttggtgccccgtcgaagtctccctccagcccccaggcagccttcacacaacaaggcatggagggtatcaaggtgttcctgcatgagcgggaactctggctaaagtttcacgaggtcggaacagagatgattataacaaaagccggtagacgtatgtttccttcatataaagtgaaggtgaccggcctaaatcccaagactaagtatatattgctaatggacatagtgccagccgacgatcaccggtataagttcgccgacaataagtggtccgtgacaggaaaagctgagcctgcgatgccaggcaggttgtacgtgcacccggattctccagccactggagcacattggatgaggcaacttgtgagctttcaaaaattaaaactgactaataatcacctagacccattcgggcacattatcctgaacagcatgcacaagtaccagccaagattacacattgtgaaagctgatgagaacaatgggttcgggtctaaaaacaccgccttctgtacccatgtctttcctgagacagcgttcattgccgtgaccagctaccaaaaccacaagattacacaacttaagatcgagaacaacccgtttgccaaaggattccggggatcagacgacatggaacttcatcgcatgagccgtatgcagtctaaggagtatcccgtcgttcccagatctaccgtaagacagaaagttgcatcaaaccatagtccatttagcagtgaaagccgcgccttgtctacttctagtaatctgggaagtcagtaccaatgcgagaatggcgtgtcaggcccttctcaggaccttttacctccgccaaacccttaccctctgccccaggaacactcccaaatctaccactgtacaaagaggaaggaagaggaatgctctactaccgatcacccttacaaaaaaccctacatggagacctccccatcagaggaggatagtttttatcgatccagttatcctcagcagcaaggattaggcgctagctacaggaccgagtccgcccaacgccaggcgtgcatgtacgcctcctcggctcctcctagtgagccagtgccctccctggaagacatttcatgtaacacctggccttctatgccttcatattcatcatgcactgtaaccacagttcagcccatggaccgactgccctaccaacacttctctgcccactttacatctggccctctggtaccacggcttgccggcatggcgaaccacgggtcaccccagcttggagagggcatgtttcagcatcagacgtccgtggctcaccaacctgtggtgcgccagtgcggtccccagaccggactgcaaagtcccggaacacttcaaccaccggaattcctctacagccacggagtccctagaaccctttcacctcaccagtaccattcagtccatggggtgggaatggtgcccgagtggagcgacaactcttag

SEQ ID NO: 254947 - DNA, 1407 bp, Artificial Sequence
  derived and/or modified sequence
atggagggcatcaaggtgttcctgcacgagcgggagctgtggctgaagtttcatgaagtagggaccgagatgataattacaaaggccggcaggaggatgtttcctagttacaaagttaaggtgaccggtctgaaccctaagactaagtacatccttcttatggacattgtgccggctgacgatcacagatataaattcgccgataacaaatggtctgtgactggcaaagctgaaccagcaatgcccggccggttatatgtacatcccgattcccctgccaccggggcccactggatgcgccagctggttagttttcagaagctaaagcttactaacaatcaccttgacccctttgggcatattattttgaacagtatgcacaaataccaaccccgccttcacatcgtgaaggctgacgagaacaacggatttggttctaaaaacaccgccttctgtacgcacgtcttccctgagactgctttcatagccgtcacctcttatcaaaatcacaagatcacacagctgaaaatcgagaacaaccctttcgccaaaggttttcgtgggagcgatgatatggaattacaccgcatgtcacgtatgcagagtaaagagtatcctgtcgtgcctcggagcacagtcaggcagaaagttgcttctaatcatagcccattttcgagtgaatcgcgtgccttgtccacatcttctaatttggggtcccagtaccagtgcgagaacggcgtgtccggccccagtcaggacttactaccgccacccaacccgtatccattgccccaggaacacagccaaatctaccactgtactaagagaaaggaggaagaatgcagcaccacagatcacccgtacaagaagccctacatggagaccagcccttcagaagaggactcgttttaccgcagctcctacccgcagcagcagggtcttggcgcctcttaccggacggaaagcgcacaacgccaggcatgcatgtacgcttcaagcgcccccccctccgagccagtgccttctctggaagatatcagctgtaatacttggccgagcatgccatcttattctagttgcacagtgactaccgttcaaccgatggacagattaccatatcagcatttctcagctcacttcacctccggtcccttggtgccgcggcttgcaggcatggccaatcacggatcgcctcagctgggggaagggatgtttcagcatcaaaccagcgtggcgcatcagcctgtcgttcgacagtgtgggccccagaccggactgcagagtcctggcaccctgcagcctcccgagtttttgtattctcacggagtgcctaggaccctctccccccaccagtaccattcagttcatggtgtgggtatggtgcctgagtggtccgacaattcttag

SEQ ID NO: 254948 - DNA, 1557 bp, Artificial Sequence
  derived and/or modified sequence
atggccgacgccgacgagggcttcggcctggcccacacccccctggagccggacgccaaagacttgccatgtgactctaagcctgaaagcgcgcttggcgctccctcgaagtcaccaagtagcccacaagccgcctttacgcaacagggtatggaaggcataaaggtgttcttacatgaaagggagctctggctgaaattccacgaagtgggaactgagatgattataactaaagccgggaggagaatgttcccctcctacaaagttaaggtgaccgggctgaacccaaagaccaagtacatcctcctaatggatatcgtgcctgctgatgaccacagatacaaatttgctgataataaatggagcgtgacgggtaaggcagaacctgccatgcccgggcgtttgtacgtgcacccagattcaccagctaccggggcacattggatgagacagctggttagtttccaaaagctgaagctaactaataatcatctggatccattcggacacatcatcctcaattccatgcataagtaccagcctaggctgcacatcgtgaaagccgatgaaaataacggctttggcagtaagaatacagctttctgcacacacgttttcccagaaacggcttttatcgctgtgacatcgtatcagaatcacaaaatcacacagcttaagatcgagaataaccccttcgcaaaaggcttcaggggctccgacgacatggagctccacaggatgtctcgaatgcaatccaaggaatacccagtggtcccaagaagcactgtgcggcagaaggttgcctccaaccatagtccattttctagtgagtcccgggccctgagtacatcatcgaatctcggcagccagtaccagtgcgagaatggtgtgagcgggccatcacaggacttgttgccaccccccaacccatatccacttccacaggaacactctcagatctaccattgtacaaagcgaaaggaggaggagtgctccaccacagaccacccttataagaagccatacatggagacttcaccatctgaagaagatagcttttatagatcctcctacccacagcagcagggattgggcgcctcatataggactgaaagcgcacagaggcaggcatgtatgtatgccagtagcgcgcccccatcggaaccggttccatcacttgaagacatttcctgtaacacttggcccagcatgcccagttacagttcctgcaccgtaaccactgtgcaaccaatggatcgactgccgtaccagcacttcagtgcacactttactagcggtccgctcgtcccccgcttagccggtatggcaaatcacggtagcccacaactgggagagggtatgttccagcaccagacctcagtcgcccatcaacctgtcgttcgacagtgcggaccccaaactggcctacagtcccccggcactctccagccccccgaatttctgtattctcatggcgttccccgcaccctgagccctcaccagtatcattcagttcacggagtgggtatggtacctgaatggtccgataattcatag

SEQ ID NO: 254949 - DNA, 1050 bp, Artificial Sequence
  derived and/or modified sequence
atggccgacgccgacgagggcttcggcctggcccacacccccctggagccagatgctaaggatctgccatgcgactcaaaacctgaatcagcactcggcgcccctagcaagtcaccttccagcccgcaggctgcctttacccagcagggaatggagggtatcaaggtttttctgcacgagcgtgaactctggctgaaatttcatgaggtgggcaccgaaatgatcattaccaaggctggccgaagaatgtttccaagctataaagtgaaggtgacaggtctcaaccctaagacaaagtacatcttgctcatggacattgtccctgcagacgaccaccgttacaaattcgctgataacaagtggagcgttacaggtaaggctgagccagccatgccgggtcgcctgtacgttcacccggacagtcctgccaccggcgcccactggatgaggcaactggttagtttccaaaaactgaaacttactaataaccatcttgacccgttcggtcacatcatcctcaattctatgcacaaatatcagccgaggctgcacatcgttaaggctgacgagaataatgggtttggttcaaagaatactgccttctgcacgcatgtgttcccagaaaccgcatttatcgcagtgacctcctaccagaaccacaagattacccaactgaagatcgaaaataatcccttcgcgaaaggctttagggggagtgacgatatggaattgcaccggatgagcaggatgcagagcaaagagtatccagtggtgcctcgcagtactgtcagacagaaagtggcgagtaaccattccccattctcctctgagtctcgagctctcagcacctcctctaatctgggtagtcagtatcagtgtgagaatggggtttctggcccctcacaggaccttcttccaccacccaatccctacccccttccacaggagcacagccaaatctatcactgcacaaagagaaagggggaatgtgaccatccctggagcatctgctttctttcctacctgttcctgtctctcgggtggggctag

SEQ ID NO: 254950 - DNA, 1557 bp, Artificial Sequence
  derived and/or modified sequence
atggctgacgccgacgagggcttcggcctagcccataccccactggaacctgacgctaaggacctgccttgcgacagtaagccagagtccgcacttggggcaccgagtaagtcaccatcttccccccaggccgcatttactcagcaagggatggagggtatcaaagtttttctgcacgagcgagagctctggttgaagtttcatgaggtgggcaccgagatgattataactaaggcaggccgtaggatgtttccaagttacaaggtaaaggttaccggactgaatccaaaaaccaagtacatccttcttatggacatcgtgcccgcagacgatcatcgttacaagttcgctgataataaatggagcgttacagggaaagcggaaccagcgatgccgggacggctctatgtccatccagacagtccagccacaggcgctcattggatgaggcagttggtgtcgttccagaaactcaagttaactaataaccacttggatcccttcggtcacattatactgaattccatgcacaagtaccagccgaggctgcatattgtgaaggctgatgaaaacaatggcttcggttcaaagaatactgccttctgcacgcatgtgttccctgagacagcgtttattgctgtgacgtcttaccagaatcacaaaataacccagctgaagattgagaataatcccttcgccaaaggcttccggggtagcgatgatatggaactccaccgcatgtctcgtatgcagagcaaagagtatcctgtggtgcctcgaagtacagtgcgacagaaagtggccagcaaccacagccccttctcctcagagagtagagctctctccacatcctcaaacctgggctcgcaatatcagtgcgagaatggtgtgagtggaccctcgcaggaccttctgcccccacccaacccctaccccttgccgcaagaacactctcagatttatcactgcacaaaacgcaaagaagaagagtgtagcacaaccgaccacccctacaagaaaccatacatggagacttcacccagtgaggaggattctttctacaggtcttcatatccacagcaacagggactgggtgccagttatcggaccgagtccgcacagcgtcaagcctgcatgtatgctagctccgcccctccctccgaaccagtccctagcttggaagacatctcctgcaacacctggccttctatgcctagctactctagctgtaccgtcacaaccgtgcagccgatggacaggcttccctatcagcactttagcgcccattttacctccggacccctagtgcccagactggccggaatggcaaatcatggaagccctcagctgggagaggggatgtttcaacaccagacgagtgtggctcaccaaccagtggtgcgccagtgtgggcctcaaacaggtctccagtcccccggaaccctgcagcctcccgaattcctctatagccatggggtacccagaactctctctcctcatcagtatcactctgtgcatggcgtcggaatggtgcccgagtggtctgacaattcatag

SEQ ID NO: 254951 - DNA, 1407 bp, Artificial Sequence
  derived and/or modified sequence
atggaagggatcaaggttttcctccatgagcgggagctatggttgaaatttcacgaagtcggcacagagatgataattactaaggcgggaaggagaatgttcccatcatataaggtgaaggtgacgggactgaatcctaagacaaagtatatcctgctgatggacatcgtgcccgcagatgaccaccggtataagtttgccgacaacaaatggagcgtgaccggcaaggccgagccggcaatgcccggaaggctgtacgtgcaccctgacagcccagctaccggcgctcattggatgaggcagcttgtcagcttccagaagctgaagctgaccaataatcatctggatccatttggccacataatactgaactcaatgcataagtatcaaccaaggcttcacattgtcaaggctgatgaaaacaacgggttcggcagcaagaacaccgccttttgtacacatgtctttcccgagacagccttcatcgcggtcaccagttaccagaaccataaaatcacacagcttaagatcgagaacaatccgttcgcaaaggggttcaggggtagcgacgatatggaattgcatcgcatgtcgaggatgcaatcgaaagaataccccgtggttccaaggtctaccgtccgtcagaaggtcgcaagcaaccacagtccgttctccagtgagtctcgggcactttcaaccagctccaatctgggctcccaataccaatgcgagaatggagtgtctggcccttcacaggatctcttgccgccacctaacccttaccccctgccccaagagcactcacagatctaccactgtacaaaacggaaagaggaagagtgctctacaactgaccacccttataagaagccttacatggaaacgtcaccttccgaagaagattctttctatcggtcatcctacccacagcaacaaggcctgggcgcaagctataggactgaaagtgcacaaagacaggcatgcatgtatgcttctagtgcccctccatcggagcctgtgccatctctggaagacattagctgcaatacttggcccagcatgccctcttattcctcatgtaccgttaccaccgtccaacctatggacaggcttccctatcaacacttttcagcccactttacgtccgggcctctagtgcccaggttagccggaatggctaaccacggctccccacaactgggcgaaggcatgttccaacatcagacctcggttgcacaccaacctgtggtcagacagtgcgggcctcagaccggattgcagtcccccggtactctgcaacccccagagtttctgtattcccacggagttcccagaacactctccccacaccagtaccattccgtacacggagttgggatggttccagagtggtccgacaactcctag

SEQ ID NO: 254952 - DNA, 1557 bp, Artificial Sequence
  derived and/or modified sequence
atggcagatgcggatgagggcttcggactggcgcatactcccctggagcccgacgccaaagatctcccctgtgattctaaacctgagagcgcacttggagccccatcaaagtctccaagctctccccaggccgcttttactcagcagggaatggaggggattaaagttttcctacacgagagggagctatggctgaaatttcacgaagtcggcacagagatgatcattaccaaggctggtcggagaatgttcccatcatacaaagtcaaagtgaccgggttgaatcccaaaactaagtacatactcctgatggatattgtccccgctgatgatcacaggtacaagttcgcagataacaaatggtcagttaccggtaaggccgaaccagccatgcctgggaggttatacgtgcatcccgattcgcctgctacaggcgcacattggatgagacaactagtctccttccagaagctgaagctcactaataaccaccttgaccccttcggacatatcatcctcaattccatgcataagtatcagcctaggctgcatattgtgaaggctgatgaaaacaacggattcggatctaagaataccgctttttgtacccatgtctttcccgaaaccgctttcatcgctgtaacaagttatcaaaatcacaaaattacacagctgaaaattgagaacaacccctttgcaaaagggttccggggatctgatgacatggaactgcataggatgtcaagaatgcaaagcaaggaatatcctgtggttccacgctccactgtgcgacagaaggtagcatctaatcactcaccgttctcctcagaaagtcgggcactctccactagcagcaatcttgggagtcagtaccagtgtgaaaacggagtgagcggcccttcccaggatttactgcccccaccgaatccctaccctttgccccaagaacacagtcaaatctaccactgcaccaaaagaaaggaggaggagtgcagtactactgaccatccttacaagaaaccatacatggagacttcaccgtcggaagaggattccttctatagaagtagctatcctcagcagcagggacttggtgcctcatataggaccgagtctgcacagaggcaagcctgcatgtatgcatccagcgccccacccagcgagcctgttccttctctagaggatatctcatgtaatacatggccaagtatgccctcttacagtagttgtactgtaaccactgtccagcctatggacaggttgccttatcagcacttttctgctcacttcacaagtgggccacttgtccccaggctcgccggtatggccaatcatggaagcccgcagctcggagagggaatgttccagcaccagacatctgtggcccatcagccagtggttagacagtgcggaccacagacgggcctccagagccctggcacccttcaaccgccagagttcctgtactctcatggggtgccgagaactctttctccgcaccaatatcattccgttcatggggtaggcatggtaccagaatggtcagataattcatag

SEQ ID NO: 254953 - DNA, 1050 bp, Artificial Sequence
  derived and/or modified sequence
atggcggacgccgacgaaggctttggactagcccacacaccactcgagccagacgctaaggatctcccctgtgattccaagcctgagtctgctctgggcgctccctctaagtccccatcctcacctcaggccgcatttacccagcagggtatggagggcatcaaagtgttcctccacgagcgcgagctctggctgaagtttcacgaggtgggaacggagatgatcattactaaggcagggcgtagaatgttcccatcgtacaaggtgaaggtgacaggcctgaaccccaaaactaaatatatcctcttaatggatatcgtcccagccgacgatcacagatacaaattcgcagataacaaatggtccgtaacaggtaaagctgagcctgccatgccgggtcgcctgtacgtgcaccctgattctcctgctaccggtgcacattggatgcgacagctggttagtttccagaagcttaaactgaccaacaaccatttggatccattcgggcacattattctgaattctatgcataagtaccagccccgtttgcatatagtcaaagcggatgaaaacaacggatttggctctaaaaacactgcattttgcacccatgtctttcccgaaacagccttcattgccgttaccagttatcaaaatcacaaaattactcagctaaagattgagaacaacccgtttgccaaaggattccgcggttctgacgacatggagttgcacagaatgtcgaggatgcagtcaaaggaatatcccgtggtccctcggtcaaccgtgagacagaaagtggcgagtaaccattccccctttagctctgaatccagagcgttgagtactagcagcaacttaggttcccagtatcagtgcgagaacggtgtgtcaggcccatcacaagatcttcttccacctccgaacccgtatcctttgcctcaggaacactcccagatctaccattgtacaaaacgcaagggtgagtgtgaccacccatggtcaatttgctttctctcttatctgttcctaagccttggttggggatag

SEQ ID NO: 254954 - DNA, 3825 bp, Artificial Sequence
  derived and/or modified sequence
catgccttatgcaagagacctcagtcccccggaacaactcgatttccttccaatagaggtctgaggtggactcccacctcccttcgtgaagagttccctcctctcccccttcctaagaaagtcgatcttggctctatttgtgtcttatgttcatcaccctcattcctccggagaaagccgggttggtttatgtctttatttattcccggggccaagacgtccggaacctgtggctgcgcagacccggcactgataggcgaagacggagagaaatttacctcccgccgctgccccccagccaaacgtgacagcgcgcgggccggttgcgtgactcgtgacgtctccaagtcctataggtgcagcggctggtgagatagtcgctatcgcctggttgcctctttattttactggggtatgcctggtaataaacagtaatatttaatttgtcggagaccacaaaccaaccttgagctgggaggtacgtgctcttcttgacagacgttggaagaagacctggcctaaagaggtctcttttggtggtccttttcaaagtcttcacctgagccctgctctccagcgaggcgcactcctggcttttgcgctccaaagaagaggtgggatagttggagagcagaaccttgcgcgggcacagggccctgggcgcaccatggccgacgcagacgagggctttggcctggcgcacacgcctctggagcctgacgcaaaagacctgccctgcgattcgaaacccgagagcgcgctcggggcccccagcaagtccccgtcgtccccgcaggccgccttcacccagcagggcatggagggaatcaaagtgtttctccatgaaagagaactgtggctaaaattccacgaagtgggcacggaaatgatcataaccaaggctggaaggcggatgtttcccagttacaaagtgaaggtgacgggccttaatcccaaaacgaagtacattcttctcatggacattgtacctgccgacgatcacagatacaaattcgcagataataaatggtctgtgacgggcaaagctgagcccgccatgcctggccgcctgtacgtgcacccagactcccccgccaccggggcgcattggatgaggcagctcgtctccttccagaaactcaagctcaccaacaaccacctggacccatttgggcatattattctaaattccatgcacaaataccagcctagattacacatcgtgaaagcggatgaaaataatggatttggctcaaaaaatacagcgttctgcactcacgtctttcctgagactgcgtttatagcagtgacttcctaccagaaccacaagatcacgcaattaaagattgagaataatccctttgccaaaggatttcggggcagtgatgacatggagctgcacagaatgtcaagaatgcaaagtaaagaatatcccgtggtccccaggagcaccgtgaggcaaaaagtggcctccaaccacagtcctttcagcagcgagtctcgagctctctccacctcatccaatttggggtcccaataccagtgtgagaatggtgtttccggcccctcccaggacctcctgcctccacccaacccatacccactgccccaggagcatagccaaatttaccattgtaccaagaggaaagaggaagaatgttccaccacagaccatccctataagaagccctacatggagacatcacccagtgaagaagattccttctaccgctctagctatccacagcagcagggcctgggtgcctcctacaggacagagtcggcacagcggcaagcttgcatgtatgccagctctgcgccccccagcgagcctgtgcccagcctagaggacatcagctgcaacacgtggccaagcatgccttcctacagcagctgcaccgtcaccaccgtgcagcccatggacaggctaccctaccagcacttctccgctcacttcacctcggggcccctggtccctcggctggctggcatggccaaccatggctccccacagctgggagagggaatgttccagcaccagacctccgtggcccaccagcctgtggtcaggcagtgtgggcctcagactggcctgcagtcccctggcacccttcagccccctgagttcctctactctcatggcgtgccaaggactctatcccctcatcagtaccactctgtgcacggagttggcatggtgccagagtggagcgacaatagctaaagtgaggcctgcttcacaacagacatttcctagagaaagagagagagagaggagaaagagagagaaggagagagacagtagccaagagaaccccacggacaagatttttcatttcacccaatgttcacatctgcactcaaggtcgctggatgctgatctaatcagtagcttgaaaccacaattttaaaaatgtgactttcttgttttgtctcaaaacttaaaaaaacaaacacaaaaagatgagtcccaccccccactaccaccacacccatcaaccagccacattcacgctactccccagatctcttcccccattccttcttttgggctctagaaagtcttgcctcattgagtgtttttccctagtgcgtagttggagtctgtccctgtcttggtgttaatgttgacattgttatataataaatgataatatatttttttctttcaattttcttaatgggacccagtcccttatttggggggaggtctgaggcaagtatatttcaaaatatgtacttgcgggattcccttcaagtaaaccatccctgaaacctaaattcacgtttccccttgactaagaaaagcacctacctctgccatgtgatgtttctgaaaagcctctgtatgtccccatttgctttggttttgtcctgccttctccaatatcacgtgctcagttttgcctctacttacccatggagtcaggataacactgacgctccctggcatcctatcttattcagccctaccatcttgccagctctgtctttccagctgtctgtcgctaaaacgtggcctatagcttcccttccggaaagcttgctttgaaaaacttaaaaagcccccgtttacatgtaggcaggactgtgataacagtgcaagctctgtgttgacaagagttgtggacaaaaagccaaaataaatattcttcctgattaaaaaaattttttttgaaaaaaacaaggccagccccaaccttccaaacctccatcaccaacaacccaaactggatgtcaagcaaaatgcacaattcctacagaagaggcaagacacagtcaccaatgatatctcgccaaagaaaccacgcccacaccaatgccaacacaaaactgtgtttactgaaagccgaaaacagtattaaaaaaagtgtgtaagtaaagtgttatggtagggttcttcagatgtaatattttactggtactatttatttataaataggaattctaattaagtaataacatgaaatgaaacccagcataggagctggccaagagcttttaattttattgatactcaaaaccaagtttgtgtttttttgtttttttttgtttttttcctctttcgaatgtgctttgctttttttgattaaaaagaattttttttttccttttttataaacagaccctaataaagagaacagggtaagatgtgaggctgagtgtgtttaagtacgtgagagagtgtgagtgtgtttgtaagtgagtgtccctatgcgattatgtctctttacgttgctaaggggggagggtgaggattaagtactcgtgccttatatttgtgtgccaattaatgcctaataaataccatgtgcttaaacaagt

SEQ ID NO: 254955 - DNA, 3585 bp, Artificial Sequence
  derived and/or modified sequence
gaggtctgaggtggactcccacctcccttcgtgaagagttccctcctctcccccttcctaagaaagtcgatcttggctctatttgtgtcttatgttcatcaccctcattcctccggagaaagccgggttggtttatgtctttatttattcccggggccaagacgtccggaacctgtggctgcgcagacccggcactgataggcgaagacggagagaaatttacctcccgccgctgccccccagccaaacgtgacagcgcgcgggccggttgcgtgactcgtgacgtctccaagtcctataggtgcagcggctggtgagatagtcgctatcgcctggttgcctctttattttactggggtatgcctggtaataaacagtaatatttaatttgtcggagaccacaaaccaaccttgagctgggaggtacgtgctcttcttgacagacgttggaagaagacctggcctaaagaggtctcttttggtggtccttttcaaagtcttcacctgagccctgctctccagcgaggcgcactcctggcttttgcgctccaaagaagaggtgggatagttggagggcatggagggaatcaaagtgtttctccatgaaagagaactgtggctaaaattccacgaagtgggcacggaaatgatcataaccaaggctggaaggcggatgtttcccagttacaaagtgaaggtgacgggccttaatcccaaaacgaagtacattcttctcatggacattgtacctgccgacgatcacagatacaaattcgcagataataaatggtctgtgacgggcaaagctgagcccgccatgcctggccgcctgtacgtgcacccagactcccccgccaccggggcgcattggatgaggcagctcgtctccttccagaaactcaagctcaccaacaaccacctggacccatttgggcatattattctaaattccatgcacaaataccagcctagattacacatcgtgaaagcggatgaaaataatggatttggctcaaaaaatacagcgttctgcactcacgtctttcctgagactgcgtttatagcagtgacttcctaccagaaccacaagatcacgcaattaaagattgagaataatccctttgccaaaggatttcggggcagtgatgacatggagctgcacagaatgtcaagaatgcaaagtaaagaatatcccgtggtccccaggagcaccgtgaggcaaaaagtggcctccaaccacagtcctttcagcagcgagtctcgagctctctccacctcatccaatttggggtcccaataccagtgtgagaatggtgtttccggcccctcccaggacctcctgcctccacccaacccatacccactgccccaggagcatagccaaatttaccattgtaccaagaggaaagaggaagaatgttccaccacagaccatccctataagaagccctacatggagacatcacccagtgaagaagattccttctaccgctctagctatccacagcagcagggcctgggtgcctcctacaggacagagtcggcacagcggcaagcttgcatgtatgccagctctgcgccccccagcgagcctgtgcccagcctagaggacatcagctgcaacacgtggccaagcatgccttcctacagcagctgcaccgtcaccaccgtgcagcccatggacaggctaccctaccagcacttctccgctcacttcacctcggggcccctggtccctcggctggctggcatggccaaccatggctccccacagctgggagagggaatgttccagcaccagacctccgtggcccaccagcctgtggtcaggcagtgtgggcctcagactggcctgcagtcccctggcacccttcagccccctgagttcctctactctcatggcgtgccaaggactctatcccctcatcagtaccactctgtgcacggagttggcatggtgccagagtggagcgacaatagctaaagtgaggcctgcttcacaacagacatttcctagagaaagagagagagagaggagaaagagagagaaggagagagacagtagccaagagaaccccacggacaagatttttcatttcacccaatgttcacatctgcactcaaggtcgctggatgctgatctaatcagtagcttgaaaccacaattttaaaaatgtgactttcttgttttgtctcaaaacttaaaaaaacaaacacaaaaagatgagtcccaccccccactaccaccacacccatcaaccagccacattcacgctactccccagatctcttcccccattccttcttttgggctctagaaagtcttgcctcattgagtgtttttccctagtgcgtagttggagtctgtccctgtcttggtgttaatgttgacattgttatataataaatgataatatatttttttctttcaattttcttaatgggacccagtcccttatttggggggaggtctgaggcaagtatatttcaaaatatgtacttgcgggattcccttcaagtaaaccatccctgaaacctaaattcacgtttccccttgactaagaaaagcacctacctctgccatgtgatgtttctgaaaagcctctgtatgtccccatttgctttggttttgtcctgccttctccaatatcacgtgctcagttttgcctctacttacccatggagtcaggataacactgacgctccctggcatcctatcttattcagccctaccatcttgccagctctgtctttccagctgtctgtcgctaaaacgtggcctatagcttcccttccggaaagcttgctttgaaaaacttaaaaagcccccgtttacatgtaggcaggactgtgataacagtgcaagctctgtgttgacaagagttgtggacaaaaagccaaaataaatattcttcctgattaaaaaaattttttttgaaaaaaacaaggccagccccaaccttccaaacctccatcaccaacaacccaaactggatgtcaagcaaaatgcacaattcctacagaagaggcaagacacagtcaccaatgatatctcgccaaagaaaccacgcccacaccaatgccaacacaaaactgtgtttactgaaagccgaaaacagtattaaaaaaagtgtgtaagtaaagtgttatggtagggttcttcagatgtaatattttactggtactatttatttataaataggaattctaattaagtaataacatgaaatgaaacccagcataggagctggccaagagcttttaattttattgatactcaaaaccaagtttgtgtttttttgtttttttttgtttttttcctctttcgaatgtgctttgctttttttgattaaaaagaattttttttttccttttttataaacagaccctaataaagagaacagggtaagatgtgaggctgagtgtgtttaagtacgtgagagagtgtgagtgtgtttgtaagtgagtgtccctatgcgattatgtctctttacgttgctaaggggggagggtgaggattaagtactcgtgccttatatttgtgtgccaattaatgcctaataaataccatgtgcttaaacaagt

SEQ ID NO: 254956 - DNA, 2203 bp, Artificial Sequence
  derived and/or modified sequence
ttcagagagagagagagagggagagagagtgagagagactgactcttacctcgaatccgggaactttaatcctgaaagctgcgctcagaaaggacttcgaccattcactgggcttccaactttccctccctgggggtgtaaaggaggagcggggcactgagattatatggttgccggtgctcttggaggctattttgtgttctttggcgcttgccaactgggaagtatttagggagagcaagcgcacagcagaggaggtgtgtgttggaggtgggcagtcgccgcggaggctccagcggtaggtgcgccctagtaggcagcagtagccgctattctgggtaagcagtaaaccccgcataaaccccggagccaccatgcctgctcccccgcctcaccgccggcttccctgctaggagcagcagaggatgtggtgaatgcaccggcttcaccgaacgagagcagaaccttgcgcgggcacagggccctgggcgcaccatggccgacgcagacgagggctttggcctggcgcacacgcctctggagcctgacgcaaaagacctgccctgcgattcgaaacccgagagcgcgctcggggcccccagcaagtccccgtcgtccccgcaggccgccttcacccagcagggcatggagggaatcaaagtgtttctccatgaaagagaactgtggctaaaattccacgaagtgggcacggaaatgatcataaccaaggctggaaggcggatgtttcccagttacaaagtgaaggtgacgggccttaatcccaaaacgaagtacattcttctcatggacattgtacctgccgacgatcacagatacaaattcgcagataataaatggtctgtgacgggcaaagctgagcccgccatgcctggccgcctgtacgtgcacccagactcccccgccaccggggcgcattggatgaggcagctcgtctccttccagaaactcaagctcaccaacaaccacctggacccatttgggcatattattctaaattccatgcacaaataccagcctagattacacatcgtgaaagcggatgaaaataatggatttggctcaaaaaatacagcgttctgcactcacgtctttcctgagactgcgtttatagcagtgacttcctaccagaaccacaagatcacgcaattaaagattgagaataatccctttgccaaaggatttcggggcagtgatgacatggagctgcacagaatgtcaagaatgcaaagtaaagaatatcccgtggtccccaggagcaccgtgaggcaaaaagtggcctccaaccacagtcctttcagcagcgagtctcgagctctctccacctcatccaatttggggtcccaataccagtgtgagaatggtgtttccggcccctcccaggacctcctgcctccacccaacccatacccactgccccaggagcatagccaaatttaccattgtaccaagaggaaagaggaagaatgttccaccacagaccatccctataagaagccctacatggagacatcacccagtgaagaagattccttctaccgctctagctatccacagcagcagggcctgggtgcctcctacaggacagagtcggcacagcggcaagcttgcatgtatgccagctctgcgccccccagcgagcctgtgcccagcctagaggacatcagctgcaacacgtggccaagcatgccttcctacagcagctgcaccgtcaccaccgtgcagcccatggacaggctaccctaccagcacttctccgctcacttcacctcggggcccctggtccctcggctggctggcatggccaaccatggctccccacagctgggagagggaatgttccagcaccagacctccgtggcccaccagcctgtggtcaggcagtgtgggcctcagactggcctgcagtcccctggcacccttcagccccctgagttcctctactctcatggcgtgccaaggactctatcccctcatcagtaccactctgtgcacggagttggcatggtgccagagtggagcgacaatagctaaagtgaggcctgcttcacaacagacatttcctagagaaagagagagagagaggagaaagagagagaaggagagagacagtagccaagagaaccccacggacaagatttttcatttcacccaatgttcacatctgcactcaaggtcgctggat

SEQ ID NO: 254957 - DNA, 1050 bp, Artificial Sequence
  derived and/or modified sequence
atggccgacgcagacgagggctttggcctggcgcacacgcctctggagcctgacgcaaaagacctgccctgcgattcgaaacccgagagcgcgctcggggcccccagcaagtccccgtcgtccccgcaggccgccttcacccagcagggcatggagggaatcaaagtgtttctccatgaaagagaactgtggctaaaattccacgaagtgggcacggaaatgatcataaccaaggctggaaggcggatgtttcccagttacaaagtgaaggtgacgggccttaatcccaaaacgaagtacattcttctcatggacattgtacctgccgacgatcacagatacaaattcgcagataataaatggtctgtgacgggcaaagctgagcccgccatgcctggccgcctgtacgtgcacccagactcccccgccaccggggcgcattggatgaggcagctcgtctccttccagaaactcaagctcaccaacaaccacctggacccatttgggcatattattctaaattccatgcacaaataccagcctagattacacatcgtgaaagcggatgaaaataatggatttggctcaaaaaatacagcgttctgcactcacgtctttcctgagactgcgtttatagcagtgacttcctaccagaaccacaagatcacgcaattaaagattgagaataatccctttgccaaaggatttcggggcagtgatgacatggagctgcacagaatgtcaagaatgcaaagtaaagaatatcccgtggtccccaggagcaccgtgaggcaaaaagtggcctccaaccacagtcctttcagcagcgagtctcgagctctctccacctcatccaatttggggtcccaataccagtgtgagaatggtgtttccggcccctcccaggacctcctgcctccacccaacccatacccactgccccaggagcatagccaaatttaccattgtaccaagaggaaaggtgagtgtgatcacccctggtcaatttgctttctttcttaccttttcctttccttgggttgggggtga

SEQ ID NO: 254958 - protein, 140 aa, Artificial Sequence
  derived and/or modified sequence
MAQQRALPQSKETLLQSYNKRLKDDIKSIMDNFTEIIKTAKIEDETQVSRATQGEQDNYEMHVRAANIVRAGESLMKLVSDLKQFLILNDFPSVNEAIDQRNQQLRTLQEECDRKLITLRDEISIDLYELEEEYYSSRYK

SEQ ID NO: 254959 - protein, 134 aa, Artificial Sequence
  derived and/or modified sequence
MAQQRALPQSKETLLQSYNKRLKDDIKSIMDNFTEIIKTAKIEDETQVSRATQGEQDNYEMHVRAGESLMKLVSDLKQFLILNDFPSVNEAIDQRNQQLRTLQEECDRKLITLRDEISIDLYELEEEYYSSRYK

SEQ ID NO: 254960 - DNA, 3872 bp, Artificial Sequence
  derived and/or modified sequence
aaaaatcgaggcggggctgagaggctgcggcggctgactaggttttcggaccgcggcgcggcggggaagagagactgcggcgggagggccaggccgtgggagagacgcgggaaagtgcgggtcgcagaggcacttgaccaccccgccctaggccgacccggcggacgcggcgtctggtgtgcgggcgctggggcgggtcccaggtctccccgctgcgctgcttgaggctcagccatggcccagcagagagccctgccccagagcaaggagacgctgctgcagtcctacaacaagcggctgaaggacgacattaagtccatcatggacaacttcaccgagatcatcaagaccgccaagattgaggacgagacgcaggtgtcacgggccactcagggtgaacaggacaattacgagatgcatgtgcgagccgccaacatcgtccgagccggcgagtccctgatgaagctggtgtccgacctcaagcagttcctgatcctcaatgacttcccctccgtgaacgaggccattgaccagcgcaaccagcagctgcgcacactgcaggaggagtgcgaccggaagctcatcacgctgcgagacgagatctccattgacctctacgagctggaggaggagtattactcgtccaggtataaatagcgctggactccccatgcagagcgggagcctgcctacctgggcctggccagcaggcagggctgccttctgctttttcaaattcttgctggtcttagcagtggagccatgcctgggtttcagagcagagctcctggccagagcgtttgaccgacagacaattcacatccatatgccagggccctgggcctttcccacagtgcaatgtgatgaaaaccacaggactcacgccagtcggataggccgagtctggagaagggaggcgcctggctgtatcccccgcaggccctcttccgagagccttcctcctcgggcagtgcgttctggggctgtgctgctcctgttaccttctgaatccatatgtagagatttcagccaaggctgggccagccttttttgggcagtcaggtccacacctatgtccagggcaccagggatgcaattccatgtggatgtcaccaaaccccagtgtggaggcagggacagtcatgggaatgtgggggatgaagcccaggcagggaatggccttgaaagccattggagctccaattcgtgacccactcagccttatccacggagctggagccaacctacgtgccaggccccatgctgggtcccagggatgcagaagggtcaaaacccatcatcctgacccttgtggggctccgtaagaagctgaaaccttcgaccgtttgagctggaggggccctgagaaatcagagtctacgtatcatttacttagggggaaacttaggctggagacagggaggccttccactctgccccattagcttagaaaatcaagattcagtccagcagatgcagagtccatgtccatcttgtgccttctcctggacaaacctttccttcctggtggtggatttaaaatactcctttctgcccattggccatgctgggagccacagctatccagagccagcatgacctggggcttggtttccctgccctgggctcagtggcactgctgagctgcagcagtcctagagttttccagggggttctgagggaatctttggtccccagtactcattaactcagcagacatgaggcagcatttcctccacactagggtggctgagaggggtcctggggtgtttcagacccttctgggcatctccttccacagctgttcagtttgtcggtctctttgaggcagccaccgtccctgagggcccctgcacagagcagctgtgggcctgtaattcagcctgcctgccttgccttggggcagggagagagggaacctgctcacggccctgcagcagagcagggcgcaaacccaggacatctgtgccaggcttcccatgccctcccccaacagtccctcagcttcacccagcggggcttccaggccagcctgtgtcccctcccgcaggcctcctgtccacaccagcgccccctggggggcctcacacagcccctgtggcagaagcagttgccctcctctgtacattgcctttaagcgaccaggtcctggccgagtttcctctgccccttcttgctggtcccccaaagggcgctccgctccctgccctgccctgccctgccctgttccgcatgagctgcgcctctgtgctcgcctgccccctctctgcttgttagttgctctttctggctctgcctctcctttgctttcctcgggatgccactctgtgcccaggacggttctgagactgaacactgagggcaggagcaagggaggaagccaggggcgaggcaggccgcgggaaagccagggcccctgcctgcaggttagaaagaggcgagcgtggattgtcacagctgcgggcatgggaagggctagctgagctcttcacctgcatcctggctgccgtgaggattccccgtgttagaggtggggacgcctgctggaggccgcctggctgatgtagggctatcgggaagtgccagggcctgtgttcccaactgtcgcccccttcaggctaagtctcaggcagggacagacccagaaagaacacagtctgccctcagagagctctttgcagtgtagtgacactggggtttctgcagtcagggaggagggagggtggccaggctgacagctttttgcaagaggagggggaccagcaccagctgggaggcataggctaggacaggcccacgtggaggctgggcaggaagggcctgctgaggtcacacagctgttggtggttgggccagggcggcttcctcctttcagaatgctagggtggctctcaccactggccgcctctccttgccaggcctgccaactcaggggacagatggagcaggagtggagaaagggaaaggcaggtctggggtgtggtcgtgttttcttaactctgcttctgtcttgctctcccctcccctggctttcctctctgcctgctcctgtctctccctggggtttctggtggtggaaaagctcaagcctttgcgaagctaatgacctgcctctgtgcgaagcttacgggaggctggacctcgacacagactctgctgatggcctctcggcccctctgctggcgtccccggagcccagtgctggccccctacaggtggcagcccctgcccactcccatgctggtggccctggccccactgagcacgcctgagcctccggggccacgcttcgttctcaggaacaaaacctgaggcagccctttggatgccctcacagccttgcttctctcagcctaggttcccatttggggacttcaggaccccagagccactaggacttccttgggaagcccgttagcccagggtgggtcccaccaggacagtagggaaacagttgtttccctagccatttccgaatagcccatcattccgagtcatcatctctgtttgctgccttcctggccagccaggtggaagaaagtttccaagctaggtctggcccgttggggatctcagcagtggggcaggagggtgcctgatttcggggagtcctgacccgagcctgttgtcagagttgggaggggctctgagcagtgttgggcaggccgggtctcccatcccgaggccagcgttcctgtgcagagccccatccactggttcttgccctgagccacatatgtctgtgccatgggctgagtgccacgacaggcccgtgtgacagctgctgcccacgcatgtggaagctaggtgggactcattcctaattctgccgttgtaatgagacttgattaaaacaccgccacttttttgca

SEQ ID NO: 254961 - DNA, 987 bp, Artificial Sequence
  derived and/or modified sequence
aaaaatcgaggcggggctgagaggctgcggcggctgactaggttttcggaccgcggcgcggcggggaagagagactgcggcgggagggccaggccgtgggagagacgcgggaaagtgcgggtcgcagaggcacttgaccaccccgccctaggccgacccggcggacgcggcgtctggtcccaggtctccccgctgcgctgcttgaggctcagccatggcccagcagagagccctgccccagagcaaggagacgctgctgcagtcctacaacaagcggctgaaggacgacattaagtccatcatggacaacttcaccgagatcatcaagaccgccaagattgaggacgagacgcaggtgtcacgggccactcagggtgaacaggacaattacgagatgcatgtccgagccggcgagtccctgatgaagctggtgtccgacctcaagcagttcctgatcctcaatgacttcccctccgtgaacgaggccattgaccagcgcaaccagcagctgcgcacactgcaggaggagtgcgaccggaagctcatcacgctgcgagacgagatctccattgacctctacgagctggaggaggagtattactcgtccaggtataaatagcgctggactccccatgcagagcgggagcctgcctacctgggcctggccagcaggcagggctgccttctgctttttcaaattcttgctggtcttagcagtggagccatgcctgggtttcagagcagagctcctggccagagcgtttgaccgacagacaattcacatccatatgccagggccctgggcctttcccacagtgcaatgtgatgaaaaccacaggactcacgccagtcggataggccgagtctggagaagggaggcgcctggctgtatcccccgcaggccctcttccgagagccttcctcctcgggcagtgcgttctggggctgtgctgctcctgttaccttctgaatccatatgtagagatt

SEQ ID NO: 254962 - DNA, 560 bp, Artificial Sequence
  derived and/or modified sequence
gtgggagagacgcgggaaagtgcgggtcgcagaggcacttgaccaccccgccctaggccgacccggcggacgcggcgtctggtgtgcgggcgctggggcgggtatgagggtcccaggtctccccgctgcgctgcttgaggctcagccatggcccagcagagagccctgccccagagcaaggagacgctgctgcagtcctacaacaagcggctgaaggacgacattaagtccatcatggacaacttcaccgagatcatcaagaccgccaagattgaggacgagacgcaggtgtcacgggccactcagggtgaacaggacaattacgagatgcatgtgcgagccgccaacatcgtccgagccggcgagtccctgatgaagctggtgtccgacctcaagcagttcctgatcctcaatgacttcccctccgtgaacgaggccattgaccagcgcaaccagcagctgcgcacactgcaggaggagtgcgaccggaagctcatcacgctgcgagacgagatctccattgacctctacgagctggaggaggagtattactcgtccag

SEQ ID NO: 254963 - DNA, 561 bp, Artificial Sequence
  derived and/or modified sequence
attcctataaagctaaaaatcgaggcggggctgagaggctgcggcggctgactaggttttcggaccgcggcgcggcggggaagagagactgcggcgggagggccaggccgtgggagagacgcgggaaagtgcgggtcgcagaggcacttgaccaccccgccctaggccgacccggcggacgcggcgtctggtcccaggtctccccgctgcgctgcttgaggctcagccatggcccagcagagagccctgccccagagcaaggagacgctgctgcagtcctacaacaagcggctgaaggacgacattaagtccatcatggacaacttcaccgagatcatcaagaccgccaagattgaggacgagacgcaggtgtcacgggccactcagggtgaacaggacaattacgagatgcatgtgcgagccgccaacatcgtccgagccggcgagtccctgatgaagctggtgtccgacctcaagcagttcctgatcctcaatgacttcccctccgtgaacgaggccattgaccagcgcaaccagcagctgcgcacactgcaggaggag

SEQ ID NO: 254964 - DNA, 3891 bp, Artificial Sequence
  derived and/or modified sequence
acaaacaatgcgagtgcgtccaggagtccgctcggtcgtgcgccagactccgaacctagggggccccgggccctccctgagcaccgcgcgcaaaggcccggccccagggccaggcaactccagcgccgaggccgtccagtgcggctggagggcagaggccgagaggcgcggcgcggaacttgagccccttgtcccggcgcaccggggaaccatgaggtcccaggtctccccgctgcgctgcttgaggctcagccatggcccagcagagagccctgccccagagcaaggagacgctgctgcagtcctacaacaagcggctgaaggacgacattaagtccatcatggacaacttcaccgagatcatcaagaccgccaagattgaggacgagacgcaggtgtcacgggccactcagggtgaacaggacaattacgagatgcatgtgcgagccgccaacatcgtccgagccggcgagtccctgatgaagctggtgtccgacctcaagcagttcctgatcctcaatgacttcccctccgtgaacgaggccattgaccagcgcaaccagcagctgcgcacactgcaggaggagtgcgaccggaagctcatcacgctgcgagacgagatctccattgacctctacgagctggaggaggagtattactcgtccaggtataaatagcgctggactccccatgcagagcgggagcctgcctacctgggcctggccagcaggcagggctgccttctgctttttcaaattcttgctggtcttagcagtggagccatgcctgggtttcagagcagagctcctggccagagcgtttgaccgacagacaattcacatccatatgccagggccctgggcctttcccacagtgcaatgtgatgaaaaccacaggactcacgccagtcggataggccgagtctggagaagggaggcgcctggctgtatcccccgcaggccctcttccgagagccttcctcctcgggcagtgcgttctggggctgtgctgctcctgttaccttctgaatccatatgtagagatttcagccaaggctgggccagccttttttgggcagtcaggtccacacctatgtccagggcaccagggatgcaattccatgtggatgtcaccaaaccccagtgtggaggcagggacagtcatgggaatgtgggggatgaagcccaggcagggaatggccttgaaagccattggagctccaattcgtgacccactcagccttatccacggagctggagccaacctacgtgccaggccccatgctgggtcccagggatgcagaagggtcaaaacccatcatcctgacccttgtggggctccgtaagaagctgaaaccttcgaccgtttgagctggaggggccctgagaaatcagagtctacgtatcatttacttagggggaaacttaggctggagacagggaggccttccactctgccccattagcttagaaaatcaagattcagtccagcagatgcagagtccatgtccatcttgtgccttctcctggacaaacctttccttcctggtggtggatttaaaatactcctttctgcccattggccatgctgggagccacagctatccagagccagcatgacctggggcttggtttccctgccctgggctcagtggcactgctgagctgcagcagtcctagagttttccagggggttctgagggaatctttggtccccagtactcattaactcagcagacatgaggcagcatttcctccacactagggtggctgagaggggtcctggggtgtttcagacccttctgggcatctccttccacagctgttcagtttgtcggtctctttgaggcagccaccgtccctgagggcccctgcacagagcagctgtgggcctgtaattcagcctgcctgccttgccttggggcagggagagagggaacctgctcacggccctgcagcagagcagggcgcaaacccaggacatctgtgccaggcttcccatgccctcccccaacagtccctcagcttcacccagcggggcttccaggccagcctgtgtcccctcccgcaggcctcctgtccacaccagcgccccctggggggcctcacacagcccctgtggcagaagcagttgccctcctctgtacattgcctttaagcgaccaggtcctggccgagtttcctctgccccttcttgctggtcccccaaagggcgctccgctccctgccctgccctgccctgccctgttccgcatgagctgcgcctctgtgctcgcctgccccctctctgcttgttagttgctctttctggctctgcctctcctttgctttcctcgggatgccactctgtgcccaggacggttctgagactgaacactgagggcaggagcaagggaggaagccaggggcgaggcaggccgcgggaaagccagggcccctgcctgcaggttagaaagaggcgagcgtggattgtcacagctgcgggcatgggaagggctagctgagctcttcacctgcatcctggctgccgtgaggattccccgtgttagaggtggggacgcctgctggaggccgcctggctgatgtagggctatcgggaagtgccagggcctgtgttcccaactgtcgcccccttcaggctaagtctcaggcagggacagacccagaaagaacacagtctgccctcagagagctctttgcagtgtagtgacactggggtttctgcagtcagggaggagggagggtggccaggctgacagctttttgcaagaggagggggaccagcaccagctgggaggcataggctaggacaggcccacgtggaggctgggcaggaagggcctgctgaggtcacacagctgttggtggttgggccagggcggcttcctcctttcagaatgctagggtggctctcaccactggccgcctctccttgccaggcctgccaactcaggggacagatggagcaggagtggagaaagggaaaggcaggtctggggtgtggtcgtgttttcttaactctgcttctgtcttgctctcccctcccctggctttcctctctgcctgctcctgtctctccctggggtttctggtggtggaaaagctcaagcctttgcgaagctaatgacctgcctctgtgcgaagcttacgggaggctggacctcgacacagactctgctgatggcctctcggcccctctgctggcgtccccggagcccagtgctggccccctacaggtggcagcccctgcccactcccatgctggtggccctggccccactgagcacgcctgagcctccggggccacgcttcgttctcaggaacaaaacctgaggcagccctttggatgccctcacagccttgcttctctcagcctaggttcccatttggggacttcaggaccccagagccactaggacttccttgggaagcccgttagcccagggtgggtcccaccaggacagtagggaaacagttgtttccctagccatttccgaatagcccatcattccgagtcatcatctctgtttgctgccttcctggccagccaggtggaagaaagtttccaagctaggtctggcccgttggggatctcagcagtggggcaggagggtgcctgatttcggggagtcctgacccgagcctgttgtcagagttgggaggggctctgagcagtgttgggcaggccgggtctcccatcccgaggccagcgttcctgtgcagagccccatccactggttcttgccctgagccacatatgtctgtgccatgggctgagtgccacgacaggcccgtgtgacagctgctgcccacgcatgtggaagctaggtgggactcattcctaattctgccgttgtaatgagacttgattaaaacaccgccacttttttgc

SEQ ID NO: 254965 - DNA, 2725 bp, Artificial Sequence
  derived and/or modified sequence
aaaaatcgaggcggggctgagaggctgcggcggctgactaggttttcggaccgcggcgcggcggggaagagagactgcggcgggagggccaggccgtgggagagacgcgggaaagtgcgggtcgcagaggcacttgaccaccccgccctaggccgacccggcggacgcggcgtctggtgtgcgggcgctggggcgggtcccaggtctccccgctgcgctgcttgaggctcagccatggcccagcagagagccctgccccagagcaaggagacgctgctgcagtcctacaacaagcggctgaaggacgacattaagtccatcatggacaacttcaccgagatcatcaagaccgccaagattgaggacgagacgcaggtgtcacgggccactcagggtgaacaggacaattacgagatgcatgtgcgagccgccaacatcgtccgagccggcgagtccctgatgaagctggtgtccgacctcaagcagttcctgatcctcaatgacttcccctccgtgaacgaggccattgaccagcgcaaccagcagctgcgcacactgcaggaggagtgcgaccggaagctcatcacgctgcgagacgagatctccattgacctctacgagctggaggaggagtattactcgtccaggtataaatagcgctggactccccatgcagagcgggagcctgcctacctgggcctggccagcaggcagggctgccttctgctttttcaaattcttgctggtcttagcagtggagccatgcctgggtttcagagcagagctcctggccagagcgtttgaccgacagacaattcacatccatatgccagggccctgggcctttcccacagtgcaatgtgatgaaaaccacaggactcacgccagtcggataggccgagtctggagaagggaggcgcctggctgtatcccccgcaggccctcttccgagagccttcctcctcgggcagtgcgttctggggctgtgctgctcctgttaccttctgaatccatatgtagagatttcagccaaggctgggccagccttttttgggcagtcaggtccacacctatgtccagggcaccagggatgcaattccatgtggatgtcaccaaaccccagtgtggaggcagggacagtcatgggaatgtgggggatgaagcccaggcagggaatggccttgaaagccattggagctccaattcgtgacccactcagccttatccacggagctggagccaacctacgtgccaggccccatgctgggtcccagggatgcagaagggtcaaaacccatcatcctgacccttgtggggctccgtaagaagctgaaaccttcgaccgtttgagctggaggggccctgagaaatcagagtctacgtatcatttacttagggggaaacttaggctggagacagggaggccttccactctgccccattagcttagaaaatcaagattcagtccagcagatgcagagtccatgtccatcttgtgccttctcctggacaaacctttccttcctggtggtggatttaaaatactcctttctgcccattggccatgctgggagccacagctatccagagccagcatgacctggggcttggtttccctgccctgggctcagtggcactgctgagctgcagcagtcctagagttttccagggggttctgagggaatctttggtccccagtactcattaactcagcagacatgaggcagcatttcctccacactagggtggctgagaggggtcctggggtgtttcagacccttctgggcatctccttccacagctgttcagtttgtcggtctctttgaggcagccaccgtccctgagggcccctgcacagagcagctgtgggcctgtaattcagcctgcctgccttgccttggggcagggagagagggaacctgctcacggccctgcagcagagcagggcgcaaacccaggacatctgtgccaggcttcccatgccctcccccaacagtccctcagcttcacccagcggggcttccaggccagcctgtgtcccctcccgcaggcctcctgccccctacaggtggcagcccctgcccactcccatgctggtggccctggccccactgagcacgcctgagcctccggggccacgcttcgttctcaggaacaaaacctgaggcagccctttggatgccctcacagccttgcttctctcagcctaggttcccatttggggacttcaggaccccagagccactaggacttccttgggaagcccgttagcccagggtgggtcccaccaggacagtagggaaacagttgtttccctagccatttccgaatagcccatcattccgagtcatcatctctgtttgctgccttcctggccagccaggtggaagaaagtttccaagctaggtctggcccgttggggatctcagcagtggggcaggagggtgcctgatttcggggagtcctgacccgagcctgttgtcagagttgggaggggctctgagcagtgttgggcaggccgggtctcccatcccgaggccagcgttcctgtgcagagccccatccactggttcttgccctgagccacatatgtctgtgccatgggctgagtgccacgacaggcccgtgtgacagctgctgcccacgcatgtggaagctaggtgggactcattcctaattctgccgttgtaatgagacttgattaaaacaccgccacttttttgca

SEQ ID NO: 254966 - DNA, 423 bp, Artificial Sequence
  derived and/or modified sequence
atggcccagcagcgggccctgccccagtcaaaagagacattgttgcagtcttacaataagcggctgaaagatgatattaagtccataatggataacttcacggaaataatcaaaactgctaagatagaagacgagacgcaggtgagtcgtgccacccagggtgaacaggacaactacgaaatgcacgttagggctgcaaacatcgtccgcgcaggcgaaagcctgatgaagctcgtgtctgatcttaagcagttcctgatcctcaatgatttcccctcggtgaacgaggccattgatcaaaggaaccagcagcttcggacattgcaggaagaatgcgacagaaagctaatcacactacgtgacgagatcagcatcgacctgtatgagttagaggaagagtactattcgtctcggtacaagtag

SEQ ID NO: 254967 - DNA, 405 bp, Artificial Sequence
  derived and/or modified sequence
atggcgcagcagagagctctgcctcagtcaaaagaaactctgcttcagagttacaacaagcgcttaaaggacgacattaaatctattatggataacttcaccgagataattaagacagctaagattgaggatgaaacacaagtgtcccgggccacgcagggcgaacaggacaactacgagatgcatgtgcgagccggcgagtcactgatgaagctcgtgtctgacctcaagcagttcctgattttgaatgattttccaagtgttaatgaggcgattgatcagagaaaccagcaactgcgaaccctgcaggaggagtgcgaccgtaagttgattaccctgcgtgacgagataagcatcgacctgtacgaactcgaggaggagtactatagttcacgttacaagtag

SEQ ID NO: 254968 - DNA, 414 bp, Artificial Sequence
  derived and/or modified sequence
atggcccagcaacgagccctgccacaatcaaaagagacacttctgcagagctacaacaagagacttaaggacgacattaaaagtattatggataacttcaccgagattatcaaaacagccaaaatcgaggatgagacccaggtgtctcgggctactcagggggaacaggacaactacgagatgcacgtgcgagcagcaaatattgtccgagcaggcgagagtctgatgaaactggtgagtgacttgaaacagtttctgatcctcaacgacttcccttctgtgaatgaggcaattgaccaacgtaatcagcaactccgtacccttcaggaggaatgtgatagaaaacttatcacactgagagatgagatctctatcgacctttatgagcttgaagaggaatattacagcagctag

SEQ ID NO: 254969 - DNA, 336 bp, Artificial Sequence
  derived and/or modified sequence
atggctcagcagagggctcttccccaaagcaaggagaccctgctgcaaagttataataaacgcctcaaggatgacataaagagcattatggataacttcacagaaatcattaaaaccgcgaaaatcgaggatgaaacccaagtgtccagagccactcaaggggagcaggataattatgagatgcacgtgagagctgcaaatatagtcagagccggcgagtccttgatgaagttggtctctgatctaaagcagtttctaatcttgaacgacttcccatcagtaaacgaggccatcgatcagcgcaatcaacagttgcggactctgcaagaggagtag

SEQ ID NO: 254970 - DNA, 423 bp, Artificial Sequence
  derived and/or modified sequence
atggcccaacagagggccctgccacagagcaaggaaaccctcctccagtcttacaacaaacgcctgaaggacgacattaaatccatcatggataactttaccgagatcatcaagaccgccaaaatcgaggatgagacccaggtctcacgagcaacccaaggcgaacaagacaattacgagatgcatgtgcgtgctgccaatatagtaagagcaggggaaagtctgatgaaactggttagcgatctcaagcagtttttaatcttaaacgactttccatctgtcaacgaggccatagatcagaggaaccagcagctgagaaccttgcaggaagaatgtgatcgaaagttaatcaccctgagagacgaaatctccatagacctatacgagttggaagaggaatattacagcagcagatacaagtag

SEQ ID NO: 254971 - DNA, 423 bp, Artificial Sequence
  derived and/or modified sequence
atggcacagcagagggccctcccccaatctaaggagacgcttctccaaagctataacaagcgtctaaaggacgatatcaagtctatcatggacaactttacagaaattataaagacagctaaaatcgaagacgagacgcaggtaagccgagccacccaaggggagcaggacaactatgagatgcacgtccgggccgctaatatagttagggcgggcgagtctctcatgaagctcgtgtccgacctcaagcaatttctgatcttgaacgacttcccctctgttaatgaagccattgaccagcgcaaccaacaactacgcacgctccaagaggagtgcgatcggaaacttattactttaagagacgaaatatctatagacctatacgagctggaagaggaatattattcatcccgatacaagtag

SEQ ID NO: 254972 - DNA, 408 bp, Artificial Sequence
  derived and/or modified sequence
atggcacagcaacgcgctttaccacagtctaaggaaactttactgcagtcttacaacaaacgactcaaagacgatatcaaatccattatggataactttactgagatcattaaaacagccaagatcgaggatgaaacacaagtctcaagggccacccaaggtgaacaggataactacgaaatgcacgtgcgggccgccaacatcgtaagagcgggggaaagcctgatgaagttagttagcgatctcaaacagttcctgatattaaacgatttcccgtctgtgaatgaggctatcgaccagagaaaccaacagctcaggacccttcaagaagagtgtgatcggaagctgatcaccctgcgcgacgagatttctatcgatttgtatgagcttgaggaggaatactattag

SEQ ID NO: 254973 - DNA, 534 bp, Artificial Sequence
  derived and/or modified sequence
aaagctaaaaatcgaggcggggctgagaggctgcggcggctgactaggttttcggaccgcggcgcggcggggaagagagactgcggcgggagggccaggtctccccgctgcgctgcttgaggctcagccatggcccagcagagagccctgccccagagcaaggagacgctgctgcagtcctacaacaagcggctgaaggacgacattaagtccatcatggacaacttcaccgagatcatcaagaccgccaagattgaggacgagacgcaggtgtcacgggccactcagggtgaacaggacaattacgagatgcatgtgcgagccgccaacatcgtccgagccggcgagtccctgatgaagctggtgtccgacctcaagcagttcctgatcctcaatgacttcccctccgtgaacgaggccattgaccagcgcaaccagcagctgcgcacactgcaggaggagtgcgaccggaagctcatcacgctgcgagacgagatctccattgacctctacgagctggaggaggagtattac

SEQ ID NO: 254974 - DNA, 423 bp, Artificial Sequence
  derived and/or modified sequence
atggcccagcagagggccctgccccagagcaaggagaccctgctgcagagctacaacaagaggctgaaggatgacatcaagagcatcatggacaacttcacagagatcatcaagacagccaagattgaagatgagacccaggtgtcccgggccacccagggcgagcaggacaactatgagatgcacgtgcgggccgccaacatcgtgcgggccggggagagcctgatgaagctggtgtctgacctgaagcagttcctgatcctgaatgacttccccagcgtgaatgaggccatcgaccagaggaaccagcagctgcggaccctgcaggaggagtgtgacaggaagctgatcaccctgagagatgagatcagcattgacctgtatgagctggaggaggagtactacagcagccgctacaagtag

SEQ ID NO: 254975 - DNA, 405 bp, Artificial Sequence
  derived and/or modified sequence
atggcccagcagagggccctgccccagagcaaggagaccctgctgcagagctacaacaagaggctgaaggatgacatcaagagcatcatggacaacttcacagagatcatcaagacagccaagattgaagatgagacccaggtgtcccgggccacccagggcgagcaggacaactatgagatgcacgtgcgggccggggagagcctgatgaagctggtgtctgacctgaagcagttcctgatcctgaatgacttccccagcgtgaatgaggccatcgaccagaggaaccagcagctgcggaccctgcaggaggagtgtgacaggaagctgatcaccctgagagatgagatcagcattgacctgtatgagctggaggaggagtactacagcagccgctacaagtag

SEQ ID NO: 254976 - DNA, 414 bp, Artificial Sequence
  derived and/or modified sequence
atggcccagcagagggccctgccccagagcaaggagaccctgctgcagagctacaacaagaggctgaaggatgacatcaagagcatcatggacaacttcacagagatcatcaagacagccaagattgaagatgagacccaggtgtcccgggccacccagggcgagcaggacaactatgagatgcacgtgcgggccgccaacatcgtgcgggccggggagagcctgatgaagctggtgtctgacctgaagcagttcctgatcctgaatgacttccccagcgtgaatgaggccatcgaccagaggaaccagcagctgcggaccctgcaggaggagtgtgacaggaagctgatcaccctgagagatgagatcagcattgacctgtatgagctggaggaggagtactacagcagctag

SEQ ID NO: 254977 - DNA, 336 bp, Artificial Sequence
  derived and/or modified sequence
atggcccagcagagggccctgccccagagcaaggagaccctgctgcagagctacaacaagaggctgaaggatgacatcaagagcatcatggacaacttcacagagatcatcaagacagccaagattgaagatgagacccaggtgtcccgggccacccagggcgagcaggacaactatgagatgcacgtgcgggccgccaacatcgtgcgggccggggagagcctgatgaagctggtgtctgacctgaagcagttcctgatcctgaatgacttccccagcgtgaatgaggccatcgaccagaggaaccagcagctgcggaccctgcaggaggagtag

SEQ ID NO: 254978 - DNA, 408 bp, Artificial Sequence
  derived and/or modified sequence
atggcccagcagagggccctgccccagagcaaggagaccctgctgcagagctacaacaagaggctgaaggatgacatcaagagcatcatggacaacttcacagagatcatcaagacagccaagattgaagatgagacccaggtgtcccgggccacccagggcgagcaggacaactatgagatgcacgtgcgggccgccaacatcgtgcgggccggggagagcctgatgaagctggtgtctgacctgaagcagttcctgatcctgaatgacttccccagcgtgaatgaggccatcgaccagaggaaccagcagctgcggaccctgcaggaggagtgtgacaggaagctgatcaccctgagagatgagatcagcattgacctgtatgagctggaggaggagtactactag

SEQ ID NO: 254979 - DNA, 423 bp, Artificial Sequence
  derived and/or modified sequence
atggcccagcagcgggccctgccccagagcaaggagaccctgctgcagtcatataacaagcggctcaaggacgacatcaaatcgataatggacaacttcacggaaattattaaaacagccaagattgaggatgaaactcaggtctcccgtgctacccagggcgagcaggacaattatgagatgcatgtgagggctgccaatattgtgcgagctggcgaaagtctgatgaagttggtcagcgacctaaaacagttccttatcctgaatgacttcccaagcgttaacgaagctatcgatcagaggaatcagcaactccgcaccttacaggaggaatgtgaccggaagctcatcacacttagagacgagatatccatagatctctatgagctcgaggaagagtactatagctccagatacaaatag

SEQ ID NO: 254980 - DNA, 405 bp, Artificial Sequence
  derived and/or modified sequence
atggcccagcagcgggccctgccccagagcaaggagaccctgctgcagtcctataataagcgtctcaaggacgatatcaagagcatcatggacaacttcacggagattattaaaacagccaagattgaagacgagacacaggtgagtcgcgcaactcagggcgagcaggataattatgagatgcatgtaagggccggagaaagcctcatgaagctggtctcagatttgaaacagtttctgatattaaatgattttccttcagtaaatgaagccatcgatcagcgaaatcagcagctgcgcacgctgcaggaagagtgcgaccgcaagctgattactctgagagacgaaatcagtattgatttatacgagctcgaagaggagtactacagcagtcgctacaaatag

SEQ ID NO: 254981 - DNA, 414 bp, Artificial Sequence
  derived and/or modified sequence
atggcccagcagcgggccctgccccagagcaaggagaccctgctgcagagttacaataaacggcttaaggacgatattaaatctattatggacaacttcaccgagatcattaagactgcgaaaatcgaagatgaaacacaagtctcaagggcaacgcagggggagcaggacaactatgaaatgcacgttcgggcagccaatatagtgcgggctggagagtcgctgatgaaacttgtaagcgacttgaagcagtttctgattctgaacgactttccatccgtgaatgaagccatcgaccagcgaaaccagcagctgcgaacacttcaagaggagtgcgatcggaagctgatcacccttcgggacgaaattagtattgacctgtacgagctcgaagaggagtactactcaagctag

SEQ ID NO: 254982 - DNA, 336 bp, Artificial Sequence
  derived and/or modified sequence
atggcccagcagcgggccctgccccagagcaaggagaccctgctgcagtcttacaacaaaaggctgaaggatgatattaagtcaattatggataatttcaccgaaattataaagacagccaagattgaggacgagactcaagtctcacgagccactcaaggcgagcaggataattacgaaatgcacgttcgggcagctaatattgtcagggccggggagtcactcatgaaattggtaagcgatttaaagcagtttctaatactcaatgacttccccagcgtcaacgaggcaattgatcagcgcaaccagcagttacgaacattacaggaggaatag

SEQ ID NO: 254983 - DNA, 423 bp, Artificial Sequence
  derived and/or modified sequence
atggcccagcagcgggccctgccccagagcaaggagaccctgctgcagtcgtacaataagagattgaaggacgatatcaaaagtatcatggataattttaccgaaataatcaagactgctaagatcgaagatgaaacacaggtgtcaagagccacccagggagagcaggataattatgagatgcacgtacgcgcagccaatattgtgcgagctggagaatcccttatgaaactggttagcgatcttaagcaattcctgattctgaatgacttcccttctgtgaacgaggctattgatcaaaggaaccaacagcttaggacccttcaagaggaatgtgataggaagcttatcactctgagggacgagatctctattgacctgtacgagcttgaggaggagtactactcttccagatataaatag

SEQ ID NO: 254984 - DNA, 423 bp, Artificial Sequence
  derived and/or modified sequence
atggcccagcagcgggccctgccccagagcaaggagaccctgctgcagtcatacaacaagcgcctaaaggacgacattaaatccatcatggataatttcactgaaattataaagaccgcgaagatcgaggacgagacacaggtttctcgcgcaacacagggcgagcaagacaactacgagatgcacgtgagagccgccaatattgtgcgggccggggagagtttgatgaagttagtatcagatctcaaacaatttttgatcctcaatgactttccaagcgtgaacgaggcgatcgaccagagaaaccaacaactgcgcactttacaggaggaatgcgaccgcaaactgatcactcttagagatgagatttccatcgacttgtatgaactcgaggaagaatactatagttcaaggtataagtag

SEQ ID NO: 254985 - DNA, 408 bp, Artificial Sequence
  derived and/or modified sequence
atggcccagcagcgggccctgccccagagcaaggagaccctgctgcagagttacaacaagcgcctgaaggatgacataaagtctatcatggataattttactgagattattaagacggctaagatagaggatgagacacaggtctcccgcgccacccagggagagcaggataactacgagatgcacgtcagggcagctaatattgtcagggctggagaatctttaatgaagctggtgagcgaccttaagcagtttctcattctgaacgactttccttcagtgaacgaagccatagaccagcgaaaccagcagctccgcactctgcaagaagagtgcgaccgtaagctcattaccttgcgagatgagatcagcatcgatctctacgagcttgaagaggaatactattag

SEQ ID NO: 254986 - DNA, 423 bp, Artificial Sequence
  derived and/or modified sequence
atggcccaacagagggccctgcctcaaagcaaagagaccctgctccagtcttacaataagagactgaaggacgatatcaaatcaatcatggacaactttaccgagattattaaaacggccaaaattgaggatgagacacaggtgtcccgtgccactcaaggggaacaggacaactatgaaatgcacgtccgggctgccaatatcgtccgagccggtgagtctctgatgaaactcgtgtccgacttaaaacagtttctcatcctaaacgatttcccatctgtgaatgaagccatcgaccagagaaaccagcagcttagaactctccaggaagaatgtgataggaagctcatcactctgcgcgatgaaatctccatcgatttatacgaactggaggaggaatattacagctccagatataaatag

SEQ ID NO: 254987 - DNA, 405 bp, Artificial Sequence
  derived and/or modified sequence
atggcccaacaacgggctctcccacaatccaaggagaccttactgcaaagctataataagcgcctgaaggacgatataaagagcataatggacaatttcactgaaataatcaagaccgcaaagattgaggacgagactcaggtaagccgcgcaacacagggagagcaggacaattacgagatgcacgtccgcgctggcgagtccctcatgaagctggtcagtgatttgaagcagttcctgatcctgaatgacttcccaagtgtcaatgaagccatagaccagagaaaccaacagctgcggacacttcaggaggagtgcgaccgtaagcttattacgctgcgcgatgagatatctatcgatctgtacgagctggaagaggagtactattcatcccgttacaagtag

SEQ ID NO: 254988 - DNA, 414 bp, Artificial Sequence
  derived and/or modified sequence
atggcccagcagcgcgcactgccgcagtccaaagaaacgctgctgcagtcatacaacaaaaggctcaaggacgacataaaatccatcatggataatttcactgaaatcattaagaccgccaagattgaagatgagacacaggtaagccgggcaactcaaggcgagcaagacaattatgaaatgcatgtccgtgccgctaatatagtgagggcaggagaatctctaatgaaacttgtgagtgatctgaagcaattcctgatactcaacgactttccatcagtgaacgaggctatcgatcagcgtaaccagcagctacgcaccttacaggaagagtgtgatcggaagctgatcactctcagagatgagatctccattgacctgtacgagttagaagaagagtactactcaagttag

SEQ ID NO: 254989 - DNA, 336 bp, Artificial Sequence
  derived and/or modified sequence
atggcacagcagagggccttaccccagagtaaggagaccctgctccagagttacaacaagcgtctaaaagatgatataaagagcattatggacaatttcactgagattatcaaaacagccaaaatcgaagatgaaacccaagtatcaagggctacgcagggcgaacaagacaattatgaaatgcatgtaagagccgcaaacattgtccgtgctggtgagtccctgatgaagctggtttctgatctgaaacagttcctgatcctgaacgactttccatccgttaatgaggctattgaccagaggaaccagcagttgcggaccttgcaggaggagtag

SEQ ID NO: 254990 - DNA, 423 bp, Artificial Sequence
  derived and/or modified sequence
atggctcagcagcgggcactcccacagagcaaggagactctgttacagagttacaataagagactgaaagatgacataaagtcaattatggataatttcacggaaatcattaaaaccgccaaaatcgaagacgagactcaggtgtcacgagctacacagggggagcaggataattacgagatgcacgtgcgggcagccaacatcgttagagcaggcgagtccctaatgaagttggtctcagatctaaagcagttcctgatcttaaatgatttcccatccgtcaacgaggccattgaccagcgtaaccagcagctgcgtacactccaggaggagtgcgaccgaaagctgataacacttagagacgaaatcagtatcgatctgtacgagctggaggaggagtactattccagccgttacaaatag

SEQ ID NO: 254991 - DNA, 423 bp, Artificial Sequence
  derived and/or modified sequence
atggcccaacagagggcactcccacagtccaaagaaacactgttacaaagttacaataaaaggctgaaagacgatattaagtccattatggacaacttcacagagattatcaagaccgcgaaaattgaagatgaaactcaggttagtcgtgcgactcagggagagcaggacaactatgagatgcacgtgcgtgccgctaacattgtgcgggctggcgaatcgctgatgaagctggtctctgatttaaagcagtttctgattctaaacgactttccttccgtaaatgaggccatagatcagagaaatcagcagctcaggacgctgcaagaggaatgtgaccgtaagctcataacgctgcgggacgagattagcattgacctttacgaactggaagaagaatactactcttctaggtacaaatag

SEQ ID NO: 254992 - DNA, 408 bp, Artificial Sequence
  derived and/or modified sequence
atggcccaacagcgggcacttcctcagagcaaagagacactactgcagagctacaacaaaaggttgaaggacgacattaagtccataatggataacttcaccgagatcattaagactgcgaagatagaggatgagacccaagtgtcacgggcaactcagggggagcaggataactacgaaatgcacgttcgagcggctaacattgtacgagccggagagtccctgatgaaactggtatctgatcttaagcaattcctcattctgaacgactttccatcggttaatgaagcaatcgaccagcggaatcagcagctgagaactctgcaagaggagtgcgacagaaagctcatcaccctgagggatgagatttctatagacctgtatgaactcgaggaggagtactactag

SEQ ID NO: 254993 - DNA, 423 bp, Artificial Sequence
  derived and/or modified sequence
atggcccagcagagagccctgccccagagcaaggagaccctgctgcagagctacaacaagagactgaaggacgacatcaagagcatcatggacaacttcaccgagatcatcaagaccgccaagatcgaggacgagacccaggtgagcagagccacccagggcgagcaggacaactacgagatgcacgtgagagccgccaacatcgtgagagccggcgagagcctgatgaagctggtgagcgacctgaagcagttcctgatcctgaacgacttccccagcgtgaacgaggccatcgaccagagaaaccagcagctgagaaccctgcaggaggagtgcgacagaaagctgatcaccctgagagacgagatcagcatcgacctgtacgagctggaggaggagtactacagcagcagatacaagtag

SEQ ID NO: 254994 - DNA, 405 bp, Artificial Sequence
  derived and/or modified sequence
atggcccagcagagagccctgccccagagcaaggagaccctgctgcagagctacaacaagagactgaaggacgacatcaagagcatcatggacaacttcaccgagatcatcaagaccgccaagatcgaggacgagacccaggtgagcagagccacccagggcgagcaggacaactacgagatgcacgtgagagccggcgagagcctgatgaagctggtgagcgacctgaagcagttcctgatcctgaacgacttccccagcgtgaacgaggccatcgaccagagaaaccagcagctgagaaccctgcaggaggagtgcgacagaaagctgatcaccctgagagacgagatcagcatcgacctgtacgagctggaggaggagtactacagcagcagatacaagtag

SEQ ID NO: 254995 - DNA, 414 bp, Artificial Sequence
  derived and/or modified sequence
atggcccagcagagagccctgccccagagcaaggagaccctgctgcagagctacaacaagagactgaaggacgacatcaagagcatcatggacaacttcaccgagatcatcaagaccgccaagatcgaggacgagacccaggtgagcagagccacccagggcgagcaggacaactacgagatgcacgtgagagccgccaacatcgtgagagccggcgagagcctgatgaagctggtgagcgacctgaagcagttcctgatcctgaacgacttccccagcgtgaacgaggccatcgaccagagaaaccagcagctgagaaccctgcaggaggagtgcgacagaaagctgatcaccctgagagacgagatcagcatcgacctgtacgagctggaggaggagtactacagcagctag

SEQ ID NO: 254996 - DNA, 336 bp, Artificial Sequence
  derived and/or modified sequence
atggcccagcagagagccctgccccagagcaaggagaccctgctgcagagctacaacaagagactgaaggacgacatcaagagcatcatggacaacttcaccgagatcatcaagaccgccaagatcgaggacgagacccaggtgagcagagccacccagggcgagcaggacaactacgagatgcacgtgagagccgccaacatcgtgagagccggcgagagcctgatgaagctggtgagcgacctgaagcagttcctgatcctgaacgacttccccagcgtgaacgaggccatcgaccagagaaaccagcagctgagaaccctgcaggaggagtag

SEQ ID NO: 254997 - DNA, 408 bp, Artificial Sequence
  derived and/or modified sequence
atggcccagcagagagccctgccccagagcaaggagaccctgctgcagagctacaacaagagactgaaggacgacatcaagagcatcatggacaacttcaccgagatcatcaagaccgccaagatcgaggacgagacccaggtgagcagagccacccagggcgagcaggacaactacgagatgcacgtgagagccgccaacatcgtgagagccggcgagagcctgatgaagctggtgagcgacctgaagcagttcctgatcctgaacgacttccccagcgtgaacgaggccatcgaccagagaaaccagcagctgagaaccctgcaggaggagtgcgacagaaagctgatcaccctgagagacgagatcagcatcgacctgtacgagctggaggaggagtactactag

SEQ ID NO: 254998 - protein, 1938 aa, Artificial Sequence
  derived and/or modified sequence
MQSFREQSSYHGNQQSYPQEVHGSSRLEEFSPRQAQMFQNFGGTGGSSGSSGSGSGGGRRGAAAAAAAMASETSGHQGYQGFRKEAGDFYYMAGNKDPVTTGTPQPPQRRPSGPVQSYGPPQGSSFGNQYGSEGHVGQFQAQHSGLGGVSHYQQDYTGPFSPGSAQYQQQASSQQQQQQVQQLRQQLYQSHQPLPQATGQPASSSSHLQPMQRPSTLPSSAAGYQLRVGQFGQHYQSSASSSSSSSFPSPQRFSQSGQSYDGSYNVNAGSQYEGHNVGSNAQAYGTQSNYSYQPQSMKNFEQAKIPQGTQQGQQQQQPQQQQHPSQHVMQYTNAATKLPLQSQVGQYNQPEVPVRSPMQFHQNFSPISNPSPAASVVQSPSCSSTPSPLMQTGENLQCGQGSVPMGSRNRILQLMPQLSPTPSMMPSPNSHAAGFKGFGLEGVPEKRLTDPGLSSLSALSTQVANLPNTVQHMLLSDALTPQKKTSKRPSSSKKADSCTNSEGSSQPEEQLKSPMAESLDGGCSSSSEDQGERVRQLSGQSTSSDTTYKGGASEKAGSSPAQGAQNEPPRLNASPAAREEATSPGAKDMPLSSDGNPKVNEKTVGVIVSREAMTGRVEKPGGQDKGSQEDDPAATQRPPSNGGAKETSHASLPQPEPPGGGGSKGNKNGDNNSNHNGEGNGQSGHSAAGPGFTSRTEPSKSPGSLRYSYKDSFGSAVPRNVSGFPQYPTGQEKGDFTGHGERKGRNEKFPSLLQEVLQGYHHHPDRRYSRSTQEHQGMAGSLEGTTRPNVLVSQTNELASRGLLNKSIGSLLENPHWGPWERKSSSTAPEMKQINLTDYPIPRKFEIEPQSSAHEPGGSLSERRSVICDISPLRQIVRDPGAHSLGHMSADTRIGRNDRLNPTLSQSVILPGGLVSMETKLKSQSGQIKEEDFEQSKSQASFNNKKSGDHCHPPSIKHESYRGNASPGAATHDSLSDYGPQDSRPTPMRRVPGRVGGREGMRGRSPSQYHDFAEKLKMSPGRSRGPGGDPHHMNPHMTFSERANRSSLHTPFSPNSETLASAYHANTRAHAYGDPNAGLNSQLHYKRQMYQQQPEEYKDWSSGSAQGVIAAAQHRQEGPRKSPRQQQFLDRVRSPLKNDKDGMMYGPPVGTYHDPSAQEAGRCLMSSDGLPNKGMELKHGSQKLQESCWDLSRQTSPAKSSGPPGMSSQKRYGPPHETDGHGLAEATQSSKPGSVMLRLPGQEDHSSQNPLIMRRRVRSFISPIPSKRQSQDVKNSSTEDKGRLLHSSKEGADKAFNSYAHLSHSQDIKSIPKRDSSKDLPSPDSRNCPAVTLTSPAKTKILPPRKGRGLKLEAIVQKITSPNIRRSASSNSAEAGGDTVTLDDILSLKSGPPEGGSVAVQDADIEKRKGEVASDLVSPANQELHVEKPLPRSSEEWRGSVDDKVKTETHAETVTAGKEPPGAMTSTTSQKPGSNQGRPDGSLGGTAPLIFPDSKNVPPVGILAPEANPKAEEKENDTVTISPKQEGFPPKGYFPSGKKKGRPIGSVNKQKKQQQPPPPPPQPPQIPEGSADGEPKPKKQRQRRERRKPGAQPRKRKTKQAVPIVEPQEPEIKLKYATQPLDKTDAKNKSFYPYIHVVNKCELGAVCTIINAEEEEQTKLVRGRKGQRSLTPPPSSTESKALPASSFMLQGPVVTESSVMGHLVCCLCGKWASYRNMGDLFGPFYPQDYAATLPKNPPPKRATEMQSKVKVRHKSASNGSKTDTEEEEEQQQQQKEQRSLAAHPRFKRRHRSEDCGGGPRSLSRGLPCKKAATEGSSEKTVLDSKPSVPTTSEGGPELELQIPELPLDSNEFWVHEGCILWANGIYLVCGRLYGLQEALEIAREMKCSHCQEAGATLGCYNKGCSFRYHYPCAIDADCLLHEENFSVRCPKHKVRLWR

SEQ ID NO: 254999 - DNA, 5817 bp, Artificial Sequence
  derived and/or modified sequence
atgcagagcttcagagagcagagcagctaccacggcaaccagcagagctacccccaggaggtgcacggcagcagcagactggaggagttcagccccagacaggcccagatgttccagaacttcggcggcaccggcggcagcagcggcagcagcggcagcggcagcggcggcggcagaagaggcgccgccgccgccgccgccgccatggccagcgagaccagcggccaccagggctaccagggcttcagaaaggaggccggcgacttctactacatggccggcaacaaggaccccgtgaccaccggcaccccccagcccccccagagaagacccagcggccccgtgcagagctacggccccccccagggcagcagcttcggcaaccagtacggcagcgagggccacgtgggccagttccaggcccagcacagcggcctgggcggcgtgagccactaccagcaggactacaccggccccttcagccccggcagcgcccagtaccagcagcaggccagcagccagcagcagcagcagcaggtgcagcagctgagacagcagctgtaccagagccaccagcccctgccccaggccaccggccagcccgccagcagcagcagccacctgcagcccatgcagagacccagcaccctgcccagcagcgccgccggctaccagctgagagtgggccagttcggccagcactaccagagcagcgccagcagcagcagcagcagcagcttccccagcccccagagattcagccagagcggccagagctacgacggcagctacaacgtgaacgccggcagccagtacgagggccacaacgtgggcagcaacgcccaggcctacggcacccagagcaactacagctaccagccccagagcatgaagaacttcgagcaggccaagatcccccagggcacccagcagggccagcagcagcagcagccccagcagcagcagcaccccagccagcacgtgatgcagtacaccaacgccgccaccaagctgcccctgcagagccaggtgggccagtacaaccagcccgaggtgcccgtgagaagccccatgcagttccaccagaacttcagccccatcagcaaccccagccccgccgccagcgtggtgcagagccccagctgcagcagcacccccagccccctgatgcagaccggcgagaacctgcagtgcggccagggcagcgtgcccatgggcagcagaaacagaatcctgcagctgatgccccagctgagccccacccccagcatgatgcccagccccaacagccacgccgccggcttcaagggcttcggcctggagggcgtgcccgagaagagactgaccgaccccggcctgagcagcctgagcgccctgagcacccaggtggccaacctgcccaacaccgtgcagcacatgctgctgagcgacgccctgaccccccagaagaagaccagcaagagacccagcagcagcaagaaggccgacagctgcaccaacagcgagggcagcagccagcccgaggagcagctgaagagccccatggccgagagcctggacggcggctgcagcagcagcagcgaggaccagggcgagagagtgagacagctgagcggccagagcaccagcagcgacaccacctacaagggcggcgccagcgagaaggccggcagcagccccgcccagggcgcccagaacgagccccccagactgaacgccagccccgccgccagagaggaggccaccagccccggcgccaaggacatgcccctgagcagcgacggcaaccccaaggtgaacgagaagaccgtgggcgtgatcgtgagcagagaggccatgaccggcagagtggagaagcccggcggccaggacaagggcagccaggaggacgaccccgccgccacccagagaccccccagcaacggcggcgccaaggagaccagccacgccagcctgccccagcccgagccccccggcggcggcggcagcaagggcaacaagaacggcgacaacaacagcaaccacaacggcgagggcaacggccagagcggccacagcgccgccggccccggcttcaccagcagaaccgagcccagcaagagccccggcagcctgagatacagctacaaggacagcttcggcagcgccgtgcccagaaacgtgagcggcttcccccagtaccccaccggccaggagaagggcgacttcaccggccacggcgagagaaagggcagaaacgagaagttccccagcctgctgcaggaggtgctgcagggctaccaccaccaccccgacagaagatacagcagaagcacccaggagcaccagggcatggccggcagcctggagggcaccaccagacccaacgtgctggtgagccagaccaacgagctggccagcagaggcctgctgaacaagagcatcggcagcctgctggagaacccccactggggcccctgggagagaaagagcagcagcaccgcccccgagatgaagcagatcaacctgaccgactaccccatccccagaaagttcgagatcgagccccagagcagcgcccacgagcccggcggcagcctgagcgagagaagaagcgtgatctgcgacatcagccccctgagacagatcgtgagagaccccggcgcccacagcctgggccacatgagcgccgacaccagaatcggcagaaacgacagactgaaccccaccctgagccagagcgtgatcctgcccggcggcctggtgagcatggagaccaagctgaagagccagagcggccagatcaaggaggaggacttcgagcagagcaagagccaggccagcttcaacaacaagaagagcggcgaccactgccacccccccagcatcaagcacgagagctacagaggcaacgccagccccggcgccgccacccacgacagcctgagcgactacggcccccaggacagcagacccacccccatgagaagagtgcccggcagagtgggcggcagagagggcatgagaggcagaagccccagccagtaccacgacttcgccgagaagctgaagatgagccccggcagaagcagaggccccggcggcgacccccaccacatgaacccccacatgaccttcagcgagagagccaacagaagcagcctgcacacccccttcagccccaacagcgagaccctggccagcgcctaccacgccaacaccagagcccacgcctacggcgaccccaacgccggcctgaacagccagctgcactacaagagacagatgtaccagcagcagcccgaggagtacaaggactggagcagcggcagcgcccagggcgtgatcgccgccgcccagcacagacaggagggccccagaaagagccccagacagcagcagttcctggacagagtgagaagccccctgaagaacgacaaggacggcatgatgtacggcccccccgtgggcacctaccacgaccccagcgcccaggaggccggcagatgcctgatgagcagcgacggcctgcccaacaagggcatggagctgaagcacggcagccagaagctgcaggagagctgctgggacctgagcagacagaccagccccgccaagagcagcggcccccccggcatgagcagccagaagagatacggccccccccacgagaccgacggccacggcctggccgaggccacccagagcagcaagcccggcagcgtgatgctgagactgcccggccaggaggaccacagcagccagaaccccctgatcatgagaagaagagtgagaagcttcatcagccccatccccagcaagagacagagccaggacgtgaagaacagcagcaccgaggacaagggcagactgctgcacagcagcaaggagggcgccgacaaggccttcaacagctacgcccacctgagccacagccaggacatcaagagcatccccaagagagacagcagcaaggacctgcccagccccgacagcagaaactgccccgccgtgaccctgaccagccccgccaagaccaagatcctgccccccagaaagggcagaggcctgaagctggaggccatcgtgcagaagatcaccagccccaacatcagaagaagcgccagcagcaacagcgccgaggccggcggcgacaccgtgaccctggacgacatcctgagcctgaagagcggcccccccgagggcggcagcgtggccgtgcaggacgccgacatcgagaagagaaagggcgaggtggccagcgacctggtgagccccgccaaccaggagctgcacgtggagaagcccctgcccagaagcagcgaggagtggagaggcagcgtggacgacaaggtgaagaccgagacccacgccgagaccgtgaccgccggcaaggagccccccggcgccatgaccagcaccaccagccagaagcccggcagcaaccagggcagacccgacggcagcctgggcggcaccgcccccctgatcttccccgacagcaagaacgtgccccccgtgggcatcctggcccccgaggccaaccccaaggccgaggagaaggagaacgacaccgtgaccatcagccccaagcaggagggcttcccccccaagggctacttccccagcggcaagaagaagggcagacccatcggcagcgtgaacaagcagaagaagcagcagcagcccccccccccccccccccagcccccccagatccccgagggcagcgccgacggcgagcccaagcccaagaagcagagacagagaagagagagaagaaagcccggcgcccagcccagaaagagaaagaccaagcaggccgtgcccatcgtggagccccaggagcccgagatcaagctgaagtacgccacccagcccctggacaagaccgacgccaagaacaagagcttctacccctacatccacgtggtgaacaagtgcgagctgggcgccgtgtgcaccatcatcaacgccgaggaggaggagcagaccaagctggtgagaggcagaaagggccagagaagcctgacccccccccccagcagcaccgagagcaaggccctgcccgccagcagcttcatgctgcagggccccgtggtgaccgagagcagcgtgatgggccacctggtgtgctgcctgtgcggcaagtgggccagctacagaaacatgggcgacctgttcggccccttctacccccaggactacgccgccaccctgcccaagaaccccccccccaagagagccaccgagatgcagagcaaggtgaaggtgagacacaagagcgccagcaacggcagcaagaccgacaccgaggaggaggaggagcagcagcagcagcagaaggagcagagaagcctggccgcccaccccagattcaagagaagacacagaagcgaggactgcggcggcggccccagaagcctgagcagaggcctgccctgcaagaaggccgccaccgagggcagcagcgagaagaccgtgctggacagcaagcccagcgtgcccaccaccagcgagggcggccccgagctggagctgcagatccccgagctgcccctggacagcaacgagttctgggtgcacgagggctgcatcctgtgggccaacggcatctacctggtgtgcggcagactgtacggcctgcaggaggccctggagatcgccagagagatgaagtgcagccactgccaggaggccggcgccaccctgggctgctacaacaagggctgcagcttcagataccactacccctgcgccatcgacgccgactgcctgctgcacgaggagaacttcagcgtgagatgccccaagcacaaggtgagactgtggagatag

SEQ ID NO: 255000 - DNA, 5817 bp, Artificial Sequence
  derived and/or modified sequence
atgcagagctttagagaacagtcttcttaccacggaaaccagcagtcatatccccaagaggttcacggttccagtcggcttgaggaattctccccacgccaggcccagatgttccagaatttcggagggactggcggaagctccgggtcttctggctccggttccggcggaggaaggagaggtgccgcggccgctgctgctgccatggcttccgaaacgtcgggccatcaggggtaccaggggtttaggaaggaggctggggacttctattatatggccggaaacaaagaccccgtgaccaccggaactccccagccacctcagcgccgaccgagcggaccagtgcagtcctacggccccccccagggctcatcattcgggaatcagtatgggtcggaaggacacgttggtcagtttcaggcacagcactcaggactgggtggtgtgagtcactatcagcaggattacacggggcccttcagtccaggaagcgcacaataccaacagcaagcctcaagtcagcagcagcagcagcaagtgcagcagctccgacaacagctttaccagtctcaccagcccttgccccaggccacgggtcaacccgcaagcagctcaagtcacctccagcctatgcaaagaccaagtaccttgccttcgtctgcagctggctatcagctaagagttgggcagtttggtcagcactaccagtcctccgcgagtagctctagcagctccagtttcccttccccgcaacgattttcccagtcaggacagtcctacgacgggtcctataatgtgaacgcaggtagccagtatgaagggcacaatgtggggtctaacgcccaggcttacggcactcaaagcaattattcctatcagcctcagtctatgaaaaactttgagcaagctaaaattccccagggcacccagcaggggcagcagcagcagcagcctcagcaacagcagcacccatcacaacacgtaatgcagtacaccaacgccgccacaaaactccccttacaaagccaggttggacagtataatcagcctgaggtaccagtgaggtcaccaatgcaatttcatcaaaatttctcccccatctccaacccttccccggctgcttcagttgtacagtcaccttcttgctcatcaaccccatcccctctgatgcagaccggcgaaaatcttcagtgtgggcagggaagtgtccccatgggatccaggaacaggatcctgcagctgatgccacaattgtcccccacgccctccatgatgccttcaccaaatagtcatgcagcgggctttaaaggctttggactcgagggcgtaccagagaagagactaacagatcctgggttgagctcactcagcgccttaagtacccaggtagccaaccttcctaacactgtacagcacatgttactgagcgatgctctgacaccccagaaaaagacttcgaaacggccctctagctcaaaaaaggccgatagttgtacgaattctgagggcagttcacagcctgaggagcagctgaagtcccccatggccgaaagcttggatggaggatgctccagctcctcagaagaccagggtgagcgggtgagacaattgtcaggacaaagtacttccagcgataccacttataagggcggtgcgtccgaaaaggcaggctcaagtcctgcgcagggagctcaaaatgagccgcctaggctgaatgcaagccccgctgccagagaagaggccacttccccaggtgccaaagatatgcccttatcgtctgatgggaaccccaaggttaatgaaaaaacagtgggcgttatagtaagccgggaggctatgactggacgcgtggaaaagcctggcgggcaggataagggcagccaggaagacgaccccgcagcaacacagcgtccaccaagcaacggaggcgcaaaagagactagtcacgcgtccctgcctcaaccagagcccccgggcggcggaggatcaaaaggaaataagaacggtgacaacaattcgaatcacaatggcgaaggcaatggccagagtggccattctgctgctgggcctggatttacctcccggacggagccatcaaaatccccgggctccttgcgctattcgtataaagacagctttggtagtgctgtgcctcggaacgtctcaggtttccctcagtatcctacaggtcaggaaaaaggagatttcactgggcacggggagcggaaaggaagaaacgagaagttcccatctctgcttcaggaagtgctgcaggggtaccatcaccaccctgaccgccgctactcgcggagcacccaagaacatcagggtatggcaggcagcctggaaggcacaacgcgcccaaacgttctcgtatcacagacaaacgaacttgcctcccggggcctgctgaacaagtccattgggtcccttctggaaaacccacattggggtccctgggagagaaagtcgagcagcaccgctccagagatgaaacagatcaacctgacagattacccaattccaagaaagttcgagattgaacctcaaagctctgcccatgagccaggcgggtcactgtccgaaaggagaagcgtgatctgcgacatctctcccttgaggcagatagtgcgcgatcccggcgcccattctttgggacatatgagcgcggacacgcgaattggcagaaacgaccggctgaaccctactctgagccagtctgtgatactgccgggagggctggtttcaatggagactaaactaaaatcccagagcgggcagataaaggaggaggacttcgagcaaagtaaatctcaggcaagctttaataacaagaagagcggcgaccactgccaccctcctagcatcaaacacgaatcataccgtggcaacgcatccccaggtgccgcgacccatgactccttgtctgactatggaccacaggattcgagacccacacctatgcggagagtgcccgggcgcgtcgggggtagagaaggaatgcgcgggcgttcgccctcacagtaccacgattttgcagagaaactcaagatgtccccaggaaggtctcggggtcctgggggcgatccccaccatatgaacccccatatgacttttagcgaacgtgcaaataggtcgtcactgcacacccccttctcacctaacagcgaaactctggcctcagcataccacgccaacacacgtgctcatgcctacggtgatccaaacgcagggcttaatagccaacttcactataaacggcagatgtaccagcaacagcctgaagaatacaaggattggtcgtcaggtagcgcccagggagttatagccgcagcccagcaccggcaggagggccccaggaagagccccaggcaacagcagttccttgacagagtacgctctcccctcaagaacgataaggacggaatgatgtacggcccccccgtgggtacttatcatgacccaagcgcccaggaggcgggtcgatgcttgatgtcctccgatggcctgccgaataagggtatggagctgaagcacggctcccagaaattgcaagagagttgttgggacctgtctagacagacatctcccgctaaatcatcaggcccccctggaatgtcaagccaaaagcggtatggacccccccatgagactgatgggcatggccttgctgaggccacacagtcaagcaaaccaggctctgtgatgctccgactgcccgggcaggaggaccactcaagccagaaccccctgattatgcgcagacgggtgcgcagttttatcagccccatcccgtcgaaaagacaaagtcaagatgtaaaaaactccagcactgaagataaaggcagattgcttcatagttccaaagaaggtgccgacaaagccttcaacagttacgcccatctgtcacactcacaggatatcaagagtatccctaaaagagactcttcaaaggacctcccgagccccgattcccgcaattgtccggccgtaacactgacatcccctgccaagacaaagattttaccgcctaggaaagggagaggactgaaactggaggcgattgtccagaagatcacctcccccaatatccgtcgttctgcgagctccaatagcgccgaggctggcggagacactgtgacacttgacgacattttgagtctcaaatccgggcctccagagggtgggagcgttgcagttcaggacgcagacattgagaagcgaaagggtgaggtggctagtgatcttgtctcacctgctaaccaggaacttcatgtggagaagcccttgccccggtcatcagaggaatggcgagggtccgttgacgataaagtcaagacagagacacacgccgaaactgtcaccgccggcaaggaacccccaggcgctatgacgtccaccacctcccaaaagcctgggagcaatcagggtagaccagacggaagtttgggcggaactgctcccctgatatttccagacagtaaaaacgtcccgccagtggggatcctggctcctgaagcgaacccaaaagccgaggaaaaagagaacgacacagttaccatcagtcccaagcaagagggctttcctccaaagggctattttccttctggtaaaaagaagggaagacccataggaagcgtgaacaaacagaagaagcaacagcagccacccccccccccacctcagccacctcaaatccccgagggctccgccgacggagagccaaagccgaaaaagcagcgacagcgacgcgaacggcggaaaccaggcgcccagccacggaaaaggaaaaccaaacaggccgtgccaattgtcgaaccccaggagccggaaatcaaactgaaatatgcaacgcagccccttgataaaacagatgccaagaacaagagcttttacccatacatccacgtggtgaacaaatgtgaactgggggctgtctgcaccatcattaatgcggaggaagaagagcagacaaagctggtgcgcgggaggaagggccagcgttccttgacccccccccccagctcaacagagtccaaggccttgcctgccagtagctttatgctacagggtccagtggtcacggagtcatccgtcatggggcatcttgtttgttgcttgtgtggtaagtgggccagttataggaatatgggtgacctgtttggtcctttctatccccaggattacgcggccacactgcccaagaatcctcctccgaagcgcgccactgaaatgcagtccaaagtcaaagtacgtcacaagtcagcctctaatggcagcaagacagatacagaggaagaagaggagcagcagcaacagcaaaaggagcagagaagtctggccgctcacccacgatttaaacggcggcatcgatccgaggactgcgggggcgggcctagatcattgtcacgtggtttaccttgtaagaaagcagctacggagggctcatccgagaaaaccgttttggactccaagcccagcgtccccaccaccagtgagggagggccagaattggagttacagattcccgaactgcccctcgattccaatgaattctgggtccacgaaggctgtatactctgggccaacgggatatatctggtctgcgggagattgtatggccttcaggaggccctggagatagccagggagatgaaatgctctcactgccaggaagctggagctacactgggatgttacaacaaaggatgctcctttagatatcattatccatgcgcaatagatgctgactgtcttctgcatgaagaaaattttagtgtccggtgccctaagcacaaggtgaggctttggaggtag

SEQ ID NO: 255001 - DNA, 5817 bp, Artificial Sequence
  derived and/or modified sequence
atgcagagcttccgggagcagagcagctaccacggcaaccagcagagctacccccaggaggtgcacggcagcagccggctggaggagttcagcccccggcaggcccagatgttccagaactttggaggcaccggcggcagcagcggcagcagcggcagcggcagcggcggcggcagaagaggagctgctgctgctgctgctgccatggccagcgagaccagcggccaccagggctaccagggcttcaggaaggaggccggggacttctactacatggccggcaacaaggaccctgtgaccaccggcaccccccagcccccccagaggcggcccagcggccctgtgcagagctatggccccccccagggcagcagctttggaaaccagtatggcagcgagggccacgtgggccagttccaggcccagcacagcggcctgggcggcgtgagccactaccagcaggactacacaggccccttcagccctggcagcgcccagtaccagcagcaggccagcagccagcagcagcagcagcaggtgcagcagctgcggcagcagctgtaccagagccaccagcccctgccccaggccaccggccagcctgccagcagcagcagccacctgcagcccatgcagaggcccagcaccctgcccagcagcgctgctggctaccagctgcgggtgggccagtttggccagcactaccagagcagcgccagcagcagcagcagcagcagcttccccagcccccagcgcttcagccagagcggccagagctatgatggcagctacaacgtgaatgccggcagccagtatgagggccacaacgtgggcagcaatgcccaggcctacggcacccagagcaactacagctaccagccccagagcatgaagaactttgagcaggccaagatcccccagggcacccagcagggccagcagcagcagcagccccagcagcagcagcaccccagccagcacgtgatgcagtacaccaatgctgccaccaagctgcccctgcagagccaggtgggccagtacaaccagcctgaggtgcctgtgcgcagccccatgcagttccaccagaacttcagccccatcagcaaccccagccctgctgcctctgtggtgcagagccccagctgcagcagcacccccagccccctgatgcagacaggagagaacctgcagtgtggccagggctctgtgcccatgggcagcaggaaccgcatcctgcagctgatgccccagctgagccccacccccagcatgatgcccagccccaacagccacgccgccggcttcaagggcttcggcctggagggcgtgcctgagaagaggctgacagatcctggcctgagcagcctgagcgccctgagcacccaggtggccaacctgcccaacacagtgcagcacatgctgctgagtgatgccctgaccccccagaagaagaccagcaagaggcccagcagcagcaagaaggctgacagctgcaccaacagcgagggcagcagccagcctgaggagcagctgaagagccccatggccgagagcctggatggcggctgcagcagcagcagcgaggaccagggcgagcgggtgcggcagctgagcggccagagcaccagcagtgacaccacctacaagggcggggccagcgagaaggccggcagcagccctgcccagggcgcccagaatgagcccccccggctgaatgccagccctgctgcccgggaggaggccaccagccctggggccaaggacatgcccctgagcagtgatggcaaccccaaggtgaatgagaagacagtgggcgtgattgtgtcccgggaggccatgacaggccgggtggagaagccaggcggccaggacaagggcagccaggaggatgatcctgctgccacccagaggcctcccagcaatggaggagccaaggagaccagccacgccagcctgccccagcctgagcccccaggcggcggcggcagcaagggcaacaagaatggagacaacaacagcaaccacaacggggagggcaatggccagagcggccacagcgctgctggccctggcttcaccagcaggacagagcccagcaagagccctggcagcctgcgctacagctacaaggacagctttggatctgctgtgcccagaaatgtgtctggcttcccccagtaccccaccggccaggagaagggggacttcaccggccatggagagaggaaaggaagaaatgagaagttccccagcctgctgcaggaggtgctgcagggctaccaccaccacccagaccggcgctacagccgcagcacccaggagcaccagggcatggccggcagcctggagggcaccacccggcccaacgtgctggtgtcccagaccaatgagctggccagccggggcctgctgaacaagagcatcggcagcctgctggagaacccccactggggcccctgggagaggaagagcagcagcacagcccctgagatgaagcagatcaacctgacagactaccccatccccaggaagtttgaaattgagccccagagcagcgcccacgagcccggcggcagcctgtctgaaagaagaagtgtcatctgtgacatcagccccctgcggcagatcgtgcgggaccccggggcccacagcctgggccacatgtctgctgacacccgcatcggcagaaatgaccggctgaaccccaccctgagccagagcgtcatcctgcccggcggcctggtgtccatggagaccaagctgaagagccagagcggccagatcaaggaggaggactttgagcagagcaagagccaggccagcttcaacaacaagaagagcggggaccactgccaccccccatccatcaagcatgagagctacagaggaaatgccagccctggagctgccacccatgacagcctgagtgactatggcccccaggacagccggcccacccccatgagaagagtgcccggccgggtgggcggccgggagggcatgaggggccgcagccccagccagtaccatgactttgctgagaagctgaagatgagccctggccgcagccggggccctggaggagacccccaccacatgaacccccacatgaccttcagcgagcgggccaacagaagcagcctgcacacccccttcagccccaacagcgagaccctggccagcgcctaccacgccaacacccgggcccacgcctacggggaccccaatgccggcctgaacagccagctgcactacaagaggcagatgtaccagcagcagcctgaggagtacaaggactggagcagcggcagcgcccagggcgtgattgctgctgcccagcaccggcaggagggccccaggaagagcccccggcagcagcagttcctggacagagtgcgcagccccctgaagaatgacaaggatggcatgatgtatggcccccctgtgggcacctaccatgaccccagcgcccaggaggccggccgctgcctgatgagcagtgatggcctgcccaacaagggcatggagctgaagcacggcagccagaagctgcaggagagctgctgggacctgagccggcagaccagccctgccaagagcagcggccccccaggcatgagcagccagaagagatatggcccccctcatgaaacagatggccacggcctggccgaggccacccagagcagcaagccaggctctgtgatgctgcggctgcccggccaggaggaccacagcagccagaaccccctcatcatgagaagaagagtgcgctccttcatcagccccatccccagcaagaggcagagccaggatgtgaagaacagcagcacagaagataaaggccgcctgctgcacagcagcaaggagggcgctgacaaggccttcaacagctatgcccacctgagccacagccaggacatcaagagcatccccaagagggacagcagcaaggacctgcccagcccagacagcaggaactgcccagctgtgaccctgaccagccctgccaagaccaagatcctgccccccaggaagggccggggcctgaagctggaggccatcgtgcagaagatcaccagccccaacatcagaagaagtgccagcagcaacagcgctgaggccggcggggacacagtgaccctggatgacatcctgagcctgaagagcggccccccagagggcggctctgtggccgtgcaggatgctgacatcgagaagaggaaaggagaggtggccagtgacctggtgtccccagccaaccaggagctgcacgtggagaagcccctgcccaggagcagcgaggagtggaggggctctgtggatgacaaggtgaagacagagacccatgctgagaccgtgacagctgggaaggagcccccaggggccatgaccagcaccaccagccagaagccaggcagcaaccagggccgcccagatggcagcctgggcggcacagcccccctcatcttcccagacagcaagaatgtgccccctgtgggcatcctggcccctgaggccaaccccaaggccgaggagaaggaaaatgacacagtgaccatcagccccaagcaggagggcttcccccccaagggctacttccccagcggcaagaagaagggccggcccatcggctctgtgaacaagcagaagaagcagcagcagcccccacctcctccaccccagcccccccagatccctgagggcagcgcagatggagagcccaagcccaagaagcagaggcagaggcgggagaggaggaagccaggggcccagcccaggaagaggaagaccaagcaggccgtgcccatcgtggagccccaggagcctgagatcaagctgaagtatgccacccagcccctggacaagacagatgccaagaacaagagcttctacccctacatccacgtggtgaacaagtgtgagctgggcgctgtgtgcaccatcatcaatgctgaggaggaggagcagaccaagctggtgcggggcaggaagggccagaggagcctgaccccaccacccagcagcacagagagcaaggccctgcctgccagcagcttcatgctgcagggccctgtggtgacagagagctctgtgatgggccacctggtgtgctgcctgtgtgggaagtgggccagctacagaaacatgggagacctgtttggccccttctacccccaggactatgctgccaccctgcccaagaaccccccacccaagagggccacagagatgcagagcaaggtgaaggtgcgccacaagagcgccagcaatggcagcaagacagacacagaggaggaggaggagcagcagcagcagcagaaggagcagaggagcctggccgcccacccccgcttcaagaggaggcacagaagtgaggactgtggcggcggccccaggagcctgagccggggcctgccctgcaagaaggccgccacagagggcagcagcgagaagacagtgctggacagcaagcccagcgtgcccaccaccagcgagggcggccctgagctggagctgcagatccctgagctgcccctggacagcaatgagttctgggtgcatgagggctgcatcctgtgggccaacggcatctacctggtgtgtggccgcctgtatggcctgcaggaggccctggagatcgcccgggagatgaagtgcagccactgccaggaggccggggccaccctgggctgctacaacaagggctgcagcttccgctaccactacccctgtgccattgatgctgactgcctgctgcacgaggagaacttctctgtgcgctgccccaagcacaaggtgcggctgtggaggtag

SEQ ID NO: 255002 - DNA, 5817 bp, Artificial Sequence
  derived and/or modified sequence
atgcagagcttccgggagcagagcagctaccacggcaaccagcagtcttacccccaggaggtgcacggctccagccgcctggaggaattcagtcctaggcaggctcagatgttccagaattttggaggtactggaggatctagtgggagtagcggctccggttccggtggtggaagacggggcgcagctgccgcagccgctgcgatggcttccgagacttcggggcaccagggctaccagggctttagaaaggaggctggcgatttctactacatggccggcaacaaagacccagtgaccactggtacgccacagcctccacagaggcgcccatccggtccggttcagtcttatggacccccccagggcagtagcttcggaaatcaatacggttccgaagggcacgtgggccagtttcaagcacagcattccggtctggggggggtctcccactaccagcaggactataccggcccattctctcctggatctgcccagtaccagcagcaggcctcatctcagcagcaacaacagcaggtccaacagctgcgacagcaactataccagagccaccagcccctgccacaggcaacagggcaaccagcatccagtagcagccatctgcagcccatgcaaagacctagtactctcccaagtagcgcagccggctaccagcttagagtgggacaattcgggcagcattaccagtcctccgcgtctagtagtagtagctccagtttccctagcccccagcgattctcccagagcgggcagtcctatgacgggagctataatgtgaatgctggatcccaatacgaaggtcacaatgtgggatcaaatgcccaggcatatggaacacaatcaaactattcctaccaaccccagtcgatgaagaacttcgaacaagcaaaaatcccacagggaacacagcagggacagcagcagcagcagccacagcagcagcaacatccctcccaacacgttatgcaatacaccaatgccgcaacgaaactgcccctgcagtcccaggtcgggcaatacaaccagcctgaagtgccagtccgctctccaatgcagttccaccaaaatttttctcctatttcaaacccctccccagccgcttccgtggtgcagtctcctagttgcagctctactccaagtcctcttatgcagacaggagagaatctccagtgcggccaaggctccgtgcccatgggatcccgaaaccgtattctgcagctgatgccccagctgtcacctacaccttctatgatgccctctcccaactctcacgccgcaggtttcaaggggttcggactggaaggtgtgcccgaaaagcgcttaactgatcccggcctttcctcactgagcgccctgtcaacccaagtggccaatcttccgaacactgttcagcacatgctgctgagcgatgcgctgacaccgcagaagaaaacaagtaaacgaccctccagtagcaaaaaggcagatagctgtactaactcagagggcagcagccaacctgaagaacaactcaagtctccaatggcggagtctctggacggaggctgctctagcagcagtgaggatcagggagaacgggtcagacagctgtcaggtcagtccacttcaagcgatactacttacaagggtggggccagcgaaaaagcaggctcatcccccgctcaaggagctcagaacgaacctccccgactcaacgcatcgcccgccgcccgcgaggaggccacgtcacctggagctaaagacatgccactgtctagcgacggaaaccctaaggttaatgagaagacagttggagtgattgtctcccgggaggcaatgaccggccgggtcgagaaacccggaggacaagataaaggcagccaggaagacgatcccgccgctacccagcgcccaccatccaatggaggcgctaaggagacctcccacgcatccctgcctcaacctgagcctccaggcggcggaggatccaaaggtaataaaaacggggacaacaactcaaaccacaatggagagggcaacgggcagtctgggcattctgccgctggacctgggtttactagtaggaccgagccgtcgaaatcaccgggttccttgcgctactcttacaaagacagcttcggatcggcagttcctcggaacgtgagcggtttccctcaataccctacgggacaggaaaaaggcgacttcactggccatggcgaaagaaaaggtcgcaatgagaagtttcctagcctgctccaagaagtgcttcagggataccaccaccacccagataggagatactctcgttccactcaggagcatcagggtatggccggatcactggaagggactaccagacccaacgtgctggtgtcacagaccaacgagttggctagccgaggtctcctgaacaagagcatcggctccctccttgaaaaccctcactggggaccctgggaacggaaaagttcgtctaccgcccctgagatgaagcagattaatctaacggattatccaatcccacgcaagttcgagatcgagccacagagcagcgcccacgaacctggaggctcactctccgagagaaggtctgtgatatgtgatatctccccgttaagacagatcgtaagagaccctggtgcccacagcttgggccacatgagcgctgatacccggattggcaggaatgatcggctgaacccaacgttgagtcagagtgtgatcctgcctggggggctggtgagcatggagaccaagctgaaaagccaatccggtcagattaaggaagaagacttcgagcagagcaaaagtcaggccagctttaacaataaaaagtccggcgatcactgccaccccccgagcatcaaacatgagagctatcgcggtaacgcaagccctggagccgcgacccatgattctctcagcgactacggcccacaggattcaaggcctacaccgatgcgtcgcgttcctggccgcgtagggggcagagaggggatgagagggagatccccaagtcaataccatgacttcgccgagaaactcaaaatgagccccgggagatcccggggccctgggggcgacccacaccatatgaaccctcacatgaccttttcggagcgagccaatcgatcaagtctgcacaccccattttcgccaaactctgaaacactggccagtgcctaccatgcaaataccagggcccacgcatatggagaccccaacgctgggctgaactcacagctgcactacaagcgccagatgtaccagcagcagccagaggaatataaagattggtctagcgggtctgcgcagggcgtgattgctgctgcacagcatagacaggaaggaccgcgcaaatcacctcggcaacagcaattccttgacagggtgcgcagtccactcaaaaatgacaaggacggcatgatgtatggtccaccagtcggcacatatcacgacccttccgcccaagaagcaggccgttgcctcatgtctagcgacggcctgcccaataagggaatggaactgaaacacggaagtcagaagctgcaggagagttgttgggatctgagtcgccagactagccctgccaagtcctccggtcctcccggcatgagtagtcaaaagagatacgggcctccccacgagactgatggccatggcctggcagaggccacacagtccagcaagcccgggtcagtaatgctgcggctacctgggcaggaagatcacagttctcagaaccccctcatcatgagacgacgcgtgaggtcctttatttcccctattccaagcaagcggcagtcacaggacgtcaaaaactcaagtactgaggacaaaggtcgcctgctgcactcatctaaagaaggagccgataaggccttcaacagttacgcccacctgagtcatagccaggatattaagagtatccccaaaagagatagctctaaggatcttcccagtcccgattccaggaactgtccagctgtcaccctgacctcaccagcaaagaccaagattttgccccctcgaaagggaagggggttaaaactagaggcaatcgtccagaagataaccagtcctaatattcgcaggagtgcatcttccaattcagccgaagccgggggtgatacagtaactttggatgatatactcagcctgaaatctggccccccggaaggaggtagcgttgctgtgcaagatgccgatatagaaaaaagaaagggggaagtcgcctctgatctggtgtccccggctaatcaagagcttcacgtggagaagcctttgccaagaagtagtgaggaatggcgcggttctgtggacgataaggtaaagaccgagacacacgccgagaccgtcaccgccgggaaggagcccccaggcgccatgacctctaccacgtcacagaagcccggaagtaaccaaggaaggcccgacggcagtctgggcggaacagctcctctcattttcccagacagcaaaaacgtcccaccagtgggcatactggccccagaggcaaaccctaaagccgaggaaaaggagaatgacacagtgacgattagtcccaaacaggaagggtttccacctaaaggctattttccctcaggcaagaaaaagggcagaccaatcggatctgtcaataaacagaaaaagcagcagcagccgcccccaccgcctccccagccaccccaaatccccgaaggcagtgctgacggggagccaaagcccaaaaagcagaggcagaggcgggagcgaaggaagcccggggcccagccccgcaagcggaagactaaacaagcagtgcctatcgtggaaccccaagaacccgagatcaagctgaagtacgcaactcagcctctagacaagaccgacgcgaagaataagagcttctatccctacatccacgttgtgaataaatgtgagctgggtgccgtgtgtaccattataaatgctgaggaagaagaacagaccaaactcgtaaggggaagaaagggccagcgttccctgacaccgccaccttccagcaccgagtccaaagccctgcctgcaagctcatttatgctgcagggacctgtagtcacagaatcctctgtgatgggacatttagtgtgctgtttatgtgggaaatgggcatcatatcgcaacatgggcgacctctttggcccattctacccacaggactacgccgccacgttgcctaaaaatccccccccgaaaagggccaccgagatgcagtccaaggtcaaagtgcggcacaaatccgcgtcaaacggctcaaaaaccgacacagaagaggaggaagagcagcagcagcagcagaaggagcagagaagccttgcagcccatcctcgttttaagcgcagacatcggtctgaggattgtggaggcggtcccaggtcactgtccaggggattaccctgtaagaaagctgccacagagggaagtagcgagaagacggtgctagattctaagccaagcgtgccaacaacctctgagggaggccccgagctcgagctgcagatcccagagctcccgctggactccaacgaattctgggtccacgaggggtgtatattgtgggctaatgggatttacctcgtttgcggaaggttgtatggcttacaagaggctctcgaaatcgcccgggagatgaaatgctcccactgccaggaagcaggggcaactctcgggtgctataataaggggtgcagctttcgttatcattatccttgcgccattgatgctgactgcctattgcacgaagaaaatttctccgtgcgatgccccaaacacaaggtgcgcctctggcggtag

SEQ ID NO: 255003 - DNA, 5816 bp, Artificial Sequence
  derived and/or modified sequence
atgcagtcattccgtgagcagtcctcttatcatgggaatcaacagtcatatcctcaggaagtccatggaagcagccgactggaggagtttagccccaggcaggctcagatgttccagaattttggtggcacagggggatcttccggctccagcggtagtgggtctggcggaggaagaaggggcgcagcggcagccgcagccgcaatggcttcagagacaagcgggcatcagggataccaggggttccggaaggaagcaggagacttttactatatggcaggcaataaggatcctgttactactggtactcctcagccgcctcagagacgcccaagtggacccgttcagtcgtacgggcctccacaggggtcttcgttcggaaatcagtatggctctgaaggtcatgttggtcaatttcaggcgcagcattctggtctcgggggtgtgagccattaccagcaggattacacagggccattctcccccggatcggcacagtatcagcagcaagcttcttcgcagcagcagcagcagcaggttcagcagctgcgtcagcaattataccagagtcatcagcccctgcctcaggcgacaggtcagccggcatctagcagcagccacctacagcctatgcagagacccagcacactccccagtagcgccgctggctatcagctgagagtggggcagttcggtcaacactaccagtcgtctgctagctcgagctcctcatcctctttcccctccccacagaggttcagccagtccgggcagagctacgacggctcctataacgtaaatgcaggttcccaatacgagggtcacaatgtgggctcaaacgctcaggcttacggaacccagagcaattactcttaccagccgcagtctatgaaaaattttgaacaggctaaaattccgcaggggacgcagcaggggcaacaacagcagcagcctcaacagcagcaacacccctcccaacacgtgatgcagtacaccaacgcagctactaagcttcctctgcagtcacaggtcgggcaatataaccaaccagaagtgcccgtgcggtctccgatgcaatttcaccagaacttcagtcccattagcaaccctagccccgctgcatcagtggtgcaaagcccttcttgctcttcaacacctagccctctgatgcagactggcgagaacctgcagtgcgggcaaggcagtgtccccatgggttctcgcaatcggatcctgcaattaatgccgcagctctcgcctaccccaagtatgatgccgagccccaactcacatgccgctgggttcaagggcttcggactggaaggcgtacctgagaaaaggctgacggacccaggcctatccagcctttcagcactgagtacccaagtagctaatctgcctaacaccgtccaacacatgctactctcggacgcgttgaccccccagaaaaaaacttccaagagaccttcttccagcaaaaaggctgactcctgtactaatagcgagggctctagtcagccggaggagcaattgaagagccctatggctgaaagtctggatggaggctgctcttcctcttcagaagaccagggagagcgggtgaggcagttgtcagggcagtccacttcctccgacacaacctacaagggcggtgctagtgagaaagctggcagctctcctgcgcagggggctcagaacgagccccctagactgaacgctagccctgcagccagagaggaggctaccagccccggagctaaggacatgcctctcagcagcgatgggaatccaaaggtgaacgagaaaactgtgggtgttatcgtaagccgggaagccatgactggccgagtagaaaaacctggtggacaggataagggcagccaagaggatgatccagctgccacccaacgacctccttctaatggcggagccaaggagacctctcacgccagcctgccccagcctgagcctcccggaggcggaggcagtaaaggaaacaagaacggcgataacaactctaaccataacggagaaggcaatgggcagagtgggcactcggcggctggcccagggtttacgagtcgaacagagcccagcaaatccccagggagtctgcgctatagttataaagatagcttcgggtctgcagttcctaggaacgtctctgggttcccccagtatcccaccgggcaggaaaagggcgacttcacagggcacggcgagcggaaagggcgtaatgagaaatttccctccttgttgcaggaggtcttgcagggttatcaccaccatcctgaccgacgctatagtcggtcaacacaagagcaccagggcatggccggaagtctggagggcaccacccgcccaaatgtgctcgtctcacaaaccaatgaactggccagccgaggactcctgaataaatccatcggctccctgctggagaatccccactggggaccttgggaacggaagtcttcatccacagcacctgagatgaagcaaataaacttaactgactatcccatccctcgtaagttcgagattgagccccagagcagcgcgcacgaacctggcggtagcctttccgagagacgcagtgtgatttgtgatatttcccctctgcggcaaatagtgagggaccccggtgcacactcattagggcacatgtcagctgacacccggatcggtcggaacgatcggctaaatcctaccctttctcagtcggtaatccttcccggagggctggtttcaatggagaccaaactcaagtcccagtctggtcagattaaggaagaagacttcgagcaatcaaaaagccaagccagtttcaataataagaaatccggcgaccattgtcatccaccttccattaaacacgagagctaccggggaaacgcctcacccggtgcggctacccatgatagcttgtccgattacggtccccaggatagccggcctacccccatgcgccgtgtcccagggagagtcggcggacgggagggaatgaggggacggtccccctctcaataccatgactttgctgagaaattaaaaatgagtcctggcaggagccggggtcccggaggagacccccatcatatgaaccctcatatgaccttttccgagagggctaatcggtcgtcgctgcacacgcccttttccccaaatagcgaaacattggcatctgcataccacgcgaatacgagggctcacgcatacggcgaccctaatgccggattgaattcccaactgcactacaagagacagatgtatcagcaacagccagaagaatataaagactggtcatcaggttctgctcaaggtgtaatcgcagcagctcagcatcggcaggagggtccacggaaaagcccaagacaacaacagttccttgatagggtgcggagccccctgaaaaacgacaaagacggcatgatgtacgggccacctgtcggaacatatcatgatccaagtgctcaggaagcaggcagatgcctgatgagttcagatggcctgcccaataagggaatggagctaaaacatggatcacagaagctccaggagtcctgctgggatctatccagacaaacttcaccagcgaaatcatccggccctcccggtatgtcatcgcagaaacgctatggccctccccatgagaccgacggacatggacttgcagaagccacgcagtcctctaaacccggaagcgtgatgctgcgcctgcctggacaggaggaccactcctcgcagaaccccttaattatgaggaggagggttagatcttttatttcccccattccctcgaaacgacagagccaggatgtcaaaaactcaagcaccgaggataaaggccgtctcctgcacagctcgaaggaaggcgcagataaagccttcaattcatatgctcatcttagtcatagccaggatattaaatctatccccaagagagatagcagcaaagatctaccgtcccctgactctaggaactgtcctgccgtgacactgacttctcctgctaaaaccaagattctccccccacgaaaaggaaggggactgaaactggaggccatcgtgcagaagatcactagcccgaacattaggagatctgcttcatctaactctgctgaggctgggggtgacactgtgaccctggacgatatcttatcccttaagagcggcccaccagagggcggatctgtggctgtacaggacgccgacatcgaaaagcgcaagggcgaggtggcctccgatctggtgtctcctgcaaaccaagagctccacgtcgaaaagccgcttccacgcagctctgaagaatggcgcggttctgtcgatgataaggtcaaaaccgaaactcatgcggagacggtgacggcgggaaaagagcctcctggagcgatgactagcactacaagtcagaagcctggttcgaatcaggggcgaccagatggatctttggggggaactgcacctctgatttttcccgactccaaaaacgtgcctcccgtgggcatcctggcccctgaggccaacccgaaagcggaggaaaaagagaacgatacagtgactatatctcccaaacaggaaggcttcccgccaaagggctatttcccttctgggaaaaagaaaggcagaccaatcggctccgtgaacaagcagaaaaaacagcaacagccaccaccgcctcctccccaaccacctcagatcccagagggcagcgccgacggggaacccaaacccaaaaaacagcgacagcgtcgcgaacgcagaaaacccggagctcaacccaggaaacgcaagacaaagcaggcagtgccgatcgtagaaccacaggagcctgagatcaagctgaagtacgctactcagcccctggacaaaactgatgccaaaaacaaatcattctacccatatatccacgtcgtgaataaatgcgagcttggtgcagtttgcaccattattaacgctgaggaggaggagcaaacaaagctggttcgtgggcgtaagggacaacggagtctgacaccccctcctagtagcactgagtctaaggcgctgcctgcatcctcctttatgctgcaagggccagtcgtgacagagtcaagtgtcatgggccatctggtctgttgcctgtgtggtaagtgggcctcttacagaaatatgggagacctgtttggaccattctatccccaagattacgctgccacactgcccaaaaaccctccgccaaagcgggcaactgagatgcaatcaaaggtgaaggtcaggcataagagcgcaagcaatggttcaaagaccgataccgaggaggaagaggaacaacaacaacagcagaaagagcagagatctttggccgctcacccacggtttaaacggagacatcgctcagaggattgtggcggaggtcccaggtctcttagcaggggtctcccctgcaaaaaggctgcaaccgagggctcgagcgaaaagaccgtactggacagcaaaccaagcgtacccacaacaagcgaaggaggccctgagttagaactgcaaatacccgagctccccttggacagcaacgagttttgggtgcacgagggctgtatcctttgggccaatggcatttatctcgtgtgcggaaggctttatggcctgcaggaggctcttgaaatagcacgtgagatgaagtgtagccactgtcaggaagctggtgctaccttaggatgttacaacaaaggttgttctttccgctaccactacccgtgcgctatagacgccgactgtctcctgcacgaagaaaattttagtgttagatgcccaaagcacaaggtacgcttgtggcgcta

SEQ ID NO: 255004 - DNA, 6237 bp, Artificial Sequence
  derived and/or modified sequence
tgggcctctgattcatctttattccctccatcatctagacttgattttatttgtaccaaggagatgcgtgtctaatgtttttctttcttctatttctaggagggctgttggcctgctgctgtgctgctgaacagtatgcagtcctttcgggagcaaagcagttaccacggaaaccagcaaagctacccacaggaggtacacggctcatcccggctagaagagttcagccctcgtcaggcccagatgttccagaattttggaggtacaggtggcagtagtggcagcagtggcagtggcagtggtggtggacgacgaggagcagcagctgctgcggcagcgatggctagcgagacctctggccatcaaggttaccagggtttcaggaaagaggctggagatttttactacatggcaggcaacaaagaccccgtgactacaggaaccccacagcctcctcagcgaaggccttctgggcctgtgcagagctatggacccccccaggggagcagctttggcaatcagtatgggagtgagggtcatgtgggccagtttcaagcacagcactctggccttggcggtgtgtcacattatcagcaggattacactgggcctttctctccagggagtgctcagtaccaacagcaggcttccagccagcagcagcagcagcaagtccagcagttgagacaacagctttaccagtcccatcagcccctgccacaggccactggccaaccagcatccagctcatcccatctacagccaatgcagcggccctcaactctgccatcctctgctgctggttaccagttaagagtgggtcagtttggccaacactatcagtcttctgcttcctcctcctcctcctcctccttcccttcaccacagcgttttagccagtctggacagagctatgatggcagttacaatgtgaatgctggatctcagtatgaaggacacaatgtgggttctaatgcacaggcttatggaacacaatccaattacagctatcagcctcaatctatgaagaattttgaacaggcaaagattccacaagggacccaacaggggcagcagcagcagcaaccgcagcaacaacaacacccttctcagcatgtgatgcagtatactaacgctgccaccaagctgcccctgcaaagccaagtggggcagtacaaccagcctgaggttcctgtgaggtcccccatgcagtttcaccagaacttcagccccatttctaacccttctccagctgcctctgtggttcagtctccaagctgtagttctaccccatctcctctcatgcagactggggagaatctccagtgtgggcaaggcagtgtgcctatgggttccagaaacagaattttacagttaatgcctcaactcagtccaaccccatcaatgatgcccagtcctaattctcatgctgcaggcttcaaagggtttggactagaaggggtaccagaaaagcgactgacagatcctgggttgagtagtttgagtgctctgagtactcaagtggccaatcttcctaacactgtccagcacatgttactttctgatgccctgactcctcagaagaagacctccaagaggccctcatcttccaagaaagcagatagctgcacaaattctgaaggctcctcacaacctgaagaacagctgaagtcccctatggcagagtcattagatggaggctgctccagcagttcagaggatcaaggcgagagagtgcggcaactaagtggccagagcaccagctctgacaccacctacaagggtggagcctctgagaaagctggctcctcaccggcacaaggtgctcagaatgaaccccccagactcaatgctagtcctgccgcaagagaagaggccacctcaccaggcgctaaggacatgccattgtcatccgacgggaacccaaaggttaatgagaagactgttggggtgattgtctcccgggaagccatgacaggtcgggtagaaaagcctggtggacaagataaaggctcccaagaggatgatcctgcagccactcaaaggccacctagcaatggtggggcaaaggaaaccagtcatgcatcacttccccagccagagcctccaggaggaggagggagcaaaggaaacaagaatggcgataacaactccaaccataatggagaaggaaatggccagagtggccactctgcagcgggccctggttttacgagcagaactgagcctagcaaatctcctggaagtctgcgctatagttacaaagatagtttcgggtcagccgtgccacgaaatgtcagtggctttcctcagtatcctacagggcaagaaaagggagatttcactggccatggggaacgaaagggtagaaatgaaaaattcccaagcctcctgcaggaagtgcttcagggttaccaccaccaccctgacaggagatattctaggagtactcaagagcatcaggggatggctggtagcctagaaggaaccacaaggcccaatgtcttggttagtcaaaccaatgaattagctagcaggggccttctgaacaaaagcattgggtctctattagaaaatccccactggggcccctgggaaaggaaatcaagcagcacagctcctgaaatgaaacagatcaatttgactgactatccaattcccagaaagtttgaaatagagcctcagtcatcagcacatgagcctgggggttccctctctgaaagaagatcagtgatctgtgatatttctccactaagacagattgtcagggacccaggggctcactcactgggacacatgagtgccgacaccagaattgggaggaatgaccgtctcaatccaactttaagtcagtcggtcattcttcctggtggtttggtgtccatggaaaccaagctgaaatcccagagcgggcagataaaagaggaagactttgaacagtctaaatctcaagctagtttcaacaacaagaaatctggagaccactgccatcctcctagcatcaagcatgagtcttaccgcggcaatgccagccctggagcagcaacccatgattccctttcagactatggcccgcaagacagcagacccacgccaatgcggcgggtccctggcagagttggtggtcgggagggcatgaggggtcggtccccttctcaatatcatgactttgcagaaaaattgaaaatgtctcctgggcggagcagaggcccagggggagaccctcatcacatgaatccacacatgaccttttcagagagggctaaccggagttctttacacactcccttttctcccaactcagaaaccctggcctctgcttatcatgcaaatactcgggctcatgcttatggggaccctaacgcaggtttgaattctcagctgcattataagagacagatgtaccaacagcaaccagaggagtataaagactggagcagcggttctgctcagggagtaattgctgcagcacagcacaggcaggaggggccacggaagagtccaaggcagcagcagtttcttgacagagtacggagccctctgaaaaatgacaaagatggtatgatgtatggcccaccagtggggacttaccatgaccccagtgcccaggaggctgggcgctgcctaatgtctagtgatggtctgcctaacaagggcatggaattaaagcatggctcccagaagttacaagaatcctgttgggatctttctcggcaaacttctccagccaaaagcagcggtcctccaggaatgtccagtcaaaaaaggtatgggccgccccatgagactgatggacatggactagctgaggctacacagtcatccaaacctggtagtgttatgctgagacttccaggccaggaggatcattcttctcaaaaccccttaatcatgaggaggcgtgttcgttcttttatctctcccattcccagtaagagacagtcacaagatgtaaagaacagtagcactgaagataaaggtcgcctccttcactcatcaaaagaaggcgctgataaagcattcaattcctatgcccatctttctcacagtcaggatatcaagtctatccctaagagagattcctccaaggaccttccaagtccagatagtagaaactgccctgctgttaccctcacaagccctgctaagaccaaaatactgcccccacggaaaggacggggattgaaattggaagctatagttcagaagattacatccccaaatattaggaggagcgcatcttcgaacagtgcggaggctgggggagacacggttacgcttgatgatatactgtctttgaagagtggtcctcctgaaggtgggagtgttgctgttcaggatgctgacatagagaagagaaaaggtgaggtggcttcggacctagtcagtccagcaaaccaggagttgcacgtagagaaacctcttccaaggtcttcagaagagtggcgtggcagcgtggatgacaaagtgaagacagagacacatgcagaaacagttactgccggaaaggaaccccctggtgccatgacatccacaacctcacagaagcctggtagtaaccaagggagaccagatggttccctgggtggaacagcacctttaatctttccagactcaaagaatgtacctccagtgggcatattggcccctgaggcaaaccccaaggctgaagagaaggagaacgatacagtgacgatttcaccgaagcaagagggtttccctccaaagggatatttcccatcaggaaagaagaaggggagacccattggtagtgtgaataagcaaaagaaacagcagcagccaccgcctccaccccctcagcccccacagataccagaaggttctgcagatggagagccaaagccaaaaaaacagaggcaaaggagggagagaaggaagcctggggcccagccgaggaagcgaaaaaccaaacaagcagttcccattgtggaaccccaagaacctgagatcaaactaaaatatgccacccagccactggataaaactgatgccaagaacaagtctttttacccttacatccatgtagtaaataagtgtgaacttggagccgtttgtacaatcatcaatgctgaggaagaagaacagaccaaattagtgaggggcaggaagggtcagaggtcactgacccctccacctagcagcactgaaagcaaggcgctcccggcctcgtcctttatgctgcagggacctgttgtgacagagtcttcggttatggggcacctggtttgctgtctgtgtggcaagtgggccagttaccggaacatgggtgacctctttggacctttttatccccaagattatgcagccactctcccgaagaatccacctcctaagagggccacagaaatgcagagcaaagttaaggtacggcacaaaagtgcttctaatggctccaagacggacactgaggaggaggaagagcagcagcagcagcagaaggagcagagaagcctggccgcacaccccaggtttaagcggcgccaccgctcggaagactgtggtggaggccctcggtccctgtccagggggctcccttgtaaaaaagcagccactgagggcagcagtgaaaagactgttttggactcgaagccctccgtgcccaccacttcagaaggtggccctgagctggagttacaaatccctgaactacctcttgacagcaatgaattttgggtccatgagggttgtattctctgggccaatggaatctacctggtttgtggcaggctctatggcctgcaggaagcgctggaaatagccagagagatgaaatgttcccactgccaggaggcaggcgccaccttgggctgctacaacaaaggctgctccttccgataccattacccgtgtgccattgatgcagattgtttgctacatgaggagaacttctcggtgaggtgccctaagcacaaggtgagactgtggagatgagaaggtggtggacactcgtgatggaatggaaatcgtcctaccgtgcagccacaccctgccctgccccgccccgccccgcccgcgtgcctgcccatgccagcacttccttaagttctcacatcacactcaaaccagtgacaccacaggaaagaaagacccaagacgttggaatggctgtttccatggacacaatctccatagtgacaatgtggggggaggggggaggggtgggatgatggggaaagggtggggggaattaaaagggagggataaatatatatatat

SEQ ID NO: 255005 - protein, 177 aa, Artificial Sequence
  derived and/or modified sequence
MAASLVVQILGDKFPCTLVAQKIDLPEYQGEPDEISIQKCQEAVRQVQGPVLVEDTCLCFNALGGLPGPYIKWFLEKLKPEGLHQLLAGFEDKSAYALCTFALSTGDPSQPVRLFRGRTSGRIVAPRGCQDFGWDPCFQPDGYEQTYAEMPKAEKNAVSHRFRALLELQEYFGSLAA

SEQ ID NO: 255006 - DNA, 534 bp, Artificial Sequence
  derived and/or modified sequence
atggctgcttccctggttgtgcagatactgggagataagttcccctgtaccctggtggcccagaagatcgacctacccgaataccagggtgagcctgacgaaattagcatccagaagtgtcaagaagctgtcagacaggttcaagggccggtgctagttgaggacacctgcctgtgctttaatgctcttggagggctacccgggccatatatcaagtggttcctggagaagcttaaacccgagggtttgcaccagcttctggcgggattcgaagataagagcgcatatgctctttgcactttcgccctatccactggcgacccctcgcagccagtcagactgtttcgcggccggacaagtgggaggatcgtagctccgagggggtgtcaggacttcggctgggacccttgttttcagcctgacgggtatgagcagacctatgccgagatgcctaaagcagagaagaacgccgtttcgcaccgcttcagagcactgctcgagctccaagagtacttcgggtcactcgctgcatag

SEQ ID NO: 255007 - DNA, 1072 bp, Artificial Sequence
  derived and/or modified sequence
tacgcgccttggggtccgggtcggctttccccgggacccctggccggaaactgagccgttcacttccgccaccagccggaagttttctgtcactggacgccaaggagttttcggtggctcagctgggtaaccggggatcaccatggcggcctcattggtcgttcagattctaggagataagtttccatgcactttggtggcacagaaaattgacctgccggagtaccagggggagccggatgagatttccatacagaaatgtcaggaggcagttcgccaggtacaggggcccgtgctggttgaggacacttgtctgtgcttcaatgcccttggagggctccccggcccctacataaagtggtttctggagaagttaaagcctgaaggtctccaccagctcctggccgggttcgaggacaagtcagcctatgcgctctgcacgtttgcactcagcaccggggacccaagccagcccgtgcgcctgttcaggggccggacctcgggccggatcgtggcacccagaggctgccaggactttggctgggacccctgctttcagcctgatggatatgagcagacgtacgcagagatgcctaaggcggagaagaacgctgtctcccatcgcttccgggccctgctggagctgcaggagtactttggcagtttggcagcttgacttctgcagctggaggaggcccctcaggccggggatctggggagggctagcccaaaacctcccgcatcgggcaggcaccccctgaagtacttccttcagggtttcccctttgtgagggtgtcgagtagcctcaccggcctgtctggaggagcagctggctctgctctgagaaactctggcaagtggacgccattctcttgcccttaggattcactgctctctcctacagccgccaggcctggggtcctgaaaggaccttgggtggtaaagctgtacttggtgggagtgagggcgtggggaggaaccatgcaaatcgccttccatggtttttaaatgcagtaaataacatttctggatgagacttgtttccaaaataaaccagctatatctgttttg

SEQ ID NO: 255008 - DNA, 534 bp, Artificial Sequence
  derived and/or modified sequence
atggccgccagcctggtggtgcagatcctgggggacaagttcccctgcaccctggtggcccagaagattgacctgcctgagtaccagggcgagccagatgagatcagcatccagaagtgccaggaggccgtgcggcaggtgcagggccctgtgctggtggaggacacctgcctgtgcttcaatgccctgggcggcctgcccggcccctacatcaagtggttcctggagaagctgaagccagagggcctgcaccagctgctggccggctttgaggacaagagcgcctatgccctgtgcacctttgccctgagcactggagaccccagccagcctgtgcggctcttccggggccgcaccagcggcagaattgtggccccccggggctgccaggactttggctgggacccctgcttccagccagatggctatgagcagacctacgccgagatgcccaaggccgagaagaatgctgtgagccaccgcttccgggccctgctggagctgcaggagtacttcggcagcctggccgcctag

SEQ ID NO: 255009 - DNA, 534 bp, Artificial Sequence
  derived and/or modified sequence
atggccgccagcctggtggtgcagatcctgggcgacaagttcccctgtacccttgttgcccagaaaattgacctgcccgagtaccagggagaacccgacgaaattagcatccaaaagtgtcaggaagcggtcaggcaggtgcagggacctgttctcgtcgaagacacatgcctgtgcttcaatgctctcggaggactcccgggcccatacatcaaatggtttttggagaaacttaagcctgagggcctgcaccagttgcttgcaggatttgaggacaaatcggcctacgctctctgcacatttgccttgtccacaggcgatcctagtcaacccgtgagactcttcagaggtcgcacaagtggccgcatagtggccccacgcggatgccaagactttggttgggatccttgtttccagcctgacggctacgaacaaacatacgctgagatgccaaaggccgaaaagaatgcagtcagtcacagatttagagccctgctggagttgcaggaatactttggaagcttggccgcctag

SEQ ID NO: 255010 - DNA, 534 bp, Artificial Sequence
  derived and/or modified sequence
atggccgcttctttagtagtgcagatcctgggagataagttcccctgtactctagttgctcagaagatagatctccccgagtatcagggcgaaccagatgaaatctctatccaaaagtgccaagaggcagtgaggcaggtacaaggtccggtgctggtggaagatacctgcctgtgttttaacgcactgggaggccttcccggaccatatattaaatggttcctggaaaagctgaagccagagggactgcaccagctgctggccggattcgaagataagtcagcctatgccttgtgtacttttgccttatctactggtgacccgtcccagcccgtgcgactgtttagaggcaggacttcagggagaattgtggctccaagaggatgccaagattttgggtgggacccttgcttccagcccgatggctacgagcagacttacgcagagatgcccaaggccgagaagaacgccgttagtcacaggtttcgggcactgctggagctgcaggagtattttggttctctcgctgcatag

SEQ ID NO: 255011 - DNA, 534 bp, Artificial Sequence
  derived and/or modified sequence
atggccgccagcctggtggtgcagatcctgggcgacaagttcccctgcaccctggtggcccagaagatcgacctgcccgagtaccagggcgagcccgacgagatcagcatccagaagtgccaggaggccgtgagacaggtgcagggccccgtgctggtggaggacacctgcctgtgcttcaacgccctgggcggcctgcccggcccctacatcaagtggttcctggagaagctgaagcccgagggcctgcaccagctgctggccggcttcgaggacaagagcgcctacgccctgtgcaccttcgccctgagcaccggcgaccccagccagcccgtgagactgttcagaggcagaaccagcggcagaatcgtggcccccagaggctgccaggacttcggctgggacccctgcttccagcccgacggctacgagcagacctacgccgagatgcccaaggccgagaagaacgccgtgagccacagattcagagccctgctggagctgcaggagtacttcggcagcctggccgcctag

SEQ ID NO: 255012 - protein, 676 aa, Artificial Sequence
  derived and/or modified sequence
MAANVGSMFQYWKRFDLQQLQRELDATATVLANRQDESEQSRKRLIEQSREFKKNTPEDLRKQVAPLLKSFQGEIDALSKRSKEAEAAFLNVYKRLIDVPDPVPALDLGQQLQLKVQRLHDIETENQKLRETLEEYNKEFAEVKNQEVTIKALKEKIREYEQTLKNQAETIALEKEQKLQNDFAEKERKLQETQMSTTSKLEEAEHKVQSLQTALEKTRTELFDLKTKYDEETTAKADEIEMIMTDLERANQRAEVAQREAETLREQLSSANHSLQLASQIQKAPDVAIEVLTRSSLEVELAAKEREIAQLVEDVQRLQASLTKLRENSASQISQLEQQLSAKNSTLKQLEEKLKGQADYEEVKKELNILKSMEFAPSEGAGTQDAAKPLEVLLLEKNRSLQSENAALRISNSDLSGRCAELQVRITEAVATATEQRELIARLEQDLSIIQSIQRPDAEGAAEHRLEKIPEPIKEATALFYGPAAPASGALPEGQVDSLLSIISSQRERFRARNQELEAENRLAQHTLQALQSELDSLRADNIKLFEKIKFLQSYPGRGSGSDDTELRYSSQYEERLDPFSSFSKRERQRKYLSLSPWDKATLSMGRLVLSNKMARTIGFFYTLFLHCLVFLVLYKLAWSESMERDCATFCAKKFADHLHKFHENDNGAAAGDLWQ

SEQ ID NO: 255013 - DNA, 2991 bp, Artificial Sequence
  derived and/or modified sequence
gttttggcgccgcccgcctgctgcctcctggcggctcctgaactccagccccctctctatcagccgctcactccgtctcaatatgtctcaagatggcggccaatgtgggatcgatgtttcaatattggaagcgctttgatttacagcagctgcagagagaactcgatgccaccgcaacggtattggcgaaccggcaggatgaaagtgagcagtccagaaagcggcttatcgaacagagccgggagttcaagaagaacactccagaggatttgcgcaagcaggtagcgccgctgctgaagagtttccaaggagagattgatgcactgagtaaaagaagcaaggaagctgaagcagctttcttgaatgtctacaaaagattgattgacgtcccagatcccgtaccagctttggatctcggacagcaactccagctcaaagtgcagcgcctgcacgatattgaaacagagaaccagaaacttagggaaactctggaagaatacaacaaggaatttgctgaagtgaaaaatcaagaggttacgataaaagcacttaaagagaaaatccgagaatatgaacagacactgaagaaccaagccgaaaccatagctcttgagaaggaacagaagttacagaatgactttgcagaaaaggagagaaagctgcaggagacacagatgtccaccacctcaaagctggaggaagctgagcataaggttcagagcctacaaacagccctggaaaaaactcgaacagaattatttgacctgaaaaccaaatacgatgaagaaactactgcaaaggccgacgagattgaaatgatcatgacggaccttgaaagggcaaaccagagggcagaggtggctcagagagaggcggagaccttaagggaacagctctcatcggccaatcactccctccagctggcctcacagatccagaaggcaccagacgtggccatagaggtgctgacccgctccagcctagaagttgagttggccgccaaggagcgggagatcgcacagctggtggaggacgtgcagagactccaggccagcctcaccaagctgcgggagaattcggccagccagatctcacagcttgagcagcagctgagcgccaaaaacagcacactcaaacaactggaagaaaaactcaaaggccaggctgactatgaagaggtgaagaaagagctgaacattctgaagtccatggagtttgcaccgtccgagggcgctgggacacaggatgcggccaagcccctggaggtgctgttgctggagaagaaccgctcgctgcagtccgagaacgccgcgctgcgcatctccaacagcgacctgagcggacgctgtgcagagctgcaagtccgtatcactgaggctgtggccacagccactgagcagagagagctgatcgcccgcctggagcaggacctgagcatcattcagtccatccagcggcccgatgccgagggtgccgctgagcaccgcctggagaagatcccagagcccatcaaagaggccactgccctattctacggacctgcagcaccagccagcggtgccctcccagagggccaggtggattcactgctttccatcatctccagccagagggagcgcttccgtgcccggaaccaggagcttgaggccgagaaccgcctggcccagcacaccctccaggccctgcagagtgagctggacagcctgcgcgccgacaacatcaagctctttgagaagatcaagttcctgcagagctaccctggccggggcagcggcagtgatgacacggagctgcggtactcgtcccagtacgaggagcgcctggaccccttctcctccttcagcaagcgggagcggcagaggaagtacctgagcttgagtccctgggacaaggccaccctcagcatggggcgtctggttctctccaacaagatggcgcgcaccatcggcttcttctacacactgttcctgcactgcctggtcttcctggtgctctacaagctggcatggagcgagagcatggagagggactgtgccaccttctgcgccaagaagttcgctgaccacctgcacaagttccacgagaatgacaacggggctgcggctggtgacttgtggcagtgataccccggggcctcccccgtgacagtgacggctgcgcctccaccccgactgctcagtgcatctaatcacttagactcccctgaagaatcccccatggaaactgcccttatccgctgtccagcagctgccagaggccccaggtcacctcgggtccccttgaaagaatgtctcggtcacatcaggcccgctaggtccagagagcgagcccccaatgcccggccaggctaagccgcagagaccctctcagcccccacctcaggttagggctctgcccgcagcctgacctctagccctggtggcagaggtccctcagctgcgaggctaattgggtgaccaccgattccagctgcggttaatccagcttgggcctgtctgcactgcgatcctcttgggctctcctaggatccccccatgccccgtaagaggtggaagacgcttccttccaggacagcaggctttgagtccagcacccccagcctgcctttgccaccagccccaccctgcagagtatatgaggcttgacagagtctgccccctcccccactgcaccccaagagagagagccccagccagcggaacagtttctattaccccctccctgcccccagacccatgtgatttctgctttcttctttagcaagatattctggtttctagataaggaagagtctctaatgagcccccgagccccagtctcttcagactcatggattggtctgaggggtctgaacgtctcctagccaatcagaactggctgtggaccaccctagcacggccacctctcagggccactggcaggccttcctgagttagatttgtagttgcatatttagctttgcacatttgaaataaaccacggttgcagcca

SEQ ID NO: 255014 - DNA, 2031 bp, Artificial Sequence
  derived and/or modified sequence
atggccgccaacgtgggcagcatgttccagtactggaagagattcgacctgcagcagctgcagagagagctggacgccaccgccaccgtgctggccaacagacaggacgagagcgagcagagcagaaagagactgatcgagcagagcagagagttcaagaagaacacccccgaggacctgagaaagcaggtggcccccctgctgaagagcttccagggcgagatcgacgccctgagcaagagaagcaaggaggccgaggccgccttcctgaacgtgtacaagagactgatcgacgtgcccgaccccgtgcccgccctggacctgggccagcagctgcagctgaaggtgcagagactgcacgacatcgagaccgagaaccagaagctgagagagaccctggaggagtacaacaaggagttcgccgaggtgaagaaccaggaggtgaccatcaaggccctgaaggagaagatcagagagtacgagcagaccctgaagaaccaggccgagaccatcgccctggagaaggagcagaagctgcagaacgacttcgccgagaaggagagaaagctgcaggagacccagatgagcaccaccagcaagctggaggaggccgagcacaaggtgcagagcctgcagaccgccctggagaagaccagaaccgagctgttcgacctgaagaccaagtacgacgaggagaccaccgccaaggccgacgagatcgagatgatcatgaccgacctggagagagccaaccagagagccgaggtggcccagagagaggccgagaccctgagagagcagctgagcagcgccaaccacagcctgcagctggccagccagatccagaaggcccccgacgtggccatcgaggtgctgaccagaagcagcctggaggtggagctggccgccaaggagagagagatcgcccagctggtggaggacgtgcagagactgcaggccagcctgaccaagctgagagagaacagcgccagccagatcagccagctggagcagcagctgagcgccaagaacagcaccctgaagcagctggaggagaagctgaagggccaggccgactacgaggaggtgaagaaggagctgaacatcctgaagagcatggagttcgcccccagcgagggcgccggcacccaggacgccgccaagcccctggaggtgctgctgctggagaagaacagaagcctgcagagcgagaacgccgccctgagaatcagcaacagcgacctgagcggcagatgcgccgagctgcaggtgagaatcaccgaggccgtggccaccgccaccgagcagagagagctgatcgccagactggagcaggacctgagcatcatccagagcatccagagacccgacgccgagggcgccgccgagcacagactggagaagatccccgagcccatcaaggaggccaccgccctgttctacggccccgccgcccccgccagcggcgccctgcccgagggccaggtggacagcctgctgagcatcatcagcagccagagagagagattcagagccagaaaccaggagctggaggccgagaacagactggcccagcacaccctgcaggccctgcagagcgagctggacagcctgagagccgacaacatcaagctgttcgagaagatcaagttcctgcagagctaccccggcagaggcagcggcagcgacgacaccgagctgagatacagcagccagtacgaggagagactggaccccttcagcagcttcagcaagagagagagacagagaaagtacctgagcctgagcccctgggacaaggccaccctgagcatgggcagactggtgctgagcaacaagatggccagaaccatcggcttcttctacaccctgttcctgcactgcctggtgttcctggtgctgtacaagctggcctggagcgagagcatggagagagactgcgccaccttctgcgccaagaagttcgccgaccacctgcacaagttccacgagaacgacaacggcgccgccgccggcgacctgtggcagtag

SEQ ID NO: 255015 - DNA, 2031 bp, Artificial Sequence
  derived and/or modified sequence
atggcagccaacgtaggaagtatgttccagtactggaagcgttttgatctgcaacagctccagagagagcttgacgcaacagcgaccgtgctcgcaaatcggcaggacgaaagtgagcagtccagaaaacgactcattgagcagagcagagagttcaagaagaacacacctgaggatctgcgaaaacaggtagctcccctgctgaaaagttttcagggggagatcgatgcactctcaaagagaagcaaagaggcagaagctgcttttctcaacgtctataagagacttatcgacgtcccagatcccgtgcccgcactagatctgggccaacaactgcagttgaaagtgcagaggctccatgacatcgagaccgaaaaccagaaacttcgggagaccttagaggagtataacaaggaattcgcagaggtaaaaaatcaggaggtcaccatcaaggccttaaaagaaaaaattcgcgagtacgagcagacactaaagaaccaggcagagacgattgccttagagaaggagcaaaagctccagaatgactttgctgaaaaggagcgtaaattgcaggagacccagatgagcacaactagtaagctggaggaggctgagcataaggtgcaatccttgcagacggcgctggagaaaaccagaacggagctattcgacctcaagacaaaatatgacgaggagacaacggctaaagccgatgagattgagatgatcatgaccgatctcgagagggccaaccagcgggctgaagtcgcccagcgcgaagctgagaccctgcgcgaacagctaagtagcgctaaccactcgcttcagctggcgagccagatccagaaagcccctgatgttgccatagaggttctgacacgctccagcctcgaggtggagctcgccgcaaaagagcgtgaaatcgcgcagctggtagaggacgtccaacgccttcaagcttcccttacaaagcttcgcgaaaacagcgcctcccagatctcccaactcgaacagcagctctcagctaaaaactcaactctaaaacagctcgaggaaaaacttaagggccaggccgactacgaagaagtgaagaaagagctgaacatcctgaagtccatggagttcgctccctccgagggagcgggcacccaagacgccgctaaaccactggaagtccttctccttgaaaaaaatagatctttacagtccgaaaatgccgctttacgcatttcgaattccgacctaagcggccggtgtgccgagctgcaagtccgaatcaccgaggccgtggcaaccgctaccgagcagcgcgagctgattgcacggctggaacaggatctcagcattattcagagtatacaaagacctgacgcagaaggcgctgccgaacacaggctggagaaaattcccgaacctattaaggaggccacggctctgttttatggccccgccgccccagcaagcggcgccctcccagagggacaggtggattctttgctgagcataattagctcacaacgggaacgatttcgcgctaggaatcaggagctggaggcagagaacagactggcacaacacacactccaggctttgcagtcagaattggattctctcagagctgataatatcaagctgttcgaaaaaataaagttcctccagtcctatccgggtagaggaagcggatccgatgatacggaacttagatatagcagtcagtatgaggagcgactggatccattcagcagttttagcaaacgggaacgacagcggaagtacctgagtctgagcccatgggacaaggcaacactgtcgatgggccggctcgtgctgtcaaataagatggctaggaccattggtttcttttatacattgtttctgcactgtcttgtgttccttgtgctgtataaattagcttggagtgaaagtatggagcgcgactgcgccacattctgcgcaaagaaattcgccgaccaccttcacaaatttcatgagaacgacaatggggccgcagctggcgacctctggcagtag

SEQ ID NO: 255016 - DNA, 2031 bp, Artificial Sequence
  derived and/or modified sequence
atggccgccaacgtgggctccatgttccagtactggaagagatttgacctgcagcagctgcagcgggagctggatgccacagccaccgtgctggccaaccggcaggatgagagcgagcagagcaggaagaggctcatcgagcagagccgggagttcaagaagaacaccccagaggacctgaggaagcaggtggcccccctgctgaagagcttccagggcgagattgatgccctgagcaagaggagcaaggaggccgaggccgccttcctgaatgtgtacaagaggctgattgatgtgcctgaccctgtgcctgccctggacctgggccagcagctgcagctgaaggtgcagaggctgcatgacatcgagacagagaaccagaagctgcgggagaccctggaggagtacaacaaggagtttgctgaggtgaagaaccaggaggtgaccatcaaggccctgaaggagaagatccgggagtatgagcagaccctgaagaaccaggccgagaccatcgccctggagaaggagcagaagctgcagaatgactttgctgagaaggagaggaagctgcaggagacccagatgagcaccaccagcaagctggaggaggccgagcacaaggtgcagagcctgcagacagccctggagaagaccaggacagagctgtttgacctgaagaccaagtatgatgaggagaccacagccaaggcagatgaaattgagatgatcatgacagacctggagcgggccaaccagagagctgaggtggcccagcgggaggccgagaccctgcgggagcagctgagcagcgccaaccacagcctgcagctggccagccagatccagaaggccccagatgtggccatcgaggtgctgaccaggagcagcctggaggtggagctggccgccaaggagcgggagatcgcccagctggtggaggatgtgcagaggctgcaggccagcctgaccaagctgagagaaaattctgccagccagatcagccagctggagcagcagctgagcgccaagaacagcaccctgaagcagctggaggagaagctgaagggccaggccgactatgaggaggtgaagaaggagctgaacatcctgaagtccatggagtttgcccccagcgagggcgccggcacccaggatgctgccaagcccctggaggtgctgctgctggagaagaacagaagcctgcagagtgaaaatgctgccctgcgcatcagcaacagcgacctgagcggccgctgtgccgagctgcaggtgcgcatcacagaagctgtggccacagccacagagcagcgggagctgattgcccggctggagcaggacctgagcatcatccagagcatccagaggccagatgctgagggcgctgctgagcaccggctggagaagatccctgagcccatcaaggaggccacagccctcttctacggccctgctgccccagccagcggggccctgcctgagggccaggtggacagcctgctgagcatcatcagcagccagcgggagcgcttccgggccaggaaccaggagctggaggccgagaaccggctggcccagcacaccctgcaggccctgcagagcgagctggacagcctgcgggctgacaacatcaagctgtttgagaagatcaagttcctgcagagctacccaggccggggcagcggcagtgatgacacagagctgcgctacagcagccagtatgaggagcggctggaccccttcagcagcttcagcaagcgggagcggcagaggaagtacctgagcctgagcccctgggacaaggccaccctgtccatgggccgcctggtgctgagcaacaagatggcccggaccatcggcttcttctacaccctcttcctgcactgcctggtgttcctggtgctgtacaagctggcctggagcgagagcatggagcgggactgtgccaccttctgtgccaagaagtttgctgaccacctgcacaagttccatgaaaatgacaatggagctgctgctggggacctgtggcagtag

SEQ ID NO: 255017 - DNA, 2031 bp, Artificial Sequence
  derived and/or modified sequence
atggccgccaacgtgggcagcatgttccagtactggaagcggttcgacctccaacagctccagcgtgagctggatgcaaccgctactgtgctggctaaccgacaagacgaaagcgaacagtcgcgaaagaggctcattgaacagtctagggagtttaagaagaacacaccagaagaccttaggaagcaggtggcgccacttcttaagagctttcagggggagatcgatgccttatccaagcgatcaaaagaagcagaagcagcatttctcaacgtatataaacggttaattgatgtgcctgatccagtccctgccttagacctagggcagcagttgcagctgaaggtccagagacttcatgacattgagacagaaaaccagaaattgagggaaaccctcgaggaatacaacaaagagttcgctgaagtgaaaaaccaggaggtgaccattaaggctcttaaggagaagataagagaatacgaacagacactaaagaaccaggccgaaaccattgccctggaaaaagaacagaagcttcagaacgacttcgcggaaaaggagcgcaagctgcaggaaacgcagatgtcaactacctctaagcttgaggaggctgagcacaaggtccaatccctacaaaccgctttggaaaagactcggactgagctgttcgatctcaagaccaaatacgacgaagagacaacagcgaaggctgatgaaatcgaaatgattatgaccgatctggaaagggctaatcagcgcgcggaagtagcgcagcgagaagccgagacactcagagaacagctgtccagcgctaatcactctctccagctcgcctcccagatacagaaagcacctgatgtggccattgaggtcttgaccagatcgtcgctcgaggtcgaactggctgccaaggaaagggaaatcgctcaacttgtggaggatgtacagcgacttcaggcaagtttgacaaagctcagagaaaatagcgcctcccagattagtcagctggaacagcagttgtcagccaagaactccaccctcaagcagctcgaggagaaattaaaaggccaggccgattacgaagaagttaagaaggagctgaacatactgaagtctatggagtttgctcccagcgagggtgccggtacacaggacgccgccaaaccactggaagtgttgctcctggaaaaaaataggtccttgcagtccgaaaacgcggctctgcgcattagcaacagcgatctgtccggccgttgtgctgaactccaagtgcgcatcactgaagccgtggcaactgcaacagagcaaagggagctgattgctcggctggaacaggacctctcaataatccagagcatccagagacctgacgcagaaggtgccgccgaacaccgcctggagaagattcccgagcctataaaggaggctaccgcgctcttctatggcccggcggcccctgcatccggggctctccccgagggtcaagtcgacagcctgctatcaataatctctagtcagcgagaacgcttcagggcccgcaaccaggagctggaggcggagaaccggttggctcagcatacacttcaagcgctgcagagcgaactcgacagcctgcgagcggacaacattaagttattcgagaaaatcaaatttctgcaatcataccctggccggggcagtgggagtgatgataccgaattgcgctatagcagccagtacgaggagagactggatccctttagttcattttcgaagcgggagcggcaacgaaaatatctgtctctgagcccctgggacaaagcgacgctctccatgggcagactggtgttatccaacaaaatggcaaggactatcgggttcttttacacattatttttgcactgtctggtgttccttgtactgtataaactggcctggagcgaaagtatggagcgcgactgtgcgacattttgcgccaagaagtttgccgatcatctgcataaatttcacgaaaacgataatggcgcagctgctggagacctgtggcaatag

SEQ ID NO: 255018 - DNA, 2031 bp, Artificial Sequence
  derived and/or modified sequence
atggccgctaacgtgggcagcatgtttcagtactggaagcgtttcgaccttcagcaactccagcgagagcttgatgccaccgccaccgtcttggcaaatcgacaggatgagtctgagcagtcgagaaagagattgattgagcagagcagagaattcaagaagaacacgcccgaggacctgcgtaagcaggttgctccacttttgaagagcttccagggcgaaatcgacgccctttctaaacggtctaaggaagcagaggccgcatttctcaacgtgtataaacggctcatcgacgtccctgatccagttccggctctcgatctagggcagcagctccagctcaaggtccagcggctccatgacatcgaaacagagaatcaaaagcttcgtgagacactggaggagtataacaaagaattcgccgaggtcaagaaccaagaagttactattaaagccctcaaggagaaaatcagggagtatgaacaaaccctaaagaatcaagctgagaccatcgccctggaaaaagagcagaagttgcagaatgactttgccgagaaggagagaaagctgcaggagactcaaatgagcactacatcgaagctcgaagaagcggaacacaaggtgcagtcattgcagaccgcactggaaaagacacggactgaactctttgatctgaagactaaatacgatgaggaaacaaccgccaaagccgatgagattgaaatgattatgacagatctggaaagagccaaccaaagggccgaagttgcccagagagaagccgaaacacttagggagcagctgagttccgcaaaccattcattgcaactcgcttctcagatccagaaagcacctgacgtggctatagaggtcctaacccggtctagccttgaggtggagctggcggcaaaggagcgggaaatcgctcagttggtggaggatgtccaacggctacaagcctcactgaccaagctgcgagaaaactctgcaagccagatctctcagctagagcagcagctgagcgcaaaaaactcaacattgaaacagctggaggaaaagctgaagggacaggcggattacgaggaggtcaagaaggaactcaatatcctgaagagtatggagtttgccccatccgaaggcgctggtacacaagatgccgctaagccccttgaagtgctgctcctcgagaaaaataggtctctgcagtctgaaaacgccgctctgaggatttccaattcggacttatcaggcaggtgcgctgagctacaggttagaatcacggaggcagtcgccacagccaccgagcagagagagcttatagccagactagaacaggacctgagcatcatccagagcatccagcgacctgacgcagagggggctgccgagcaccgactggaaaagatcccggaaccaatcaaggaggccaccgctctcttttacgggccagcagctccggcttctggtgctctccccgaaggacaggtcgattcgctgctctctatcatttccagtcaaagggaacgtttccgggcaagaaatcaagagctggaagcggagaaccgactagcccagcatacgctacaggctttgcagtccgagctggatagcctccgcgcagataacattaagctgttcgaaaaaattaagtttctacaatcgtaccctggcagggggagcgggtccgatgacacagaattgcgctacagcagtcaatatgaagagagattggatcccttttcctccttcagcaaacgcgaacgacaaaggaagtacctgagcctctccccgtgggacaaggctactctatctatgggcaggcttgtcctatccaataagatggccaggaccatcgggtttttttataccttgttcttacactgtctggttttcctcgtactgtataagctcgcgtggtcggagtctatggaaagggattgtgcaacattctgtgctaaaaaattcgccgaccacctgcacaaatttcacgaaaacgataatggggctgctgctggtgatttatggcaatag

SEQ ID NO: 255019 - protein, 1179 aa, Artificial Sequence
  derived and/or modified sequence
MAPRPRARPGVAVACCWLLTVVLRCCVSFNVDVKNSMTFSGPVEDMFGYTVQQYENEEGKWVLIGSPLVGQPKNRTGDVYKCPVGRGESLPCVKLDLPVNTSIPNVTEVKENMTFGSTLVTNPNGGFLACGPLYAYRCGHLHYTTGICSDVSPTFQVVNSIAPVQECSTQLDIVIVLDGSNSIYPWDSVTAFLNDLLERMDIGPKQTQVGIVQYGENVTHEFNLNKYSSTEEVLVAAKKIVQRGGRQTMTALGIDTARKEAFTEARGARRGVKKVMVIVTDGESHDNHRLKKVIQDCEDENIQRFSIAILGSYNRGNLSTEKFVEEIKSIASEPTEKHFFNVSDELALVTIVKTLGERIFALEATADQSAASFEMEMSQTGFSAHYSQDWVMLGAVGAYDWNGTVVMQKASQIIIPRNTTFNVESTKKNEPLASYLGYTVNSATASSGDVLYIAGQPRYNHTGQVIIYRMEDGNIKILQTLSGEQIGSYFGSILTTTDIDKDSNTDILLVGAPMYMGTEKEEQGKVYVYALNQTRFEYQMSLEPIKQTCCSSRQHNSCTTENKNEPCGARFGTAIAAVKDLNLDGFNDIVIGAPLEDDHGGAVYIYHGSGKTIRKEYAQRIPSGGDGKTLKFFGQSIHGEMDLNGDGLTDVTIGGLGGAALFWSRDVAVVKVTMNFEPNKVNIQKKNCHMEGKETVCINATVCFDVKLKSKEDTIYEADLQYRVTLDSLRQISRSFFSGTQERKVQRNITVRKSECTKHSFYMLDKHDFQDSVRITLDFNLTDPENGPVLDDSLPNSVHEYIPFAKDCGNKEKCISDLSLHVATTEKDLLIVRSQNDKFNVSLTVKNTKDSAYNTRTIVHYSPNLVFSGIEAIQKDSCESNHNITCKVGYPFLRRGEMVTFKILFQFNTSYLMENVTIYLSATSDSEEPPETLSDNVVNISIPVKYEVGLQFYSSASEYHISIAANETVPEVINSTEDIGNEINIFYLIRKSGSFPMPELKLSISFPNMTSNGYPVLYPTGLSSSENANCRPHIFEDPFSINSGKKMTTSTDHLKRGTILDCNTCKFATITCNLTSSDISQVNVSLILWKPTFIKSYFSSLNLTIRGELRSENASLVLSSSNQKRELAIQISKDGLPGRVPLWVILLSAFAGLLLLMLLILALWKIGFFKRPLKKKMEK

SEQ ID NO: 255020 - DNA, 3540 bp, Artificial Sequence
  derived and/or modified sequence
atggcaccaagacccagagctagacccggcgttgctgtggcgtgctgctggctgctaacagtcgtcttgcgctgttgcgtatcttttaatgttgatgtgaaaaactccatgacatttagtgggcctgtcgaagacatgtttggctacacagttcaacagtacgagaatgaggaaggcaagtgggttctcattggttccccgctagtgggccagccaaaaaatagaaccggcgacgtctacaagtgtccggtgggacgcggcgagtctctgccctgtgtgaaactcgacttgccagttaacacgagtattcccaatgtgaccgaagtgaaggagaatatgacattcggatcaaccctcgtcaccaacccaaacggtgggtttttggcctgtgggcctctctatgcataccgctgtggacatttgcattatacaactggtatttgttccgacgtctccccaacttttcaggtcgttaactcaatagcacctgtacaggagtgcagcacacagctcgatatcgtgatagtgttggacggctccaattctatctacccctgggactctgtcactgcattcctgaatgatcttctggaacgtatggatatcggccccaagcagacccaagtcggcatcgtacaatatggtgagaacgtcactcatgagttcaacctaaacaagtacagttccaccgaagaagttctggtagctgctaagaagatcgtacagcgggggggccgtcagacaatgacagctttgggcattgacacagccagaaaggaagctttcactgaggccagaggcgcccgccgaggcgttaagaaagtgatggttattgtgaccgatggggagagtcacgacaatcatagacttaaaaaggtcatccaggactgcgaagatgagaacattcagagattctccatcgcaattttaggcagctacaatagggggaatttgtccaccgaaaaattcgtcgaggaaatcaagtccatcgcctccgagccgacagagaagcacttcttcaacgtgtccgacgaattggccctcgttacaattgtcaagacactgggtgagcggatctttgccctggaggccacagccgaccagtcggccgctagctttgagatggaaatgagtcagacagggttttcagcccactactcccaggactgggtcatgctgggagctgtgggggcctacgactggaatgggactgtggtcatgcagaaggcctcccaaatcataatcccaagaaacaccacgtttaatgtcgagagcacaaaaaaaaatgaacccctcgcgagttacctgggctacacagtgaacagtgcaactgctagctctggagacgtcctttatattgccgggcaacctcgctataatcataccggacaggtgatcatatacagaatggaagatgggaatattaagatactgcagacactctctggggagcagattggcagctacttcgggagcatcctgactaccactgacattgataaggactctaacaccgacattctcctggtcggcgctccgatgtacatgggaacggagaaagaggaacagggtaaggtgtatgtctacgcactgaatcaaaccaggttcgaatatcaaatgagtttagagccgataaaacagacgtgttgcagttctcgacaacacaatagctgtacgactgagaataagaacgaaccttgcggagctcggtttggcacagcaattgccgcagtaaaggaccttaatctggacgggtttaatgacatagtcatcggagccccgttggaagacgaccacggcggcgcagtctatatttatcacggatctggtaagactataagaaaagagtacgcacagcggatcccaagcggtggtgatggaaaaaccctgaagttctttggccaatcaatacacggcgagatggacctgaacggcgacggacttaccgacgtgacaattggaggtctgggcggagcggctctcttctggagccgtgatgtagccgtggtcaaggtgaccatgaacttcgaaccaaacaaggtcaacatccagaaaaaaaattgccacatggaaggaaaggaaactgtctgtattaacgctacagtgtgcttcgatgttaaactgaagagcaaggaggacacaatttacgaggccgatctgcagtacagggtgaccttagattcattacggcagatttcacggtcattctttagcgggacccaagagcgaaaggtccagaggaatatcactgtccggaaaagcgagtgtactaagcacagtttttatatgttggataagcacgattttcaagattccgtgaggataaccttggattttaacctgactgaccctgaaaatggtccagtattggacgactcattgcccaacagcgtccacgagtacatcccctttgcgaaggattgcgggaataaagaaaagtgcatctccgatttatccctgcatgttgccaccactgaaaaggacctccttattgtacgctcccagaacgataaattcaatgtgagtctaaccgtcaagaacacaaaagactccgcctacaatactagaactatcgtgcattactctccaaacctcgtctttagtggcatagaagccatccaaaaagattcttgtgagtccaatcacaacattacgtgtaaagtcggttatccgttcctgaggagaggcgagatggtgacttttaaaatcctgtttcaattcaacacatcttatctgatggagaatgtgaccatctacctgtctgcgaccagcgacagtgaagagcctcctgagacattaagtgataacgtggtgaacatttcaataccagtgaagtacgaagtagggctgcagttctactcatcagccagcgagtaccacatctccattgcagctaacgaaacagtgcccgaagtgatcaactccacagaagatataggaaatgagattaatattttctacttaattcgaaagtctgggtccttcccaatgcctgaactgaaactgagcatctcattccccaacatgacctccaacggttaccccgtgctgtatccaaccggtctgtcctcctcagaaaacgccaattgtagaccgcacatctttgaggatccatttagcatcaattcgggcaagaagatgactaccagcacagaccatctgaagagggggactattctggactgcaacacctgtaagtttgcaacgatcacctgtaacctgactagctcagatatcagtcaggtaaacgtatctctcattctgtggaaacccacgttcataaagtcctacttttcctccctcaatctgacaatccggggtgaactgaggtccgagaacgcgtcgctggtgctgtcctctagcaaccagaagcgcgaacttgccatccagatcagtaaagatggtctccccgggcgggtgcccctgtgggtgatcctcctgtctgcctttgccggattgctcctcctgatgctcttgatattggcgttatggaaaatcgggttctttaaaaggcccctgaagaagaagatggagaagtag

SEQ ID NO: 255021 - DNA, 8044 bp, Artificial Sequence
  derived and/or modified sequence
ctcccgaaggtccagcccttacccgccttcctaccaccttaggggatttggcccggagaacgagatcaccctctcaatgaaaggcagatgtccctttaaggtttgcttctacagcccgtggactttagcctaaacacggacccgcgaagctggctttatttgtccatgtctcggacagagcctgggaagctgccagtgagatttcagagaccaagagcgcgaaggggcgggcgatgtggcaatccgtctgggatgtgaaaagcgtggagcgcatttagaggaattcgacgaaaacacaggaaatcactcctctcccgctcctgggcgccgctgccactggggcagaggactgggaaccgcggcagcgggataagtggcccagccagagagcgcagctcccgcgcccggtcctgccctgcgaaccagcgcggccccctggcgctgaggctgctccggccatggcccctcggccccgcgcccgcccaggggtcgctgtcgcctgctgctggctcctcactgttgttctacgctgctgcgtatcattcaatgttgatgtgaaaaattcaatgactttcagcggcccggtggaagacatgtttggatatactgttcaacaatatgaaaatgaagaaggaaaatgggtgcttattggttctccgttagttggccaacccaaaaacagaactggagatgtctataagtgtccagttgggagaggtgaatcattaccttgtgtaaagttggatctaccagttaatacatcaattcccaatgtcacagaagtaaaggagaacatgacatttggatcaactttagtcaccaacccaaatggaggatttctggcttgtgggcccttatatgcctatagatgtggacatttgcattacacaactggaatctgttctgacgtcagccccacatttcaagtcgtgaattccattgcccctgtacaagaatgcagcactcaactggacatagtcatagtgctggatggttccaacagtatttacccatgggacagtgttacagcttttttaaatgaccttcttgaaagaatggatattggtcctaaacagacacaggttggaattgtacagtatggagaaaacgtgacccatgagttcaacctcaataagtattcttccaccgaagaggtacttgttgcagcaaagaaaatagtccagagaggtggccgccagactatgacagctcttggaatagacacagcaagaaaggaggcattcacggaagcccggggtgcccgaagaggagttaaaaaagtcatggttattgtgacagatggagagtctcatgacaatcatcgactgaagaaggtcatccaagactgtgaagatgaaaacattcaacggttttccatagctattcttggcagctataaccgaggaaatttaagcactgaaaaatttgtggaggaaataaaatcaattgcaagtgaacccactgaaaagcatttcttcaatgtctctgatgaattggctctagtcaccattgttaaaactctgggagaaagaatatttgccctggaagccacagctgaccagtcagcagcttcatttgaaatggaaatgtctcagactggcttcagtgctcattattcacaggactgggtcatgcttggagcagtaggagcctatgattggaatggaacagttgtcatgcagaaggctagtcaaatcataatccctcgaaacacaacctttaatgttgagtctaccaaaaagaatgaaccgcttgcttcttatttaggttacactgtaaactctgctactgcttcttctggagatgtgctctatattgctggacagcctcggtacaatcatacaggccaggtcattatctacaggatggaagatggaaacatcaaaattctccagacgctcagtggagaacagattggttcctactttggcagtattttaacaacaactgacattgacaaggattctaatactgacattcttctagtcggagcccctatgtacatgggaacagagaaggaggagcaaggaaaagtgtatgtgtatgctctcaatcagacaaggtttgaatatcaaatgagcctggaacctattaagcagacgtgctgttcatctcggcagcacaattcatgcacaacagaaaacaaaaatgagccatgcggggctcgttttggaactgcaattgctgctgtaaaagacctcaatcttgatggatttaatgacatcgtgataggagctccgctggaagatgatcacgggggagctgtgtacatttatcatggaagtggcaagactataaggaaagagtatgcacaacgtattccatcaggtggggatggtaagacactgaaattttttggccagtctatccacggagaaatggatttaaatggtgacggtctgacagatgtgactattgggggccttggtggtgctgccctcttctggtcccgagatgtggccgtagttaaagtgaccatgaattttgagccaaataaagtgaatattcaaaagaaaaactgccatatggagggaaaggaaacagtatgcataaatgctacagtgtgttttgatgtgaaattaaagtctaaagaagacacgatttatgaagctgatttgcagtaccgtgtcaccctagattcactaagacaaatatcacgaagttttttctctggaactcaagagagaaaggttcaaaggaacatcacagttcgaaaatcagaatgcactaagcactccttctacatgttggacaagcatgactttcaggactctgtgagaataacgttggactttaatcttaccgatccagaaaatgggcctgttcttgatgattctctaccaaactcagtacatgaatatattccctttgccaaagattgtggaaataaggaaaaatgtatctcagacctcagcctgcatgtcgccaccactgaaaaggacctgctgattgtccgatcccagaatgataagttcaacgttagcctcacagtcaaaaatacaaaggacagtgcctataacaccaggacaatagtgcattattctccaaatctagttttttcaggaattgaggctatccaaaaagacagttgtgaatctaatcataatatcacatgtaaagttggatatcccttcctgagaagaggagagatggtaactttcaaaatattgtttcagtttaacacatcctatctcatggaaaatgtgaccatttatttaagtgcaacaagtgacagcgaagaacctcctgaaaccctttctgataatgtagtaaacatttctatcccggtaaaatatgaagttggactacagttttacagctctgcaagtgaataccacatttcaattgctgccaatgagacagtccctgaagttattaattctactgaggacattggaaatgaaattaatatcttctacttgattagaaaaagtggatcttttccaatgccagagcttaagctgtcaatttcattccccaatatgacatcaaatggttaccctgtgctgtacccaactggattgtcatcttctgagaatgcaaactgcagaccccatatctttgaggatcctttcagtatcaactctggaaagaaaatgactacatcaactgaccatctcaaacgaggcacaattctggactgcaatacatgtaaatttgctaccatcacatgtaatctcacttcttctgacatcagccaagtcaatgtttcgcttatcttgtggaaaccaacttttataaaatcatatttttccagcttaaatcttactataaggggagaacttcggagtgaaaatgcatctctggttttaagtagcagcaatcaaaaaagagagcttgctattcaaatatccaaagatgggctaccgggcagagtgccattatgggtcatcctgctgagtgcttttgccggattgttgctgttaatgctgctcattttagcactgtggaagattggattcttcaaaagaccactgaaaaagaaaatggagaaatgaaatattttatgaaagaaaataataacaattattcaataatctatcctcaggtttgcctcaaatatgtgacaagaaatgtataattcatgacatagtcatgtaactatgtaatccatcagggattcattacttggaaaatgacaggtcatgcattatccaaaaacaataccaaaaagacatattttataaaatgacaaaaaatattttacataattactcatttttgttgagtaagcaaaattacaaagtgtttttaaaaaaacctgtacaaatatgtttatgtattaaatcaccatccaaaatatttaaggaatatataaaaagatttttatgatcatagaaacatctattttcaaaacaatataaattaagcttttccccttgattcctgttggatatccatgttcagcatgacagtcagcactcgtaaatgccaagaaaagaattacctgaaaaagatcatttctccctattcaaatgagaatattttcccttggtagaatccatatacaatatggattgaaaattaagtcaccaagaatacatttagcatctttgtgttgggttctatacctaaaaattttccctccctgcccaaggtgattggaaagtactgcaattgagctaaaattttatctaggatggaaaatcaggatagactcgtttaaaaacaagtatattaaatgggttaaattaagcttttacagaacatgcttaattttgatattgagctctaaatgcaaaactcttttatactgaaaaaacacttaaagtagttttgtgtggcatcacagtgatttgtcatgaaaagccatatatgggggacatgctaaaatggcttctgaatgaaatacgacagcagagaaagatgccactgaaatgctgaaattatctttgctgagcagcttttgaatgctaagggttccagtatgtgacccaaagaaagagttgtctcaactccttggtacagggttcattcaaacccccaagctgtgagagtgtgtttatttttaattttttaaaaggtatttaatttccaaccacacttcttatttttttgaaaagacaattttccatttcagtattacattttaccaagaagtcactgctttttaggtgtgttgcatcaatatttaaataaaatcccagaaatgtattttaaagaatttcaggtttgaaaactcaaaccaacaggaagatatcacacctttgtatgtgcttctttgttcttgaagtagtcattatggttcattggaatctactgtagcataagctcctaggttgctccatttcttaggaaaatagcaatgaatgaatgtatagtagctgcatgtgtgaactactgctgtaaagtttgctgacatttctgcaacaacatttctccatctgatttaccagaacctgtaacaagaccagaacatgtattcatccagaaactcctgggctctgctttgttcaaagaggagcaaatccacatagaaattaaatgttataaatttatttttttaaactaatttccaaagaatttagctgaagactcagagtcagcctacctcttgactctccacatccgcatctaagatcctgaaggccaaaggaatgcgcctgtgggatgccaaagccatcagtagctggaagaaagaatacctctttctagaggtttggtgtcctcttgctggcctgtcattatttggaaatacgcgcttttggaatttccttcattttcgctatttccaggttcagaaatcatacctaccacttgttctttctttgcccagtaaaactcagggtttctcttattcagagttaccatgttgcacacccccagtgctcagcctgcccagaagcccttctctgatctcagcaagatcttagtagtaaagctaacggatccattgaaattcatactcagcatctgtgactactagacaaagcccatttactgaaccataagtgtgcacttttaaactaaattgttaactgaaagggaaaaaatagaaatgagggcattttgaagtttttagaaaagagaggaagagctgttggccagatcaaagagatacttataagcccggcacaatttttaacataagtcattcctggctattaagtaaaatatttcatgaaccagaagtcctgtttctctaatattataatttgttgaggtttgtgtgtgtgtgtgtgtgcatgtgcagacacatgtacacatataaattgaatacaaaaatagctctataacaccaaaaaacagagtttacagaaaataaacacaaaagctatatctgcaagacaagtttgattcatctagtttcatatagtttcatatagtttcatttttattaatatttaggtttaacttatagttctgcaattatttaaaaaacaagtacagagcgtttgattaaaaaaagtcaacaaatgtttcaaaacagctttgtacaaatgttataaaacatatttaatgattaagaaatgtactagactctatcatttacttttaaaacatttaattagaaaaacaggtgatatttaagactatttataaacttattggccaaattgccaaaaagtttctttttctctaactttggtattctaaataattgattattgctcccattgtaaactgaaccatgtatgcactctcttttctgaccaaactacaatggtatattggtaaattatttaacaacacactgtccaggagggaaaaaaaaaacagtctctgatttgtatcatttgccaatttccatggtccaaatattctctctccattttcaaactaccaaagtgaccctaatcagcttacaaaattcctggaaatgtatctgccacctcttaccaaccagtgtgagctgacttcagcacaccactgagacagattacacgatagacagatagatagatagatagatagatagatagatagatagatagatagatattgatagagaacatgttgtgtctatatacatatccaatgacacacagtataatcatgttttaaattatgccaaaagtactgattatatcaagcccagtaaacataatgctacacagcacccattctttaattttgatttctaaaattataaccttcctttgatattaataaaatgttatgaacttgcaggagaaggaaggagttgaaagaaggaaaatataaagggtgatccacagtgaaaatcagacctacacaagccacaaaaaaattgtctcattttcccaaggaattcaaagtcctgtgatacacattacaaaagatgacactttgtaaatattttgaacttctatgatccaatttcaacttcattggtccaatttgtcaaactattttcctctgagcactagattcatgggcaatttaatctctgaatattttctgtgtcataagtgtgcttgaaaagaggcttgtagtaaacagatatttttacaaaatttgatgcttctgcaaccataataattttatctataaatgcgtatatacatatatatatatatatatatacacatacactcacatgcagatatttacatatatagatattctcttttccttttataaaatcaaagtctaggctcaattggaaaatggaaatatttgcaccaaaagaaaaaagtgccattgttgtgatcaatggagtaaagctggggtatagtagaggctggggaatccctgcccatgttctctccaaggccacagcttgcacaccgtgaatggtggccccactggctccatggagtgtgccttcacgcgggggaatgtccttgtccaacacgctgtaatctactccatgggaactgactgtcctgcttttcacaacattgagaaacaggcccagagcctgtctcatgtgccaggtgcagtcacattattgttaaaataaagtggcttctgacaaatcagtttttcaaaatagcatcctatgtacttttcatttcttccaacaaccctcaggcccccttttgccagttttctcccccaggggagattttcaagactactggagaaaaatctgttaataaaacatttgctctgagtacca

SEQ ID NO: 255022 - DNA, 3540 bp, Artificial Sequence
  derived and/or modified sequence
atggccccccggccccgggcccggcctggggtggccgtggcctgctgctggctgctgactgtggtgctgcgctgctgcgtgtccttcaacgtggatgtgaagaacagcatgaccttcagcggccctgtggaggacatgtttggctacacagtgcagcagtatgaaaatgaggagggcaagtgggtgctgattggcagccccctggtgggccagcccaagaacagaactggagatgtgtacaagtgccctgtgggccgcggggagagcctgccctgtgtgaagctggacctgcctgtgaacaccagcatccccaacgtgacagaggtgaaggagaacatgaccttcggcagcaccctggtgaccaaccccaacggcggcttcctggcctgtggccccctgtatgcctaccgctgtggccacctgcactacaccaccggcatctgcagtgatgtgagccccaccttccaggtggtgaacagcatcgcccctgtgcaggagtgcagcacccagctggacatcgtgattgtgctggatggcagcaacagcatctacccctgggacagcgtgacagccttcctgaatgacctgctggagaggatggacatcggccccaagcagacccaggtgggcatcgtgcagtacggggagaatgtgacccatgagttcaacctgaacaagtacagcagcacagaggaggtgctggtggccgccaagaagatcgtgcagaggggcggccggcagaccatgacagccctgggcatcgacacagccaggaaggaggccttcacagaggcccggggggccaggagaggagtgaagaaggtgatggtgattgtgacagatggagagagccatgacaaccaccggctgaagaaggtgatccaggactgtgaagatgagaacatccagcgcttcagcatcgccatcctgggcagctacaacagaggcaacctgagcacagagaagtttgtggaggagatcaagagcatcgccagcgagcccacagagaagcacttcttcaacgtgtctgatgagctggccctggtgaccatcgtgaagaccctgggggagcgcatctttgccctggaggccacagctgaccagagcgctgccagctttgagatggagatgagccagacaggcttcagcgcccactacagccaggactgggtgatgctgggcgctgtgggcgcctatgactggaatggcaccgtggtgatgcagaaggccagccagatcatcatccccaggaacaccaccttcaacgtggagagcaccaagaagaatgagcccctggccagctacctgggctacacagtgaacagcgccacagccagcagtggagatgtgctgtacatcgccggccagccccgctacaaccacacaggccaggtgatcatctacaggatggaggatggcaacatcaagatcctgcagaccctgagcggggagcagatcggcagctacttcggcagcatcctgaccaccacagacatcgacaaggacagcaacacagacatcctgctggtgggcgcccccatgtacatgggcacagagaaggaggagcagggcaaggtgtatgtgtatgccctgaaccagaccaggtttgagtaccagatgagcctggagcccatcaagcagacctgctgcagcagccggcagcacaacagctgcaccacagagaacaagaatgagccctgtggggccaggtttggaacagccatcgctgctgtgaaggacctgaacctggatggcttcaatgacatcgtgattggagcccccctggaggatgaccatggaggagctgtgtacatctaccacggcagcggcaagaccatcaggaaggagtatgcccagaggatccccagcggaggagatggcaagaccctgaagttcttcggccagagcatccacggggagatggacctgaatggagatggcctgacagatgtgaccatcggcggcctgggcggggccgccctcttctggagcagagatgtggccgtggtgaaggtgaccatgaactttgagcccaacaaggtgaacatccagaagaagaactgccacatggagggcaaggagaccgtgtgcatcaatgccaccgtgtgctttgatgtgaagctgaagagcaaggaggacaccatctatgaggccgacctgcagtacagagtgaccctggacagcctgcggcagatcagccgctccttcttcagcggcacccaggagaggaaggtgcagaggaacatcaccgtgaggaagtcagaatgtaccaagcacagcttctacatgctggacaagcatgacttccaggacagcgtgcgcatcaccctggacttcaacctgacagatcctgaaaatggacctgtgctggatgacagcctgcccaacagcgtgcatgagtacatcccctttgccaaggactgtggcaacaaggagaagtgcatcagtgacctgagcctgcacgtggccaccacagagaaggacctgctgattgtgcgcagccagaatgacaagttcaacgtgtccctgactgtgaagaacaccaaggacagcgcctacaacaccaggaccatcgtgcactacagccccaacctggtgttcagcggcatcgaggccatccagaaggacagctgtgagagcaaccacaacatcacctgcaaggtgggctaccccttcctgcggcggggggagatggtgaccttcaagatcctcttccagttcaacaccagctacctgatggagaatgtgaccatctacctgagcgccaccagtgacagcgaggagcccccagagaccctgagtgacaacgtggtgaacatcagcatccctgtgaagtatgaggtgggcctgcagttctacagcagcgccagcgagtaccacatcagcattgctgccaatgagaccgtgcctgaggtgatcaacagcacagaagatattggaaatgagatcaacatcttctacctgatcaggaagagcggcagcttccccatgcctgagctgaagctgagcatctccttccccaacatgaccagcaatggctaccctgtgctgtaccccaccggcctgagcagcagtgaaaatgccaactgccggccccacatctttgaggaccccttcagcatcaacagcggcaagaagatgaccaccagcacagaccacctgaagaggggcaccatcctggactgcaacacctgcaagtttgccaccatcacctgcaacctgaccagcagtgacatcagccaggtgaatgtgtccctcatcctgtggaagcccaccttcatcaagagctacttcagcagcctgaacctgaccatccggggggagctgcggagtgaaaatgccagcctggtgctgagcagcagcaaccagaagcgggagctggccatccagatcagcaaggatggcctgcccggccgggtgcccctgtgggtgatcctgctgagcgcctttgctggcctgctgctgctgatgctgctgatcctggccctgtggaagattggcttcttcaagaggcccctgaagaagaagatggagaagtag

SEQ ID NO: 255023 - DNA, 3540 bp, Artificial Sequence
  derived and/or modified sequence
atggccccccggccccgggcccggcccggcgtggccgtggcctgctgttggctcctgacggtggtgctgaggtgctgcgtgagcttcaacgtggacgtgaagaattccatgactttcagtggccccgtggaagacatgtttggatatactgtgcaacagtacgagaacgaagaggggaaatgggtcctcataggttctcctctcgtgggccagcctaaaaataggacgggggacgtttataagtgtccagtgggccggggcgaatcactgccttgcgtcaagttggatctaccggtaaacacttccataccgaatgtgactgaagtgaaggaaaacatgaccttcggttccacactggtgactaacccgaatggcggctttctcgcctgtggccccctgtatgcctacagatgtgggcatctgcactacaccactggcatttgctcagacgtctccccaacatttcaggtggtaaatagcatcgcccctgtgcaggagtgctctacacagctggatattgtgatagtgctggatgggtctaatagcatatatccttgggatagtgtgactgctttcttgaacgatctgctggagcgtatggacattggccccaagcagacccaggtgggcatcgttcagtatggggagaacgtcacacatgaatttaatctgaataagtattcttctaccgaggaagtcctggtggccgccaagaaaattgtgcagagggggggaaggcagacgatgacagccttgggaatcgatacagcaaggaaggaagccttcacagaagcccggggagcccggcgaggcgtgaaaaaagtgatggtcattgtcaccgatggagagagtcacgacaaccataggctgaaaaaagtcattcaggattgtgaggacgagaacatccaacgcttcagcatcgccattttgggttcctacaatcgcggcaatctgtccaccgaaaagtttgtggaggaaatcaagagcatcgcaagtgagccaactgagaaacactttttcaatgtttcggatgaattggccctggtgaccattgtaaagacactcggtgaacgaatttttgccctggaagctactgccgaccagagtgccgcctcattcgagatggagatgtctcagactggattctctgcccattactctcaggattgggtgatgctgggcgctgttggagcttacgactggaatggcacagtagtgatgcagaaagccagccagatcattatcccccgcaataccaccttcaatgtagaatctacaaaaaaaaacgaaccactggcttcctacctgggatacactgtgaatagtgctactgcgtcctccggcgacgtgctgtatatcgctggacaaccaagatacaaccacactggacaggtcattatttaccgcatggaggatgggaacattaaaattctgcagactttgtccggcgagcagatagggagttacttcggctcaatcctgaccaccactgacatcgacaaagattctaatacagatattctcctcgtaggtgcacctatgtacatgggaaccgaaaaagaggaacaaggcaaagtatacgtatatgcactgaaccaaacacggtttgagtaccagatgagcctggagccaataaaacaaacctgctgctcctccagacagcataacagttgcaccaccgaaaacaagaatgagccgtgcggcgcccggttcggcacagcaatcgcagccgtgaaggatctcaatctggatggcttcaatgatatcgtgatcggcgcacccctcgaagacgaccacggtggagcagtgtatatctaccacggctcaggcaaaaccatccgaaaggaatacgcccagcggatcccctccggtggcgatgggaagacattgaaattctttggccagagcatacatggggagatggacctgaatggtgatggtctgacagatgttacaattggaggacttggaggcgcagcactcttctggtctagagatgtggccgttgtaaaagtgacaatgaatttcgaacctaacaaggtaaatattcagaagaagaactgtcatatggagggcaaagaaactgtctgtatcaatgcaactgtgtgcttcgacgtaaagcttaaatcaaaggaggacactatctacgaggccgatcttcagtatcgggtgacccttgatagcttgagacagatctctaggagctttttttccggaacacaggagcgcaaagtgcagaggaatatcaccgttaggaaaagcgaatgcaccaaacactccttctatatgcttgacaagcatgactttcaggacagcgtgaggattacgctggacttcaatctcaccgatcccgagaatggccctgttttagatgactccttgcccaacagtgtgcacgagtatattccctttgccaaagactgtgggaacaaagaaaaatgcatctctgacctgtctcttcatgtcgcgaccactgagaaagaccttctgatcgtgcggtcccaaaatgacaagtttaatgtgagtctgaccgtcaaaaatacaaaagatagcgcatataatacaagaacaatagtccactatagccccaatctggtgtttagtggaatcgaagcaatccagaaggactcttgcgaatcaaaccacaatatcacctgcaaagtgggctatcccttcctccgacgcggtgaaatggtgacctttaaaatcctgttccagtttaacactagctatcttatggaaaatgtcacgatttacctgtccgcgactagcgattctgaagaacccccggagactttaagcgataacgttgtcaacatatcaatacctgttaagtatgaggtcggattgcagttctattcatctgcaagtgagtaccacatttccatagccgcaaacgagaccgtccctgaggttattaacagtactgaggacattggaaatgagattaacattttttaccttatccgcaagtcgggcagttttcccatgccagagctgaagctcagtatcagcttcccgaatatgaccagtaatggatatccagtgctttatcccaccgggctgagttcatcagaaaacgcaaactgtcgcccccatattttcgaagacccgttctctattaactcaggcaagaagatgacgacttcaacagaccatctgaagcgcgggacaattctggattgcaatacttgcaaatttgccactataacgtgtaacctcacttcctctgacatcagccaggtgaatgtctccttgatcctgtggaaacctacattcataaagtcctattttagctcactgaatcttactatccggggcgaactcaggtcggaaaacgcttcactggtcctttccagttccaaccaaaagagggaactggctatccagatctccaaggacggactgcctgggcgagttcctctgtgggtgatcctcttgagtgctttcgctggccttctgctgctgatgctcctcatccttgctttgtggaagatcggattttttaagcggccactcaaaaagaaaatggagaagtag

SEQ ID NO: 255024 - DNA, 3540 bp, Artificial Sequence
  derived and/or modified sequence
atggccccacggccaagagccagacctggcgtcgccgtagcctgctgctggctgcttaccgtagtgctccggtgctgcgtaagctttaatgttgatgtcaagaattcaatgacttttagtggcccagtggaagacatgttcggttataccgtgcaacaatatgagaatgaggagggcaaatgggtcttgatagggagtccgctggtcggacagcccaaaaacaggaccggtgatgtttataaatgtccagtggggcgaggagagagcctgccgtgtgtcaagttggacctccctgtgaatacgagtatcccaaacgtcaccgaggtgaaggagaatatgaccttcggcagcacgctggtgaccaatcccaatgggggatttctggcctgtggcccactatacgcctatcgctgcgggcacctccattacaccaccggaatctgttcggatgtatccccaacctttcaggtcgtgaacagtattgccccagttcaagagtgcagtacccaattagatattgtaattgtgctcgatggtagtaatagcatctacccttgggacagcgtcacggcatttcttaatgaccttctggagcggatggatataggtcctaaacagacccaggtgggtatcgtgcagtacggggagaacgtgacacatgaatttaacctgaacaaatattctagcacagaagaagtattggtggctgcaaagaaaatcgtgcagcgaggcggtcgacagacaatgactgccctggggattgatactgctcgtaaagaagccttcacggaggcccgaggagcaagacggggagtcaagaaggtaatggtgattgtcactgacggtgagtcccatgataatcacaggcttaagaaggtgattcaggattgtgaggatgaaaatattcagagattctccatcgctatattggggagttacaataggggcaatctgtctaccgaaaaattcgtggaagagattaaaagcatcgctagtgagcccactgagaaacacttttttaacgtctctgacgagttggctctcgtgacaatagtgaagaccctcggagagagaatcttcgctttagaggccacagctgatcagtcagccgctagtttcgagatggagatgagccagactggtttttcagcccactactcccaggactgggtcatgctgggcgctgtgggagcttacgactggaacggcacagttgtgatgcagaaggcttcacaaatcattattccccgtaatactacgttcaacgtggagagcaccaaaaagaatgagccgttggcgtcatacctgggatacactgttaactcagccacagcatcctccggagatgtgctctatattgctggacagcccagatacaatcacaccggccaggtgatcatctacaggatggaggatggtaacattaagattcttcagactctgagcggcgagcagatcggctcgtactttggctctatcttgacaactactgacatagacaaggatagcaacaccgacatcttattagtcggcgctcccatgtatatgggaactgaaaaagaggagcagggcaaggtctacgtttatgctctgaaccaaacaaggttcgagtatcagatgagtttggagcctatcaaacaaacttgctgttcttcgcggcagcacaacagctgtaccacggagaataagaacgaaccatgtggcgctcgcttcggtacggccattgccgctgtcaaggacctgaacctggatggttttaacgacatagtcatcggggctcctttggaggacgatcacggcggagccgtctatatttatcatgggtctggcaagacgatccgtaaggaatacgcacagcggattccgagcggtggcgatggtaagactctgaagttttttggacaatccattcacggagagatggacctgaacggtgacgggctaactgatgtaacaattggcggtctcggaggcgcagccctgttctggtcgagagacgttgctgtggtcaaagtcacaatgaatttcgagcccaataaagtcaacatccagaagaaaaactgtcatatggaaggcaaggaaactgtatgcattaacgccacggtgtgtttcgacgtgaagctgaaaagcaaggaggacaccatctatgaagctgacctgcaatatcgcgttaccctcgactcgctgcggcagattagtagatcgtttttttcaggcacccaagagagaaaggtgcaacgtaatattacagtcaggaaatctgagtgcacgaagcacagcttctatatgttggacaagcacgatttccaggactcagtcaggattactctggacttcaacctcacagaccctgagaatgggccagtgctagatgacagcctgcctaattctgttcacgaatatatccccttcgctaaggactgcggaaataaagaaaagtgtatatccgacctctccctgcatgttgctaccacagagaaggatctgctgattgtgaggagtcagaatgacaagttcaacgtgagcctgacagttaaaaatactaaagattccgcgtataatactaggactattgttcattactctccgaacctggtgttcagcggaatcgaagccatacaaaaggatagttgcgagtcgaatcataacattacttgcaaagtgggataccccttcctgcggcgaggtgagatggtgacctttaaaatcttgttccaatttaacactagttatctgatggagaacgttactatctatttgtcagctacttctgatagcgaggagccacctgagacactgtcggacaacgtggttaatatttcaatacctgtgaaatatgaggtgggtctgcagttttattcctccgctagcgaataccacatctccatcgcggctaacgagactgtccccgaggttataaattcaacggaggatatagggaacgagatcaacatattttatctaatcaggaaatccgggtcctttcccatgcccgaactgaagcttagcatctcttttcccaacatgacctcgaacggttaccctgtactttatccaacaggtctgagttcaagcgaaaatgctaattgcaggccgcatatcttcgaagacccattttcaataaattccggcaaaaagatgacaacaagtaccgatcatctgaagcgtggaacgatactcgactgcaatacatgtaagtttgctactattacctgtaatcttacatcttctgacataagtcaggtcaacgtgtcactgattttgtggaaacctaccttcataaagtcctacttcagctccttgaacctgacaatacgaggtgaacttcggagtgaaaatgccagcttggttctttccagcagtaaccaaaaacgcgagcttgccatccagataagcaaagacggcctgcctggacgggtgcccctctgggtgatactgctgagcgctttcgcgggattgctgctgctgatgttactaatcctagcactgtggaaaatcggattttttaagaggcctttaaagaagaagatggaaaagtag

SEQ ID NO: 255025 - DNA, 3540 bp, Artificial Sequence
  derived and/or modified sequence
atggcccccagacccagagccagacccggcgtggccgtggcctgctgctggctgctgaccgtggtgctgagatgctgcgtgagcttcaacgtggacgtgaagaacagcatgaccttcagcggccccgtggaggacatgttcggctacaccgtgcagcagtacgagaacgaggagggcaagtgggtgctgatcggcagccccctggtgggccagcccaagaacagaaccggcgacgtgtacaagtgccccgtgggcagaggcgagagcctgccctgcgtgaagctggacctgcccgtgaacaccagcatccccaacgtgaccgaggtgaaggagaacatgaccttcggcagcaccctggtgaccaaccccaacggcggcttcctggcctgcggccccctgtacgcctacagatgcggccacctgcactacaccaccggcatctgcagcgacgtgagccccaccttccaggtggtgaacagcatcgcccccgtgcaggagtgcagcacccagctggacatcgtgatcgtgctggacggcagcaacagcatctacccctgggacagcgtgaccgccttcctgaacgacctgctggagagaatggacatcggccccaagcagacccaggtgggcatcgtgcagtacggcgagaacgtgacccacgagttcaacctgaacaagtacagcagcaccgaggaggtgctggtggccgccaagaagatcgtgcagagaggcggcagacagaccatgaccgccctgggcatcgacaccgccagaaaggaggccttcaccgaggccagaggcgccagaagaggcgtgaagaaggtgatggtgatcgtgaccgacggcgagagccacgacaaccacagactgaagaaggtgatccaggactgcgaggacgagaacatccagagattcagcatcgccatcctgggcagctacaacagaggcaacctgagcaccgagaagttcgtggaggagatcaagagcatcgccagcgagcccaccgagaagcacttcttcaacgtgagcgacgagctggccctggtgaccatcgtgaagaccctgggcgagagaatcttcgccctggaggccaccgccgaccagagcgccgccagcttcgagatggagatgagccagaccggcttcagcgcccactacagccaggactgggtgatgctgggcgccgtgggcgcctacgactggaacggcaccgtggtgatgcagaaggccagccagatcatcatccccagaaacaccaccttcaacgtggagagcaccaagaagaacgagcccctggccagctacctgggctacaccgtgaacagcgccaccgccagcagcggcgacgtgctgtacatcgccggccagcccagatacaaccacaccggccaggtgatcatctacagaatggaggacggcaacatcaagatcctgcagaccctgagcggcgagcagatcggcagctacttcggcagcatcctgaccaccaccgacatcgacaaggacagcaacaccgacatcctgctggtgggcgcccccatgtacatgggcaccgagaaggaggagcagggcaaggtgtacgtgtacgccctgaaccagaccagattcgagtaccagatgagcctggagcccatcaagcagacctgctgcagcagcagacagcacaacagctgcaccaccgagaacaagaacgagccctgcggcgccagattcggcaccgccatcgccgccgtgaaggacctgaacctggacggcttcaacgacatcgtgatcggcgcccccctggaggacgaccacggcggcgccgtgtacatctaccacggcagcggcaagaccatcagaaaggagtacgcccagagaatccccagcggcggcgacggcaagaccctgaagttcttcggccagagcatccacggcgagatggacctgaacggcgacggcctgaccgacgtgaccatcggcggcctgggcggcgccgccctgttctggagcagagacgtggccgtggtgaaggtgaccatgaacttcgagcccaacaaggtgaacatccagaagaagaactgccacatggagggcaaggagaccgtgtgcatcaacgccaccgtgtgcttcgacgtgaagctgaagagcaaggaggacaccatctacgaggccgacctgcagtacagagtgaccctggacagcctgagacagatcagcagaagcttcttcagcggcacccaggagagaaaggtgcagagaaacatcaccgtgagaaagagcgagtgcaccaagcacagcttctacatgctggacaagcacgacttccaggacagcgtgagaatcaccctggacttcaacctgaccgaccccgagaacggccccgtgctggacgacagcctgcccaacagcgtgcacgagtacatccccttcgccaaggactgcggcaacaaggagaagtgcatcagcgacctgagcctgcacgtggccaccaccgagaaggacctgctgatcgtgagaagccagaacgacaagttcaacgtgagcctgaccgtgaagaacaccaaggacagcgcctacaacaccagaaccatcgtgcactacagccccaacctggtgttcagcggcatcgaggccatccagaaggacagctgcgagagcaaccacaacatcacctgcaaggtgggctaccccttcctgagaagaggcgagatggtgaccttcaagatcctgttccagttcaacaccagctacctgatggagaacgtgaccatctacctgagcgccaccagcgacagcgaggagccccccgagaccctgagcgacaacgtggtgaacatcagcatccccgtgaagtacgaggtgggcctgcagttctacagcagcgccagcgagtaccacatcagcatcgccgccaacgagaccgtgcccgaggtgatcaacagcaccgaggacatcggcaacgagatcaacatcttctacctgatcagaaagagcggcagcttccccatgcccgagctgaagctgagcatcagcttccccaacatgaccagcaacggctaccccgtgctgtaccccaccggcctgagcagcagcgagaacgccaactgcagaccccacatcttcgaggaccccttcagcatcaacagcggcaagaagatgaccaccagcaccgaccacctgaagagaggcaccatcctggactgcaacacctgcaagttcgccaccatcacctgcaacctgaccagcagcgacatcagccaggtgaacgtgagcctgatcctgtggaagcccaccttcatcaagagctacttcagcagcctgaacctgaccatcagaggcgagctgagaagcgagaacgccagcctggtgctgagcagcagcaaccagaagagagagctggccatccagatcagcaaggacggcctgcccggcagagtgcccctgtgggtgatcctgctgagcgccttcgccggcctgctgctgctgatgctgctgatcctggccctgtggaagatcggcttcttcaagagacccctgaagaagaagatggagaagtag

SEQ ID NO: 255026 - protein, 248 aa, Artificial Sequence
  derived and/or modified sequence
MAAGFKTVEPLEYYRRFLKENCRPDGRELGEFRTTTVNIGSISTADGSALVKLGNTTVICGVKAFRSGPPGEEAQVASQFIADVIENSQIIQKEDLCISPGKLVWVLYCDLICLDYDGNILDACTFALLAALKNVQLPEVTINEETALAEVNLKKKSYLNIRTHPVATSFAVFDDTLLIVDPTGEEEHLATGTLTIVMDEEGKLCCLHKPGGSGLTGAKLQDCMSRAVTRHKEVKKLMDEVIKSMKPK

SEQ ID NO: 255027 - protein, 276 aa, Artificial Sequence
  derived and/or modified sequence
MAAGFKTVEPLEYYRRFLKENCRPDGRELGEFRTTTVNIGSISTADGSALVKLGNTTVICGVKAEFAAPSTDAPDKGYVVPNVDLPPLCSSRFRSGPPGEEAQVASQFIADVIENSQIIQKEDLCISPGKLVWVLYCDLICLDYDGNILDACTFALLAALKNVQLPEVTINEETALAEVNLKKKSYLNIRTHPVATSFAVFDDTLLIVDPTGEEEHLATGTLTIVMDEEGKLCCLHKPGGSGLTGAKLQDCMSRAVTRHKEVKKLMDEVIKSMKPK

SEQ ID NO: 255028 - DNA, 872 bp, Artificial Sequence
  derived and/or modified sequence
gcaggcgcagacgcgcgggcgggaagatggcggctgggttcaaaaccgtggaacctctggagtattacaggagatttctgaaagagaactgccgtcctgatggaagagaacttggtgaattcagaaccacaactgtcaacatcggttcaattagtaccgcagatggttctgctttagtgaagttgggaaatactacagtaatctgtggagttaaagcattccggtctggacctcctggagaagaggcccaagtggctagccagttcattgcagatgtcattgaaaattcacagataattcagaaagaggacttatgcatttctccaggaaagcttgtctgggttctatactgtgatctcatttgcctcgactacgatggaaacattttggatgcctgcacatttgctttgctagcggctttaaaaaatgtacagttgcctgaagttactataaatgaagaaactgctttagcagaagttaatttaaagaagaaaagttatttgaatattagaactcatccagttgcaacttcctttgctgtgtttgatgacactttgcttatagttgaccctactggagaggaggaacatctggcaacaggaaccttaacaatagtaatggatgaggaaggcaaactctgttgtcttcacaaaccaggtggaagtgggctaactggagctaaacttcaggactgtatgagccgagcagttacaagacacaaagaagttaaaaaactgatggatgaagtaattaagagtatgaaacccaaataaacagccaccacattttcaaaacagatttgtaaaaattgtatttgttaacactgtgcacaaacgttttatactaaataaatatcaaactacattcttctg

SEQ ID NO: 255029 - DNA, 1198 bp, Artificial Sequence
  derived and/or modified sequence
agtcacagcaccagctcttttataaagagggagacccgctccttctttaacagcagattcgtcaaaatacgtccaaggcaaggaaacctagaaaggcgtctgggcaggggaaagtcgatgcgagggcgggccagggacctttcgtcgcgtccccaccttggcatttcccgtggcgtgagcggccccggcatccgtgtcgaaagtgcggcggcggaacaggcgcgcaggagaggagcggcgcaggcgcagacgcgcgggcgggaagatggcggctgggttcaaaaccgtggaacctctggagtattacaggagatttctgaaagagaactgccgtcctgatggaagagaacttggtgaattcagaaccacaactgtcaacatcggttcaattagtaccgcagatggttctgctttagtgaagttgggaaatactacagtaatctgtggagttaaagcagaatttgcagcaccatcaacagatgcccctgataaaggatacgttgttcctaatgtggatctaccacccctgtgttcatcgagattccggtctggacctcctggagaagaggcccaagtggctagccagttcattgcagatgtcattgaaaattcacagataattcagaaagaggacttatgcatttctccaggaaagcttgtctgggttctatactgtgatctcatttgcctcgactacgatggaaacattttggatgcctgcacatttgctttgctagcggctttaaaaaatgtacagttgcctgaagttactataaatgaagaaactgctttagcagaagttaatttaaagaagaaaagttatttgaatattagaactcatccagttgcaacttcctttgctgtgtttgatgacactttgcttatagttgaccctactggagaggaggaacatctggcaacaggaaccttaacaatagtaatggatgaggaaggcaaactctgttgtcttcacaaaccaggtggaagtgggctaactggagctaaacttcaggactgtatgagccgagcagttacaagacacaaagaagttaaaaaactgatggatgaagtaattaagagtatgaaacccaaataaacagccaccacattttcaaaacagatttgtaaaaattgtatttgttaacactgtgcacaaacgttttatactaaataaatatcaaactacattcttctgaaa

SEQ ID NO: 255030 - DNA, 747 bp, Artificial Sequence
  derived and/or modified sequence
atggctgctggctttaaaaccgtggagccactcgaatattacaggaggttcttgaaagagaactgccgtcccgatggtcgagagcttggggagtttagaaccaccacggtgaacattggctccatttccacagcagatggctccgccctggtgaagttggggaatacaactgttatatgtggggtgaaagcattcaggtcagggcctcccggcgaagaggcacaggtggcttctcaattcattgctgatgttatagaaaatagccaaattatacaaaaggaagatctctgtatcagtcctggcaaattggtgtgggtgctctattgcgacttaatctgccttgattacgacggcaatatcctagacgcctgtaccttcgccctgctggctgctttgaagaacgtacagctacctgaggtgacaatcaatgaagagacagctctggccgaggtgaatctcaagaagaaatcttacctaaatatccggactcacccagtggcgacatcattcgcagtgttcgatgacacactgttgatcgtggaccctactggtgaggaggaacacctggccaccggcacactgacaatcgtgatggatgaggagggtaaattatgctgcctgcacaaacctggtggatctggccttaccggcgccaagctgcaggattgtatgtcgcgagcagttacgagacataaagaagtgaaaaagcttatggatgaagtgataaagtccatgaaacctaagtag

SEQ ID NO: 255031 - DNA, 831 bp, Artificial Sequence
  derived and/or modified sequence
atggcagccggctttaagacggtagagcccttagagtattaccgccgtttcttgaaggagaactgtagacccgacggtcgcgaacttggggagtttcgaaccaccaccgttaacattgggagcatctctaccgccgacggctccgccctagtgaagctcggtaataccaccgttatatgcggcgttaaagctgagtttgctgcaccctccactgacgcgccagacaagggatatgtggtccccaatgtggatctccctccactctgttcctcccggtttaggtccggaccacctggggaagaggcgcaggtggcaagtcagttcatagcagatgtcatcgaaaactcccagatcatccagaaagaggacctgtgtattagcccaggtaaactggtgtgggtgctctattgcgacctgatctgcttagattatgatgggaatatcctggacgcatgcacatttgcattattagccgccctgaagaacgtgcaattacctgaagtgacaataaatgaggaaacggccctggccgaagtcaaccttaagaaaaagagctacctgaatatccggacccatcccgtggcgaccagctttgccgtttttgacgacacgttactgatagttgaccccaccggagaggaagagcatttggccactgggacattgaccatcgtaatggacgaggaaggcaaattgtgctgcctgcacaagccgggcggttctggcttgactggggctaagctgcaggattgcatgtcacgggcagtgacaagacacaaagaggttaagaagctgatggacgaggtaatcaaaagcatgaaacctaagtag

SEQ ID NO: 255032 - DNA, 747 bp, Artificial Sequence
  derived and/or modified sequence
atggctgctggcttcaagacagtggagcccctggagtactaccgccgcttcctgaaggagaactgcaggccagatggccgggagctgggggagttccgcaccaccaccgtgaacatcggcagcatcagcacagcagatggcagcgccctggtgaagctgggcaacaccaccgtcatctgtggggtgaaggccttccgcagcggccccccaggagaggaggcccaggtggccagccagttcatcgcagatgtgattgagaacagccagatcatccagaaggaggacctgtgcatcagccctgggaagctggtgtgggtgctgtactgtgacctgatctgcctggactatgatggcaacatcctggatgcctgcacctttgccctgctggccgccctgaagaatgtgcagctgcctgaggtgaccatcaatgaggagacagccctggccgaggtgaacctgaagaagaagagctacctgaacatccgcacccaccctgtggccaccagctttgctgtgtttgatgacaccctgctgattgtggaccccactggagaggaggagcacctggccaccggcaccctgaccatcgtgatggatgaggagggcaagctgtgctgcctgcacaagccaggcggcagcggcctgaccggggccaagctgcaggactgcatgagcagagctgtgaccaggcacaaggaggtgaagaagctgatggatgaagtcatcaagtccatgaagcccaagtag

SEQ ID NO: 255033 - DNA, 831 bp, Artificial Sequence
  derived and/or modified sequence
atggctgctggcttcaagacagtggagcccctggagtactaccgccgcttcctgaaggagaactgcaggccagatggccgggagctgggggagttccgcaccaccaccgtgaacatcggcagcatcagcacagcagatggcagcgccctggtgaagctgggcaacaccaccgtcatctgtggggtgaaggccgagtttgctgcccccagcacagatgccccagacaagggctacgtggtgcccaacgtggacctgccccccctgtgcagcagccgcttccgcagcggccccccaggagaggaggcccaggtggccagccagttcatcgcagatgtgattgagaacagccagatcatccagaaggaggacctgtgcatcagccctgggaagctggtgtgggtgctgtactgtgacctgatctgcctggactatgatggcaacatcctggatgcctgcacctttgccctgctggccgccctgaagaatgtgcagctgcctgaggtgaccatcaatgaggagacagccctggccgaggtgaacctgaagaagaagagctacctgaacatccgcacccaccctgtggccaccagctttgctgtgtttgatgacaccctgctgattgtggaccccactggagaggaggagcacctggccaccggcaccctgaccatcgtgatggatgaggagggcaagctgtgctgcctgcacaagccaggcggcagcggcctgaccggggccaagctgcaggactgcatgagcagagctgtgaccaggcacaaggaggtgaagaagctgatggatgaagtcatcaagtccatgaagcccaagtag

SEQ ID NO: 255034 - DNA, 747 bp, Artificial Sequence
  derived and/or modified sequence
atggccgccggcttcaagaccgtggagcccctggagtactaccggcgcttcctgaaggaaaattgtcgacccgacgggagagaattaggggaatttcgaaccaccaccgtcaatatcggtagcatctctactgcagatgggtccgcattagtgaagcttggtaatacgactgtcatatgcggcgtgaaagcgtttagatctgggcctcccggtgaagaggcacaggtagcctcgcaattcatcgccgacgtgattgaaaactcacagatcatccaaaaggaggacctctgcatctccccggggaagctggtgtgggtactctattgcgatctgatctgcctcgattacgatggtaacatcctcgatgcgtgcacttttgccctgctagcagcactgaagaatgtgcaactaccagaggtgacaataaacgaggagacagcgctcgctgaggtcaatcttaagaagaagtcttacctgaacattaggacacatccggtggccaccagtttcgcagtgttcgacgatacactactgattgttgatccaaccggcgaggaagagcatctggcgaccggaactcttaccatcgttatggatgaagagggcaagctgtgttgtctccataagccaggaggatcaggcttaacaggcgctaagctgcaagactgcatgtcacgagctgtgactaggcataaagaggttaaaaaactgatggacgaggtgataaagtctatgaaaccaaaatag

SEQ ID NO: 255035 - DNA, 831 bp, Artificial Sequence
  derived and/or modified sequence
atggccgccggcttcaagaccgtggagcccctggagtactaccggagatttttgaaggaaaactgccgccccgacggtcgcgaactgggggagtttaggacaacaacggtgaacatagggtccataagcaccgcggatgggagtgccttagtgaaactaggcaatacgacggtgatttgtggagtgaaagccgagtttgcagcaccatctactgatgcgcctgacaaaggctacgtcgtgccgaatgtggacctgccccccctgtgtagctccagatttcgttcgggacctcccggcgaagaagctcaggtcgcatcccagtttatcgctgatgttattgagaattcgcaaatcatccaaaaagaggatctttgtataagtcccggaaagctggtctgggtcttatactgcgacctcatctgtctggactacgatggcaatatcctggacgcatgcaccttcgcactcctggccgctcttaaaaacgtccagctgccagaggtgacaatcaatgaagagaccgccttagctgaagtgaacctgaagaagaaaagctatctcaatattcggactcatccagtggcaacatcctttgctgtttttgatgacaccctcctaattgtcgatcccacaggggaggaggagcatttagcgacggggacgcttacaattgtcatggacgaagaaggcaaactgtgctgcctccataaacccggggggtcggggctgaccggtgcaaagctgcaggactgcatgagtagagcagtgactcggcacaaggaagtaaagaaactcatggatgaggtcattaagtccatgaaaccaaagtag

SEQ ID NO: 255036 - DNA, 747 bp, Artificial Sequence
  derived and/or modified sequence
atggctgccggtttcaaaaccgtggaacctttagaatattacagaaggttcctcaaggagaattgcagacccgacggcagggagttaggtgagtttagaactactactgtcaacatcggatccatcagtacagcggacggttccgcactggtaaagcttggcaacaccactgtgatctgtggcgtcaaggctttccggtctggtcctccgggtgaggaggcccaagtagcctcacaatttatagccgatgttattgaaaacagtcagatcatccaaaaagaggatctttgcatctcacccggaaagctggtctgggtgctctattgtgaccttatctgtttagattatgatggcaacatcctggatgcctgcacattcgcgctgttggccgcactcaagaacgtccagctcccagaagtgactatcaacgaagagaccgctttagccgaagtgaatttgaagaagaaatcttatctcaatatcaggacccatccagtggcaacgtccttcgccgtgtttgacgataccctcctcatcgtagaccccacgggagaggaagagcatctggctactggcacactgaccatcgtaatggacgaggagggcaagttgtgttgtcttcataaaccgggtggctccgggctcaccggcgctaaacttcaggactgcatgagccgagcagtgactagacacaaggaagtgaaaaaattgatggacgaggtcattaagtcaatgaagcctaaatag

SEQ ID NO: 255037 - DNA, 831 bp, Artificial Sequence
  derived and/or modified sequence
atggccgctggcttcaaaacagtggaacccctggaatactatcggagatttttgaaggagaactgccgacctgacggtcgggagctcggcgaatttagaactacaaccgtgaacatcgggtctatcagcaccgccgatgggtcagccttagtgaagctgggcaataccacagtgatctgcggggtaaaggcggagtttgctgctccatcaacagatgcccctgacaaaggctacgtagtacccaacgtggatctgccaccattatgcagttcacggtttagatctggcccacctggggaagaggcacaggtggcatctcaatttatcgcagacgtaatcgaaaactctcagattatccagaaggaggacctctgcatctcacctggcaagctggtgtgggtgctgtattgtgacctgatttgtctggactacgacggcaacatcttggatgcctgtacgtttgcactactggcagcactgaaaaatgttcagctcccagaagtcacgataaacgaggaaacagcacttgccgaggtcaacctaaaaaaaaagtcatacctgaacatacggacacatcccgtcgccacctcctttgccgtgtttgacgataccctgcttatcgtggacccgactggggaagaggagcacctcgccacaggcaccttaacaattgtgatggatgaggaggggaaattgtgttgtctccataaaccaggcggtagtggtctgacaggggcaaaacttcaagattgcatgagcagggcagtcacacggcataaagaagttaagaagctgatggatgaagttatcaaatctatgaagcccaagtag

SEQ ID NO: 255038 - DNA, 747 bp, Artificial Sequence
  derived and/or modified sequence
atggccgccggcttcaagaccgtggagcccctggagtactacagaagattcctgaaggagaactgcagacccgacggcagagagctgggcgagttcagaaccaccaccgtgaacatcggcagcatcagcaccgccgacggcagcgccctggtgaagctgggcaacaccaccgtgatctgcggcgtgaaggccttcagaagcggcccccccggcgaggaggcccaggtggccagccagttcatcgccgacgtgatcgagaacagccagatcatccagaaggaggacctgtgcatcagccccggcaagctggtgtgggtgctgtactgcgacctgatctgcctggactacgacggcaacatcctggacgcctgcaccttcgccctgctggccgccctgaagaacgtgcagctgcccgaggtgaccatcaacgaggagaccgccctggccgaggtgaacctgaagaagaagagctacctgaacatcagaacccaccccgtggccaccagcttcgccgtgttcgacgacaccctgctgatcgtggaccccaccggcgaggaggagcacctggccaccggcaccctgaccatcgtgatggacgaggagggcaagctgtgctgcctgcacaagcccggcggcagcggcctgaccggcgccaagctgcaggactgcatgagcagagccgtgaccagacacaaggaggtgaagaagctgatggacgaggtgatcaagagcatgaagcccaagtag

SEQ ID NO: 255039 - DNA, 831 bp, Artificial Sequence
  derived and/or modified sequence
atggccgccggcttcaagaccgtggagcccctggagtactacagaagattcctgaaggagaactgcagacccgacggcagagagctgggcgagttcagaaccaccaccgtgaacatcggcagcatcagcaccgccgacggcagcgccctggtgaagctgggcaacaccaccgtgatctgcggcgtgaaggccgagttcgccgcccccagcaccgacgcccccgacaagggctacgtggtgcccaacgtggacctgccccccctgtgcagcagcagattcagaagcggcccccccggcgaggaggcccaggtggccagccagttcatcgccgacgtgatcgagaacagccagatcatccagaaggaggacctgtgcatcagccccggcaagctggtgtgggtgctgtactgcgacctgatctgcctggactacgacggcaacatcctggacgcctgcaccttcgccctgctggccgccctgaagaacgtgcagctgcccgaggtgaccatcaacgaggagaccgccctggccgaggtgaacctgaagaagaagagctacctgaacatcagaacccaccccgtggccaccagcttcgccgtgttcgacgacaccctgctgatcgtggaccccaccggcgaggaggagcacctggccaccggcaccctgaccatcgtgatggacgaggagggcaagctgtgctgcctgcacaagcccggcggcagcggcctgaccggcgccaagctgcaggactgcatgagcagagccgtgaccagacacaaggaggtgaagaagctgatggacgaggtgatcaagagcatgaagcccaagtag

SEQ ID NO: 255040 - protein, 454 aa, Artificial Sequence
  derived and/or modified sequence
MYNTVWNMEDLDLEYAKTDINCGTDLMFYIEMDPPALPPKPPKPTTVANNGMNNNMSLQDAEWYWGDISREEVNEKLRDTADGTFLVRDASTKMHGDYTLTLRKGGNNKLIKIFHRDGKYGFSDPLTFSSVVELINHYRNESLAQYNPKLDVKLLYPVSKYQQDQVVKEDNIEAVGKKLHEYNTQFQEKSREYDRLYEEYTRTSQEIQMKRTAIEAFNETIKIFEEQCQTQERYSKEYIEKFKREGNEKEIQRIMHNYDKLKSRISEIIDSRRRLEEDLKKQAAEYREIDKRMNSIKPDLIQLRKTRDQYLMWLTQKGVRQKKLNEWLGNENTEDQYSLVEDDEDLPHHDEKTWNVGSSNRNKAENLLRGKRDGTFLVRESSKQGCYACSVVVDGEVKHCVINKTATGYGFAEPYNLYSSLKELVLHYQHTSLVQHNDSLNVTLAYPVYAQQRR

SEQ ID NO: 255041 - DNA, 1365 bp, Artificial Sequence
  derived and/or modified sequence
atgtacaacaccgtgtggaacatggaggacctggacctggagtacgccaagaccgacatcaactgcggcaccgacctgatgttctacatcgagatggacccccccgccctgccccccaagccccccaagcccaccaccgtggccaacaacggcatgaacaacaacatgagcctgcaggacgccgagtggtactggggcgacatcagcagagaggaggtgaacgagaagctgagagacaccgccgacggcaccttcctggtgagagacgccagcaccaagatgcacggcgactacaccctgaccctgagaaagggcggcaacaacaagctgatcaagatcttccacagagacggcaagtacggcttcagcgaccccctgaccttcagcagcgtggtggagctgatcaaccactacagaaacgagagcctggcccagtacaaccccaagctggacgtgaagctgctgtaccccgtgagcaagtaccagcaggaccaggtggtgaaggaggacaacatcgaggccgtgggcaagaagctgcacgagtacaacacccagttccaggagaagagcagagagtacgacagactgtacgaggagtacaccagaaccagccaggagatccagatgaagagaaccgccatcgaggccttcaacgagaccatcaagatcttcgaggagcagtgccagacccaggagagatacagcaaggagtacatcgagaagttcaagagagagggcaacgagaaggagatccagagaatcatgcacaactacgacaagctgaagagcagaatcagcgagatcatcgacagcagaagaagactggaggaggacctgaagaagcaggccgccgagtacagagagatcgacaagagaatgaacagcatcaagcccgacctgatccagctgagaaagaccagagaccagtacctgatgtggctgacccagaagggcgtgagacagaagaagctgaacgagtggctgggcaacgagaacaccgaggaccagtacagcctggtggaggacgacgaggacctgccccaccacgacgagaagacctggaacgtgggcagcagcaacagaaacaaggccgagaacctgctgagaggcaagagagacggcaccttcctggtgagagagagcagcaagcagggctgctacgcctgcagcgtggtggtggacggcgaggtgaagcactgcgtgatcaacaagaccgccaccggctacggcttcgccgagccctacaacctgtacagcagcctgaaggagctggtgctgcactaccagcacaccagcctggtgcagcacaacgacagcctgaacgtgaccctggcctaccccgtgtacgcccagcagagaagatag

SEQ ID NO: 255042 - DNA, 1365 bp, Artificial Sequence
  derived and/or modified sequence
atgtataatactgtatggaacatggaagacttggatctggaatacgcgaaaacagacataaactgcggcaccgacctgatgttctatattgaaatggatccacctgcccttccgccaaaacccccaaagcctactactgtggcaaacaacggaatgaacaacaacatgtcattgcaggatgctgagtggtactggggcgacataagtagagaggaagtaaacgaaaagctccgagacacagcagacgggacatttcttgtgcgcgacgcctccactaagatgcacggggattacaccctaactctgcggaagggtggcaacaacaagttgataaagatttttcatcgtgacgggaaatatggctttagcgatccacttacattttcctcagtggtcgaactgattaatcattataggaatgaatcactggctcaatacaatcccaagttggatgtgaaattgctctatcctgtctctaaatatcagcaagaccaggtcgtcaaggaggataacatagaagccgtaggcaaaaagctccacgagtataacacccagttccaggagaaatccagggagtacgacagactctacgaagagtacactcgcacttctcaagaaatccagatgaaacgaactgcaattgaagccttcaacgaaacaatcaagatcttcgaagaacagtgccaaacacaggaacgctatagcaaggagtatatcgaaaaatttaaaagagagggaaacgagaaggagatccagcggatcatgcataattacgacaagctcaaatcaagaatcagcgagatcatcgacagcagacggaggctggaggaggacctcaaaaaacaagccgccgagtaccgggaaatagacaaaagaatgaactcaatcaagccagacttaatccagttgcgaaaaacaagagatcagtatctaatgtggttaactcagaagggggtccggcagaaaaagctgaacgagtggctcggtaatgaaaatacagaagatcagtacagccttgtagaagatgacgaggatctcccccaccatgacgagaaaacatggaacgtgggttctagcaacaggaataaggctgagaacctccttcgcggcaagcgggatggaacttttcttgttcgagagagttccaagcagggctgttatgcatgttcagttgtcgtggatggcgaagtaaagcattgtgtcattaacaagactgcaactggctacggatttgcagaaccctataacctatatagctccttgaaggagcttgtgctacattaccagcacacctcactggtgcagcacaacgattctcttaacgtgactctcgcatatcctgtttacgcccagcagcgcagatag

SEQ ID NO: 255043 - DNA, 1365 bp, Artificial Sequence
  derived and/or modified sequence
atgtacaacacagtgtggaacatggaggacctggacctggagtatgccaagacagacatcaactgtggcacagacctgatgttctacatcgagatggaccccccagccctgccccccaagccacccaagcccaccaccgtggccaacaacggcatgaacaacaacatgagcctgcaggatgctgagtggtactggggagacatcagccgggaggaggtgaatgagaagctgcgggacacagcagatggcaccttcctggtgagagatgccagcaccaagatgcatggagactacaccctgaccctgaggaagggcggcaacaacaagctgatcaagatcttccacagagatggcaagtatggcttcagtgaccccctgaccttcagctctgtggtggagctgatcaaccactacagaaatgaaagcctggcccagtacaaccccaagctggatgtgaagctgctgtaccctgtgtccaagtaccagcaggaccaggtggtgaaggaggacaacatcgaggccgtgggcaagaagctgcacgagtacaacacccagttccaggagaagagccgggagtatgaccggctgtatgaggagtacaccaggaccagccaggagatccagatgaagaggacagccatcgaggccttcaatgagaccatcaagatctttgaggagcagtgccagacccaggagcgctacagcaaggagtacatcgagaagttcaagcgggagggcaatgagaaggagatccagaggatcatgcacaactatgacaagctgaagagccgcatcagcgagatcatcgacagcagaagaaggctggaggaggacctgaagaagcaggccgctgagtaccgggagattgacaagaggatgaacagcatcaagccagacctgatccagctgaggaagacccgggaccagtacctgatgtggctgacccagaagggcgtgcggcagaagaagctgaatgagtggctgggcaatgaaaatacagaggaccagtacagcctggtggaggatgatgaggacctgccccaccatgatgagaagacctggaatgtgggcagcagcaacagaaacaaggccgagaacctgctgcggggcaagagagatggcaccttcctggtgcgggagagcagcaagcagggctgctacgcctgcagcgtggtggtggatggagaggtgaagcactgcgtcatcaacaagacagccaccggctacggctttgctgagccctacaacctgtacagcagcctgaaggagctggtgctgcactaccagcacaccagcctggtgcagcacaatgacagcctgaatgtgaccctggcctaccctgtgtatgcccagcagaggaggtag

SEQ ID NO: 255044 - DNA, 1365 bp, Artificial Sequence
  derived and/or modified sequence
atgtacaacaccgtgtggaacatggaggacctggacctggagtacgccaaaaccgacatcaattgcggaacagaccttatgttttatatcgaaatggatccgcccgcattgccacccaagccgccgaagccaactactgtggcgaacaacgggatgaataacaacatgagtctgcaggacgccgaatggtactggggggacatcagtagagaagaggtcaatgagaagctacgcgacaccgccgatgggacattcctggtgcgggatgccagcactaagatgcacggagactatacattaaccctgagaaagggcgggaataataagctgatcaagatctttcacagggacggtaaatacggcttcagtgatccactcaccttctcctctgttgtggagctgatcaatcactataggaacgagtcccttgcccagtataatccaaagcttgacgttaagctgctgtacccagtgtctaaatatcagcaggaccaagtggtaaaagaagataacattgaggcggtcggcaaaaagctccacgagtataacacacagtttcaggaaaagtctagggaatacgaccgcctgtatgaggaatacaccaggaccagtcaggagatacagatgaaacggacggctatcgaggcttttaatgaaacgattaaaatctttgaagaacaatgccagacgcaggagagatactccaaagaatacatagaaaagttcaagcgagaaggaaatgagaaagaaatccaacggattatgcacaactacgataaactgaagagcaggatttccgaaatcattgattcccggcggcgattggaagaagaccttaagaagcaggccgcggagtaccgcgagattgacaagcgaatgaactccatcaaaccagacttgatccagctgcgcaaaaccagagaccaatacctcatgtggctgacccagaaaggcgtgcgacagaagaagctgaacgagtggcttggcaatgaaaacaccgaggatcagtactcattggtggaagacgacgaagacctgccacatcacgacgagaaaacatggaatgtcggcagctcaaatcgtaacaaggctgagaaccttcttagggggaagagagatggcacattcctcgtaagagagtctagtaagcaggggtgctacgcgtgctccgtggtggtcgacggagaggtgaagcactgtgtcatcaataaaaccgcaaccggatatggttttgctgagccgtacaacttgtactcttctctcaaggagcttgtcctgcactatcagcatacatcgcttgttcagcacaatgactcgttaaacgtgacactcgcgtaccctgtctacgcgcaacaaaggcggtag

SEQ ID NO: 255045 - DNA, 1365 bp, Artificial Sequence
  derived and/or modified sequence
atgtacaatactgtgtggaatatggaagatttggaccttgaatacgccaaaacagacatcaattgtggcaccgatctgatgttctatattgaaatggatcctccagctctgccgccaaagccccctaagccaactactgtggcaaacaatggtatgaataataatatgtccctgcaagacgccgagtggtactggggggacattagtcgggaagaagttaacgagaagctaagagacacagcagacggtaccttcctggttcgcgacgccagcaccaagatgcacggcgattacacactgaccctgaggaaaggcggtaataacaagttaatcaaaatatttcatagggacggtaaatacggcttttcagaccccctgacgtttagcagtgtcgttgagctcattaatcattaccgcaatgaatcactcgcacagtataatcccaaactagatgtcaaattgctctatcccgtctccaaataccagcaggatcaagtggtaaaggaagacaatatcgaggcagtgggcaagaagctgcacgagtacaatacccagttccaagagaaatccagggaatacgaccgtctgtacgaggagtacaccagaactagccaggaaattcagatgaaaagaacagccatcgaggcattcaacgaaaccataaagatctttgaagagcagtgccagacccaggagcgatatagtaaggaatacatcgaaaaattcaagagggagggcaacgagaaagagattcagaggataatgcacaactatgataaactgaaatctcgcatcagcgaaataatagatagccgtcgcaggctggaagaagatctaaagaagcaggccgctgaatatagagaaattgataagcgaatgaattcgataaagcccgacctcattcagttgcgcaaaacccgagatcaatacttgatgtggctgactcagaagggcgtgaggcagaaaaaactaaatgagtggctgggtaatgagaataccgaggaccagtacagcctggtcgaggacgatgaagatctccctcatcacgatgagaagacttggaacgtcggcagttctaatcggaataaggctgaaaatctcttaagaggcaaacgcgacggaacttttcttgtgagggaatcctcaaaacagggctgttacgcgtgttctgttgttgtggacggggaggtgaagcactgcgtcattaataagaccgcgacaggctatggattcgcggagccgtacaacctctactcgagtttgaaggaactcgtgctccactatcaacatacaagcttagttcagcacaatgactccctaaatgtgactcttgcttaccctgtctacgcccagcagcggcgatag

SEQ ID NO: 255046 - DNA, 2439 bp, Artificial Sequence
  derived and/or modified sequence
tataggttttaaaatgaattccaagacaccattacaaagaaagccggactcttttcttataactgagctcagccaaggaaactcttgcacaaatgtacaatactgtttggaatatggaagacctggatttagaatatgccaagacagatataaattgtggcacagacttgatgttttatatagaaatggacccaccagcactgcctcctaaaccaccaaaacctactactgtagccaacaacggtatgaataacaatatgtccttacaagatgctgaatggtactggggagatatctcgagggaagaagtgaatgaaaaacttcgagatacagcagacgggacctttttggtacgagatgcgtctactaaaatgcatggtgattatactcttacactaaggaaagggggaaataacaaattaatcaaaatatttcatcgagatgggaaatatggcttctctgacccattaaccttcagttctgtggttgaattaataaaccactaccggaatgaatctctagctcagtataatcccaaattggatgtgaaattactttatccagtatccaaataccaacaggatcaagttgtcaaagaagataatattgaagctgtagggaaaaaattacatgaatataacactcagtttcaagaaaaaagtcgagaatatgatagattatatgaagaatatacccgcacatcccaggaaatccaaatgaaaaggacagctattgaagcatttaatgaaaccataaaaatatttgaagaacagtgccagacccaagagcggtacagcaaagaatacatagaaaagtttaaacgtgaaggcaatgagaaagaaatacaaaggattatgcataattatgataagttgaagtctcgaatcagtgaaattattgacagtagaagaagattggaagaagacttgaagaagcaggcagctgagtatcgagaaattgacaaacgtatgaacagcattaaaccagaccttatccagctgagaaagacgagagaccaatacttgatgtggttgactcaaaaaggtgttcggcaaaagaagttgaacgagtggttgggcaatgaaaacactgaagaccaatattcactggtggaagatgatgaagatttgccccatcatgatgagaagacatggaatgttggaagcagcaaccgaaacaaagctgaaaacctgttgcgagggaagcgagatggcacttttcttgtccgggagagcagtaaacagggctgctatgcctgctctgtagtggtggacggcgaagtaaagcattgtgtcataaacaaaacagcaactggctatggctttgccgagccctataacttgtacagctctctgaaagaactggtgctacattaccaacacacctcccttgtgcagcacaacgactccctcaatgtcacactagcctacccagtatatgcacagcagaggcgatgaagcgcttactctttgatccttctcctgaagttcagccaccctgaggcctctggaaagcaaagggctcctctccagtctgatctgtgaattgagctgcagaaacgaagccatctttctttggatgggactagagctttctttcacaaaaaagaagtaggggaagacatgcagcctaaggctgtatgatgaccacacgttcctaagctggagtgcttatcccttctttttctttttttctttggtttaatttaaagccacaaccacatacaacacaaagagaaaaagaaatgcaaaaatctctgcgtgcagggacaaagaggcctttaaccatggtgcttgttaatgctttctgaagctttaccagctgaaagttgggactctggagagcggaggagagagaggcagaagaaccctggcctgagaaggtttggtccagcctggtttagcctggatgttgctgtgcacggtggacccagacacatcgcactgtggattatttcattttgtaacaaatgaacgatatgtagcagaaaggcacgtccactcacaagggacgctttgggagaatgtcagttcatgtatgttcagaagaaattctgtcatagaaagtgccagaaagtgtttaacttgtcaaaaaacaaaaacccagcaacagaaaaatggagtttggaaaacaggacttaaaatgacattcagtatataaaatatgtacataatattggatgactaactatcaaatagatggatttgtatcaataccaaatagcttctgttttgttttgctgaaggctaaattcacagcgctatgcaattcttaattttcattaagttgttatttcagttttaaatgtaccttcagaataagcttccccaccccagtttttgttgcttgaaaatattgttgtcccggatttttgttaatattcatttttgttatccttttttaaaagtaaatgtacaggatgccagtaaaaaaaaaaaa

SEQ ID NO: 255047 - DNA, 507 bp, Artificial Sequence
  derived and/or modified sequence
atgctgttcagactgagcgagcacagcagccccgaggaggaggccagcccccaccagagagccagcggcgagggccaccacctgaagagcaagagacccaacccctgcgcctacaccccccccagcctgaaggccgtgcagagaatcgccgagagccacctgcagagcatcagcaacctgaacgagaaccaggccagcgaggaggaggacgagctgggcgagctgagagagctgggctaccccagagaggaggacgaggaggaggaggaggacgacgaggaggaggaggaggaggaggacagccaggccgaggtgctgaaggtgatcagacagagcgccggccagaagaccacctgcggccagggcctggagggcccctgggagagacccccccccctggacgagagcgagagagacggcggcagcgaggaccaggtggaggaccccgccctgagcgagcccggcgaggagccccagagacccagccccagcgagcccggcacctag

SEQ ID NO: 255048 - DNA, 507 bp, Artificial Sequence
  derived and/or modified sequence
atgctgttccgcctctccgaacactccagtcctgaagaagaggcatcacctcatcagcgcgcctcaggtgaaggtcatcacttaaagtccaagcgccccaacccttgcgcgtatacaccaccttccttgaaagccgtccaacgtatcgcagagagccacctgcagtctatttcaaacctcaatgaaaaccaggcatcagaggaggaggacgaactcggtgaattaagggaactcggatatccgcgagaggaggacgaggaggaggaagaagacgacgaggaagaagaagaggaggaagatagccaggctgaagttctcaaggtgatccggcagagcgccggccagaaaaccacctgcggccaaggcctagagggcccttgggagaggcctccccctctggacgagtctgagagagacggcggcagtgaagaccaagtcgaggatcctgcattgtctgagcccggtgaagaaccgcagcgcccctccccctccgaaccagggacttag

SEQ ID NO: 255049 - DNA, 507 bp, Artificial Sequence
  derived and/or modified sequence
atgctgttccgtctgtcggagcattcctcccctgaggaagaggcatcaccacaccagcgcgcctctggggagggacatcaccttaagtcaaagaggcccaatccctgcgcctatacaccaccttcattgaaggccgtacaaaggatcgccgagtctcatcttcagagcattagtaacctgaatgagaaccaagcatcagaagaggaggatgaattgggcgaactgagggaactcggttatcctcgggaggaagacgaggaggaggaggaagatgacgaagaggaggaggaagaggaagattcccaggccgaagtcctaaaagtcattagacaatcagccggccagaaaacgacatgtggccaaggccttgaggggccctgggagcgccccccccctcttgacgagtctgaaagggacggagggtcagaggatcaggtggaagacccagctctgtccgagccgggtgaagagccacagagacctagcccgagcgagcccggcacctag

SEQ ID NO: 255050 - DNA, 507 bp, Artificial Sequence
  derived and/or modified sequence
atgctgttccggctgtctgagcacagcagccctgaggaggaggccagcccccaccagagggccagcggggagggccaccacctgaagagcaagaggcccaacccctgtgcctacaccccacccagcctgaaggctgtgcagagaattgctgagagccacctgcagagcatcagcaacctgaatgaaaaccaggccagcgaggaggaggatgagctgggggagctgcgggagctgggctacccccgggaggaggatgaggaggaggaggaggatgatgaggaggaggaggaggaggaggacagccaggccgaggtgctgaaggtgatccggcagagcgctggccagaagaccacctgtggccagggcctggagggcccctgggagcggcccccacccctggatgagagcgagagagatggcggcagcgaggaccaggtggaggaccctgccctgtctgagcccggggaggagccccagaggcccagccccagcgagcccggcacctag

SEQ ID NO: 255051 - DNA, 507 bp, Artificial Sequence
  derived and/or modified sequence
atgctgttccggctgagcgagcacagcagccccgaggaggaggccagcccgcatcagagagcctccggagaggggcaccacctgaagagcaaaaggccgaatccatgtgcttacacgccacctagtctgaaagcagtccagcgcattgcagaaagccatctccaaagcatctccaacttgaacgagaatcaggctagcgaggaggaagatgagttgggtgagttgcgcgagctaggctatccaagggaggaggatgaggaggaggaggaggatgacgaggaagaggaagaggaggaagatagccaggcagaggtgcttaaggttattcgtcaatccgccgggcagaagacgacctgtggccagggtctggagggaccttgggaaaggccgcctcccttagatgagtcagaaagggacggcgggtccgaagaccaggtggaagatcccgctctgtccgagccaggggaggaaccccagaggcccagtccaagcgagcccgggacatag

SEQ ID NO: 255052 - DNA, 507 bp, Artificial Sequence
  derived and/or modified sequence
atgctgttccggctgagcgagcacagcagccccgaggaggaggcctcgccgcaccagagagcctcaggcgagggccaccaccttaagagtaagagaccaaatccgtgtgcctacaccccgccatcactgaaagcggtgcagagaatcgctgagtcccatctgcagtctattagtaatctcaacgaaaaccaagcctctgaagaggaagacgagctcggcgaacttcgcgaattaggataccccagggaggaggatgaggaggaagaggaagacgatgaagaagaggaagaggaagaggactcccaggctgaggtgctgaaagtcatcagacaatctgctggacagaaaactacttgtgggcaaggtctcgaggggccctgggagcggccacctcctttggacgagtccgaaagagacgggggttccgaggatcaggtggaggatccggcacttagcgaaccgggcgaagagccgcagcggccctcacccagtgagcccggcacctag

SEQ ID NO: 255053 - DNA, 507 bp, Artificial Sequence
  derived and/or modified sequence
atgctttttagactgtctgagcacagctctccagaggaggaggctagtccccaccagagggctagcggagagggccaccacctgaagtccaaacgtcctaatccatgcgcatataccccaccctccttgaaagctgtgcaacgaatcgcagagagccatctgcagtcgatttctaacttaaatgaaaaccaggcatccgaggaggaggatgagttaggcgagctccgagaattaggttatcctcgggaggaggatgaggaagaggaggaggacgacgaagaggaggaggaggaagaggacagccaggctgaggttttgaaggttatccgacaaagcgccggacagaagactacatgcggtcagggcctcgagggcccttgggaaagaccaccccctttggacgagtctgaaagagatggcggtagtgaggaccaggtggaagatcccgcactcagcgagccaggcgaggaaccacaacgcccttcgccaagcgaacctggaacgtag

SEQ ID NO: 255054 - DNA, 507 bp, Artificial Sequence
  derived and/or modified sequence
atgctgtttaggttgagcgaacacagctccccggaagaggaggccagcccccaccagcgcgcatctggagagggacatcatctgaaaagtaaaagacctaacccttgcgcttacacacccccatccctgaaggcagtacaaagaattgcagagagccacctgcaatcgattagcaatttaaacgagaaccaggcgtctgaagaggaggatgagctaggggaactgagagagcttggctacccacgtgaggaagatgaggaggaggaagaggacgatgaagaggaagaggaggaggaagactctcaggccgaagtgttaaaagtaatacgacagagtgctggacagaagacgacctgtggtcagggacttgagggcccatgggaacgtccaccacctcttgacgagtccgaacgtgacgggggatctgaggaccaagtcgaagaccctgcactatccgagcctggcgaggagccccagagaccctctccctcagagcctggcacatag

SEQ ID NO: 255055 - protein, 1129 aa, Artificial Sequence
  derived and/or modified sequence
MAFVPVIPESYSHVLAEFESLDPLLSALRLDSSRLKCTSIAVSRKWLALGSSGGGLHLIQKEGWKHRLFLSHREGAISQVACCLHDDDYVAVATSQGLVVVWELNQERRGKPEQMYVSSEHKGRRVTALCWDTAILRVFVGDHAGKVSAIKLNTSKQAKAAAAFVMFPVQTITTVDSCVVQLDYLDGRLLISSLTRSFLCDTEREKFWKIGNKERDGEYGACFFPGRCSGGQQPLIYCARPGSRMWEVNFDGEVISTHQFKKLLSLPPLPVITLRSEPQYDHTAGSSQSLSFPKLLHLSEHCVLTWTERGIYIFIPQNVQVLLWSEVKDIQDVAVCRNELFCLHLNGKVSHLSLISVERCVERLLRRGLWNLAARTCCLFQNSVIASRARKTLTADKLEHLKSQLDHGTYNDLISQLEELILKFEPLDSACSSRRSSISSHESFSILDSGIYRIISSRRGSQSDEDSCSLHSQTLSEDERFKEFTSQQEEDLPDQCCGSHGNEDNVSHAPVMFETDKNETFLPFGIPLPFRSPSPLVSLQAVKESVSSFVRKTTEKIGTLHTSPDLKVRPELRGDEQSCEEDVSSDTCPKEEDTEEEKEVTSPPPEEDRFQELKVATAEAMTKLQDPLVLFESESLRMVLQEWLSHLEKTFAMKDFSGVSDTDNSSMKLNQDVLLVNESKKGILDEDNEKEKRDSLGNEESVDKTACECVRSPRESLDDLFQICSPCAIASGLRNDLAELTTLCLELNVLNSKIKSTSGHVDHTLQQYSPEILACQFLKKYFFLLNLKRAKESIKLSYSNSPSVWDTFIEGLKEMASSNPVYMEMEKGDLPTRLKLLDDEVPFDSPLLVVYATRLYEKFGESALRSLIKFFPSILPSDIIQLCHHHPAEFLAYLDSLVKSRPEDQRSSFLESLLQPESLRLDWLLLAVSLDAPPSTSTMDDEGYPRPHSHLLSWGYSQLILHLIKLPADFITKEKMTDICRSCGFWPGYLILCLELERRREAFTNIVYLNDMSLMEGDNGWIPETVEEWKLLLHLIQSKSTRPAPQESLNGSLSDGPSPINVENVALLLAKAMGPDRAWSLLQECGLALELSEKFTRTCDILRIAEKRQRALIQSMLEKCDRFLWSQQA

SEQ ID NO: 255056 - DNA, 3390 bp, Artificial Sequence
  derived and/or modified sequence
atggcttttgtcccagttatcccagaatcttattcccacgtcctggcagaattcgagagccttgaccccctgctcagcgccctccggttagattctagcaggctgaagtgcaccagcatcgccgtcagccggaagtggcttgctcttggcagtagtggtggtggcctgcacctgattcagaaggagggttggaagcaccgattgttcctatctcaccgtgaaggagctatctcccaggtggcatgttgcctgcacgacgatgattacgttgctgtggctactagtcaggggctggtggtagtctgggagctgaaccaggaaaggaggggcaagcctgaacaaatgtacgtgagctctgagcacaagggacgtagagtgacggccctgtgctgggataccgcaatcctgcgggtcttcgtgggggatcacgctgggaaggtgagcgctatcaaactgaatacctcaaagcaggcaaaagcggccgctgccttcgtaatgttccccgtacagactataactacggttgactcctgtgtggttcagcttgattacctggatgggcggctgttgataagttctcttacacggtcttttctgtgtgacaccgaacgggaaaaattttggaaaattggcaataaagagcgggatggggagtatggggcatgctttttccctggaagatgctctggaggccaacagccactgatatattgcgcccgtcctggaagccgcatgtgggaagtaaatttcgacggcgaggtgatttccacccaccagttcaagaagctcctgtcactacctccgctcccggtgataaccctgaggtctgaaccacagtatgatcataccgcaggctcctcccagtcactgtcattcccaaaactattacatctctccgaacactgcgtgctcacctggaccgaacggggtatctatatctttattccacagaacgtgcaggtgttgctttggagcgaagtcaaggacatccaggacgtcgccgtctgccgtaatgagctgttctgcctgcacctgaacggtaaggtttcgcatctgtctcttatctccgttgaacggtgcgtcgaacgcctcctcaggaggggcctgtggaacttggccgcacgtacatgctgcctctttcagaacagtgttattgcatctagggcccgtaagaccctcacggccgataaacttgagcaccttaaatcgcagcttgatcatggcacttataacgacctgatctcacagctggaggagctgatattgaaattcgagcccctcgacagcgcttgttcctcgcgacgatcaagcatctcttcacacgagtcttttagtatcttagatagcggcatctatagaattatttcatcacgcagagggtctcagagcgacgaagactcttgctctctacactcccagaccttgtcagaggacgagaggttcaaggagttcacgtcccaacaggaggaggacctgcccgatcagtgttgcggaagccacggaaacgaagataacgtgtctcacgcaccagtcatgttcgaaaccgacaaaaatgaaacctttttgccttttggaatacccctgcccttcaggtccccaagcccactagtgagcctgcaggccgtgaaggagagtgtttcctcatttgtccggaaaactactgagaagatcggtaccttacataccagcccagacctgaaagtcagacctgaattgcggggcgatgaacagagctgcgaggaagatgtttcatcggacacttgccctaaagaggaagatactgaagaagaaaaggaagtgacctcccctccaccggaggaggaccggtttcaggaattgaaggtcgccactgctgaggcaatgaccaaactgcaggacccactagtgctgtttgagagtgaatctttgcggatggtgctgcaagagtggcttagccatctggagaaaaccttcgccatgaaagactttagtggggtgagcgacacagacaactctagcatgaagctgaatcaagatgtgctgctggtgaacgaatccaaaaagggaattctcgatgaagacaatgagaaagagaagagagattctttgggcaatgaagagagcgttgataagaccgcttgtgaatgtgtgaggtcaccacgcgagagtctggatgacttatttcagatatgcagcccatgcgccattgcttcaggactgcggaacgacttggccgagttgactactttgtgtctagagctaaatgtgctaaattcaaaaataaagtcgacaagcggacatgttgatcacactcttcagcaatacagccctgagattttggcctgccagtttcttaaaaagtacttcttcctgctgaacctaaagcgtgccaaggaatccattaagctatcttattctaattccccatctgtgtgggatacattcatcgaaggtcttaaggagatggccagttctaatcccgtatacatggaaatggagaaaggggacttacccactcgacttaaactcctagacgatgaggtcccctttgattcacctctgctcgtggtgtacgcaactcgcctgtacgaaaagtttggagagtctgccctccgatcactgattaagttctttcccagtatacttccgagcgatattatccagctctgtcatcaccacccagcggaattcctcgcatacttagatagtttggtgaagtccagaccagaggaccagaggtctagctttctggagagtctccttcaacccgagagtctgcggctcgattggctccttcttgctgtgagtttagatgccccccctagcacctcgacaatggacgatgagggctatccgaggccccactctcacctgctcagctggggatatagtcaactgatcctgcatctgatcaagcttcccgcagactttatcacgaaagaaaaaatgaccgacatctgcaggtcctgcggcttttggcctgggtatctgatcctgtgcctggagttggaaaggaggcgagaggccttcacaaacatagtctatctgaatgatatgagcctgatggagggtgacaatggctggatccctgagactgtggaggagtggaagcttctcctccacctaatacagtcaaaaagcacgcggcctgcaccccaggagtccttaaacggaagcctatccgatgggccatctcctataaatgtcgaaaacgtggctttgttactcgctaaggccatgggccccgaccgggcctggtctttactgcaggagtgtgggctggcgctcgaactcagcgagaaattcacacggacttgcgatatcctacgcatcgctgaaaagcggcagcgggcactaatccaatctatgctggaaaaatgcgacagatttctctggtcacagcaggcttag

SEQ ID NO: 255057 - DNA, 4491 bp, Artificial Sequence
  derived and/or modified sequence
cgcgaggggagactgaagttcacgttccgctcttagtgcgcggtgagttccccggcgctaagccgggagacaagatccgatctactgagagctgcgaggtactgccctggatgtggtggagctgggctgggacctccgggctgctggtctgtgagcctggctttgaaaattggttactgggtctcctctcaagaaatctcaagatattaaagttactgctgttaaaaaggtgaggaatactgtatctatcattcaacaagtttcagctttctggctaaatggcttttgtgccagtgataccagagtcctacagccatgttcttgcagagtttgaatctctggatccattactctcagccctgcggctggactccagtcgtctaaagtgcacgagcatagctgtgtctcggaaatggttggctttgggcagttcaggaggaggactccatctcattcagaaagaaggctggaagcacaggctttttctttcacacagggaaggtgcaatttctcaagtcgcctgttgtttacatgatgatgattatgttgctgtagctaccagtcaaggtcttgtggttgtttgggaattaaatcaagagcgtcgtgggaaaccggaacaaatgtatgtgtcttcagaacacaaaggccgaagagtcacagctctctgctgggatacagctattcttagagtttttgtaggtgatcatgctgggaaggtttctgctatcaaactcaatacttctaaacaagcaaaggcagctgctgcttttgtgatgtttcctgttcagacaatcacaactgttgactcctgtgttgtacagttagattatttggatggaaggctacttatatcttcacttactcgatccttcttgtgtgacactgagagagaaaagttttggaaaattggaaacaaggaaagagatggagaatatggagcttgtttctttcctggaagatgttctgggggccagcaacctctgatatattgtgctcgcccaggctctaggatgtgggaagtgaactttgatggagaagttataagtacacatcagttcaagaaactcctctcgttgccacctctccctgtgattactctcagatcagaacctcagtatgatcatacagctggatcctcccagtctttgtctttccccaaactcttacatcttagtgagcattgtgtgctgacttggacagaaagaggaatttatattttcattcctcagaatgttcaagttcttctttggagtgaagtcaaagatattcaggatgtggctgtctgtaggaatgaattgttctgtttgcacctaaatgggaaagtctcacatctctccctgatatctgtggagcgctgtgtggaacgcctgctaagaagaggcctatggaacttggctgctcgtacatgctgtcttttccaaaattctgtcattgccagcagagcaagaaaaactttgactgcagataaattggagcatttgaaatctcagctggaccatggcacctacaatgatctaatttctcaactggaagaattgatcttaaaatttgaacctttggattcagcttgtagcagtagaagaagctccatttcatcacatgaaagtttcagcatcttggactctggtatttatcgtatcattagtagtagaagaggcagtcagtcagatgaagactcttgctcccttcacagccaaaccctctcagaagatgagagatttaaagaattcacctcacagcaggaagaggacctgccagatcagtgttgtggctcacacggaaatgaagacaatgtttctcatgctccagtgatgtttgagacagataagaatgaaacttttctcccgttcggcattccattaccatttcgttctccatctcctcttgtgtctcttcaggctgtcaaagaaagtgtttctagctttgtgcgtaaaactactgagaagattggcacccttcacacgagccctgatctgaaagtgagaccagagctcaggggtgatgagcaatcatgtgaagaggatgtgagttcagatacctgcccaaaggaggaagacactgaggaggaaaaagaggtaactagtccacctccagaagaagacaggttccaggagcttaaagtagcaacagcagaagcaatgaccaagctacaggaccctctggttttatttgaatccgagtctctgagaatggttttacaggagtggctttcacatttagaaaaaacatttgccatgaaggacttttcaggtgtttcagatactgacaactcatccatgaaattgaaccaggatgtgctattagttaatgaatcaaaaaagggaatattagatgaagataatgaaaaagaaaaaagggactctttaggcaatgaagaatctgttgataaaacagcatgtgaatgtgtaaggagtccaagggagtctttggatgacctgtttcaaatatgttctccatgcgccattgcaagtggtcttcggaacgacctggctgaattgacaacattatgtttggagttgaatgtattgaattctaagatcaaaagcaccagtggacatgtggaccacactttgcaacagtactctcctgaaattctggcttgccagttcctgaagaagtacttttttctcctgaacttgaaaagagcgaaggagagtatcaagcttagttacagtaatagcccttctgtttgggatacttttattgaaggattgaaagaaatggcaagttccaatcctgtgtatatggagatggaaaaaggagatctaccaacaaggttaaagttactagatgacgaggttccttttgatagtccgttgttggttgtttatgctacccggttgtatgaaaagtttggggagtctgctcttcgatccttaatcaagttctttccatccattttgccatcggatatcatacaactttgtcatcatcatcctgctgagtttttggcctatttagacagtctggtgaaatcaaggcctgaagatcagcggtcatcttttcttgagtcccttctgcaaccagagtctttaaggttggattggctgcttttggcagtgtcccttgatgctccaccaagcaccagcacaatggatgatgaaggttatcccaggcctcattcacacttgctttcctggggttacagtcagctgatccttcatctaattaaacttcctgcagattttataaccaaagagaaaatgacagacatctgcaggtcttgtggtttctggcctggatatctaattctctgtttggagctggagagaagaagagaggccttcaccaatattgtgtatctgaatgatatgagcctgatggaaggggacaatggttggatcccagagaccgtggaggaatggaagcttctccttcatctcatacagagcaagagcacgaggccagccccccaggagtcactaaatgggagcctcagtgatgggccttcccccatcaatgtggagaatgtggcacttctgttagctaaggccatgggcccagatcgggcttggtcactgctacaggaatgtggtctggcccttgagttgtcagagaagtttaccagaacctgcgatatcctgaggattgctgagaaaaggcagagggccttgatacaaagcatgcttgaaaaatgcgatcggtttctctggtcccagcaggcctagtgggagaagattcagcaggatgtcatgacattttgagaaaaactaaatcatgctcctgaaccttctgaacgcatttgttattgaaggaaagacaccacccccaaatcctgccatcttattggggctacttttgtcagtgtctgtacccttggcatcggcatctgtgactctttatccatgacctcagtgtttcttaaccaaagttgtactcagcatttcttaaccaaagttgaattttgaaaagagtcagtccttgtttgctggaattagaatgttaatgtcctagtattattccgaactacagtattaactgcttgttgctagtggattagacagattcttttcttactgtggcttccatgttgggagcagaagcttttcatcctggtcacatgaagacagatggtattattgactggagttgaattatttttatatcttgtctggcacaatatggaaattactgaaataagacggtgtataatggaattaacacccaaaataagtagaacactgaagatttgaatttgatatttaagtaaaatgggactgggtgcagtggctcaggcctgtaatcccaaccctttggaaggtaaagacgggaggatcacttgaggccaggagttcaagaccagcctgggcaacatagtgagaatgcatctctacaaaaaataaaaaaaattagctaggcatagtacctgaggccaggaggtccaggccgcaatgagatgtgtttgtgccattgcacaccagtctgggtgacagagaaagaccctgtctcaaaaacaaattaaataaaatatcttcatatataaattaagct

SEQ ID NO: 255058 - DNA, 4717 bp, Artificial Sequence
  derived and/or modified sequence
cgcgaggggagactgaagttcacgttccgctcttagtgcgcggtgagttccccggcgctaagccgggagacaagatccgatctactgagagctgcgaggtactgccctggatgtggtggagctgggctgggacctccgggctgctggtctgtgagcctggctttgaaaattggttactgggtctcctctcaagaaatctcaagatattaaagttactgctgttaaaaagtgcacgagcatagctgtgtctcggaaatggttggctttgggcagttcaggaggaggactccatctcattcagaaagaaggctggaagcacaggctttttctttcacacagggaaggtgcaatttctcaagtcgcctgttgtttacatgatgatgattatgttgctgtagctaccagtcaaggtcttgtggttgtttgggaattaaatcaagagcgtcgtgggaaaccggaacaaatgtatgtgtcttcagaacacaaaggccgaagagtcacagctctctgctgggatacagctattcttagagtttttgtaggtgatcatgctgggaaggtttctgctatcaaactcaatacttctaaacaagcaaaggcagctgctgcttttgtgatgtttcctgttcagacaatcacaactgttgactcctgtgttgtacagttagattatttggatggaaggctacttatatcttcacttactcgatccttcttgtgtgacactgagagagaaaagttttggaaaattggaaacaaggaaagagatggagaatatggagcttgtttctttcctggaagatgttctgggggccagcaacctctgatatattgtgctcgcccaggctctaggatgtgggaagtgaactttgatggagaagttataagtacacatcagttcaagaaactcctctcgttgccacctctccctgtgattactctcagatcagaacctcagtatgatcatacagctggatcctcccagtctttgtctttccccaaactcttacatcttagtgagcattgtgtgctgacttggacagaaagaggaatttatattttcattcctcagaatgttcaagttcttctttggagtgaagtcaaagatattcaggatgtggctgtctgtaggaatgaattgttctgtttgcacctaaatgggaaagtctcacatctctccctgatatctgtggagcgctgtgtggaacgcctgctaagaagaggcctatggaacttggctgctcgtacatgctgtcttttccaaaattctgtcattgccagcagagcaagaaaaactttgactgcagataaattggagcatttgaaatctcagctggaccatggcacctacaatgatctaatttctcaactggaagaattgatcttaaaatttgaacctttggattcagcttgtagcagtagaagaagctccatttcatcacatgaaagtttcagcatcttggactctggtatttatcgtatcattagtagtagaagaggcagtcagtcagatgaagactcttgctcccttcacagccaaaccctctcagaagatgagagatttaaagaattcacctcacagcaggaagaggacctgccagatcagtgttgtggctcacacggaaatgaagacaatgtttctcatgctccagtgatgtttgagacagataagaatgaaacttttctcccgttcggcattccattaccatttcgttctccatctcctcttgtgtctcttcaggctgtcaaagaaagtgtttctagctttgtgcgtaaaactactgagaagattggcacccttcacacgagccctgatctgaaagtgagaccagagctcaggggtgatgagcaatcatgtgaagaggatgtgagttcagatacctgcccaaaggaggaagacactgaggaggaaaaagaggtaactagtccacctccagaagaagacaggttccaggagcttaaagtagcaacagcagaagcaatgaccaagctacaggaccctctggttttatttgaatccgagtctctgagaatggttttacaggagtggctttcacatttagaaaaaacatttgccatgaaggacttttcaggtgtttcagatactgacaactcatccatgaaattgaaccaggatgtgctattagttaatgaatcaaaaaagggaatattagatgaagataatgaaaaagaaaaaagggactctttaggcaatgaagaatctgttgataaaacagcatgtgaatgtgtaaggagtccaagggagtctttggatgacctgtttcaaatatgttctccatgcgccattgcaagtggtcttcggaacgacctggctgaattgacaacattatgtttggagttgaatgtattgaattctaagatcaaaagcaccagtggacatgtggaccacactttgcaacagtactctcctgaaattctggcttgccagttcctgaagaagtacttttttctcctgaacttgaaaagagcgaaggagagtatcaagcttagttacagtaatagcccttctgtttgggatacttttattgaaggattgaaagaaatggcaagttccaatcctgtgtatatggagatggaaaaaggagatctaccaacaaggttaaagttactagatgacgaggttccttttgatagtccgttgttggttgtttatgctacccggttgtatgaaaagtttggggagtctgctcttcgatccttaatcaagttctttccatccattttgccatcggatatcatacaactttgtcatcatcatcctgctgagtttttggcctatttagacagtctggtgaaatcaaggcctgaagatcagcggtcatcttttcttgagtcccttctgcaaccagagtctttaaggttggattggctgcttttggcagtgtcccttgatgctccaccaagcaccagcacaatggatgatgaaggttatcccaggcctcattcacacttgctttcctggggttacagtcagctgatccttcatctaattaaacttcctgcagattttataaccaaagagaaaatgacagacatctgcaggtcttgtggtttctggcctggatatctaattctctgtttggagctggagagaagaagagaggccttcaccaatattgtgtatctgaatgatatgagcctgatggaaggggacaatggttggatcccagagaccgtggaggaatggaagcttctccttcatctcatacagagcaagagcacgaggccagccccccaggagtcactaaatgggagcctcagtgatgggccttcccccatcaatgtggagaatgtggcacttctgttagctaaggccatgggcccagatcgggcttggtcactgctacaggaatgtggtctggcccttgagttgtcagagaagtttaccagaacctgcgatatcctgaggattgctgagaaaaggcagagggccttgatacaaagcatgcttgaaaaatgcgatcggtttctctggtcccagcaggcctagtgggagaagattcagcaggatgtcatgacattttgagaaaaactaaatcatgctcctgaaccttctgaacgcatttgttattgaaggaaagacaccacccccaaatcctgccatcttattggggctacttttgtcagtgtctgtacccttggcatcggcatctgtgactctttatccatgacctcagtgtttcttaaccaaagttgtactcagcatttcttaaccaaagttgaattttgaaaagagtcagtccttgtttgctggaattagaatgttaatgtcctagtattattccgaactacagtattaactgcttgttgctagtggattagacagattcttttcttactgtggcttccatgttgggagcagaagcttttcatcctggtcacatgaagacagatggtattattgactggagttgaattatttttatatcttgtctggcacaatatggaaattactgaaataagacggtgtataatggaattaacacccaaaataagtagaacactgaagatttgaatttgatatttaagtaaaatgggactgggtgcagtggctcaggcctgtaatcccaaccctttggaaggtaaagacgggaggatcacttgaggccaggagttcaagaccagcctgggcaacatagtgagaatgcatctctacaaaaaataaaaaaaattagctaggcatagtacctgaggccaggaggtccaggccgcaatgagatgtgtttgtgccattgcacaccagtctgggtgacagagaaagaccctgtctcaaaaacaaattaaataaaatatcttcatatataaattaagctaattaaaaatatttttccctgtatttatttaatattttctaatctgaacccatatacagctgactaattcattcttagaaatgtgttatctgtaatctttcctaaacagagtagcccacaagaatcatgcactttttaaaattatttctaagaagccataacaaagctgtgtactaataaagactgcagcaagcacttgtgttatttaaattatgtaagtagattgtcatttgtcaggctcctgtacatttacatagcatgttatattaataataaatgtaaaatatgactaaagttttcattggaacacaatgtagacaggaggtttattatgagcattttgcagaaaggtgtggagtaagtaaagtgttggatgcactgaa

SEQ ID NO: 255059 - DNA, 4147 bp, Artificial Sequence
  derived and/or modified sequence
cgcgaggggagactgaagttcacgttccgctcttagtgcgcgtgcacgagcatagctgtgtctcggaaatggttggctttgggcagttcaggaggaggactccatctcattcagaaagaaggctggaagcacaggctttttctttcacacagggaaggtgcaatttctcaagtcgcctgttgtttacatgatgatgattatgttgctgtagctaccagtcaaggtcttgtggttgtttgggaattaaatcaagagcgtcgtgggaaaccggaacaaatgtatgtgtcttcagaacacaaaggccgaagagtcacagctctctgctgggatacagctattcttagagtttttgtaggtgatcatgctgggaaggtttctgctatcaaactcaatacttctaaacaagcaaaggcagctgctgcttttgtgatgtttcctgttcagacaatcacaactgttgactcctgtgttgtacagttagattatttggatggaaggctacttatatcttcacttactcgatccttcttgtgtgacactgagagagaaaagttttggaaaattggaaacaaggaaagagatggagaatatggagcttgtttctttcctggaagatgttctgggggccagcaacctctgatatattgtgctcgcccaggctctaggatgtgggaagtgaactttgatggagaagttataagtacacatcagttcaagaaactcctctcgttgccacctctccctgtgattactctcagatcagaacctcagtatgatcatacagctggatcctcccagtctttgtctttccccaaactcttacatcttagtgagcattgtgtgctgacttggacagaaagaggaatttatattttcattcctcagaatgttcaagttcttctttggagtgaagtcaaagatattcaggatgtggctgtctgtaggaatgaattgttctgtttgcacctaaatgggaaagtctcacatctctccctgatatctgtggagcgctgtgtggaacgcctgctaagaagaggcctatggaacttggctgctcgtacatgctgtcttttccaaaattctgtcattgccagcagagcaagaaaaactttgactgcagataaattggagcatttgaaatctcagctggaccatggcacctacaatgatctaatttctcaactggaagaattgatcttaaaatttgaacctttggattcagcttgtagcagtagaagaagctccatttcatcacatgaaagtttcagcatcttggactctggtatttatcgtatcattagtagtagaagaggcagtcagtcagatgaagactcttgctcccttcacagccaaaccctctcagaagatgagagatttaaagaattcacctcacagcaggaagaggacctgccagatcagtgttgtggctcacacggaaatgaagacaatgtttctcatgctccagtgatgtttgagacagataagaatgaaacttttctcccgttcggcattccattaccatttcgttctccatctcctcttgtgtctcttcaggctgtcaaagaaagtgtttctagctttgtgcgtaaaactactgagaagattggcacccttcacacgagccctgatctgaaagtgagaccagagctcaggggtgatgagcaatcatgtgaagaggatgtgagttcagatacctgcccaaaggaggaagacactgaggaggaaaaagaggtaactagtccacctccagaagaagacaggttccaggagcttaaagtagcaacagcagaagcaatgaccaagctacaggaccctctggttttatttgaatccgagtctctgagaatggttttacaggagtggctttcacatttagaaaaaacatttgccatgaaggacttttcaggtgtttcagatactgacaactcatccatgaaattgaaccaggatgtgctattagttaatgaatcaaaaaagggaatattagatgaagataatgaaaaagaaaaaagggactctttaggcaatgaagaatctgttgataaaacagcatgtgaatgtgtaaggagtccaagggagtctttggatgacctgtttcaaatatgttctccatgcgccattgcaagtggtcttcggaacgacctggctgaattgacaacattatgtttggagttgaatgtattgaattctaagatcaaaagcaccagtggacatgtggaccacactttgcaacagtactctcctgaaattctggcttgccagttcctgaagaagtacttttttctcctgaacttgaaaagagcgaaggagagtatcaagcttagttacagtaatagcccttctgtttgggatacttttattgaaggattgaaagaaatggcaagttccaatcctgtgtatatggagatggaaaaaggagatctaccaacaaggttaaagttactagatgacgaggttccttttgatagtccgttgttggttgtttatgctacccggttgtatgaaaagtttggggagtctgctcttcgatccttaatcaagttctttccatccattttgccatcggatatcatacaactttgtcatcatcatcctgctgagtttttggcctatttagacagtctggtgaaatcaaggcctgaagatcagcggtcatcttttcttgagtcccttctgcaaccagagtctttaaggttggattggctgcttttggcagtgtcccttgatgctccaccaagcaccagcacaatggatgatgaaggttatcccaggcctcattcacacttgctttcctggggttacagtcagctgatccttcatctaattaaacttcctgcagattttataaccaaagagaaaatgacagacatctgcaggtcttgtggtttctggcctggatatctaattctctgtttggagctggagagaagaagagaggccttcaccaatattgtgtatctgaatgatatgagcctgatggaaggggacaatggttggatcccagagaccgtggaggaatggaagcttctccttcatctcatacagagcaagagcacgaggccagccccccaggagtcactaaatgggagcctcagtgatgggccttcccccatcaatgtggagaatgtggcacttctgttagctaaggccatgggcccagatcgggcttggtcactgctacaggaatgtggtctggcccttgagttgtcagagaagtttaccagaacctgcgatatcctgaggattgctgagaaaaggcagagggccttgatacaaagcatgcttgaaaaatgcgatcggtttctctggtcccagcaggcctagtgggagaagattcagcaggatgtcatgacattttgagaaaaactaaatcatgctcctgaaccttctgaacgcatttgttattgaaggaaagacaccacccccaaatcctgccatcttattggggctacttttgtcagtgtctgtacccttggcatcggcatctgtgactctttatccatgacctcagtgtttcttaaccaaagttgtactcagcatttcttaaccaaagttgaattttgaaaagagtcagtccttgtttgctggaattagaatgttaatgtcctagtattattccgaactacagtattaactgcttgttgctagtggattagacagattcttttcttactgtggcttccatgttgggagcagaagcttttcatcctggtcacatgaagacagatggtattattgactggagttgaattatttttatatcttgtctggcacaatatggaaattactgaaataagacggtgtataatggaattaacacccaaaataagtagaacactgaagatttgaatttgatatttaagtaaaatgggactgggtgcagtggctcaggcctgtaatcccaaccctttggaaggtaaagacgggaggatcacttgaggccaggagttcaagaccagcctgggcaacatagtgagaatgcatctctacaaaaaataaaaaaaattagctaggcatagtacctgaggccaggaggtccaggccgcaatgagatgtgtttgtgccattgcacaccagtctgggtgacagagaaagaccctgtctcaaaaacaaattaaataaaatatcttcatatataaattaagct

SEQ ID NO: 255060 - DNA, 3390 bp, Artificial Sequence
  derived and/or modified sequence
atggcctttgtgcctgtgattcctgagagctacagccacgtgctggccgagtttgagagcctggaccccctgctgagcgccctgcggctggacagcagccggctgaagtgcaccagcattgctgtgtccaggaagtggctggccctgggcagcagcggcggcggcctgcacctgatccagaaggagggctggaagcacaggctcttcctgagccaccgggagggcgccatcagccaggtggcctgctgcctgcatgatgatgattatgtggccgtggccaccagccagggcctggtggtggtgtgggagctgaaccaggagcggcggggcaagccagagcagatgtatgtgtcctctgagcacaagggccggcgggtgacagccctgtgctgggacacagccatcctgcgggtgtttgtgggggaccacgccggcaaggtgtctgccatcaagctgaacaccagcaagcaggccaaggctgctgctgcctttgtgatgtttcctgtgcagaccatcaccaccgtggacagctgtgtggtgcagctggactacctggatggccgcctgctgatcagcagcctgaccaggagcttcctgtgtgacacagagcgggagaagttctggaagattggcaacaaggagagagatggagaatatggagcctgcttcttccctggccgctgcagcggcggccagcagcccctcatctactgtgcccggcccggcagcaggatgtgggaggtgaactttgatggagaggtgatcagcacccaccagttcaagaagctgctgagcctgccccccctgcccgtcatcaccctgcggtctgagccccagtatgaccacacagctggcagcagccagagcctgtccttccccaagctgctgcacctgtctgagcactgtgtgctgacctggacagagcggggcatctacatcttcatcccccagaatgtgcaggtgctgctgtggagcgaggtgaaggacatccaggatgtggccgtgtgcagaaatgagctgttctgcctgcacctgaatggcaaggtgagccacctgagcctcatctctgtggagcgctgtgtggagcggctgctgcggcggggcctgtggaacctggccgcccggacctgctgcctcttccagaacagcgtgattgccagccgggccaggaagaccctgacagctgacaagctggagcacctgaagagccagctggaccacggcacctacaatgacctgatcagccagctggaggagctgatcctgaagtttgagcccctggacagcgcctgcagcagccgccgcagcagcatcagcagccatgagagcttcagcatcctggacagcggcatctaccgcatcatcagcagccggcggggcagccagagtgatgaggacagctgcagcctgcacagccagaccctgtctgaagatgagcgcttcaaggagttcaccagccagcaggaggaggacctgcctgaccagtgctgcggcagccacggcaatgaagataatgtgagccacgcccctgtgatgtttgaaacagacaagaatgagaccttcctgcccttcggcatccccctgcccttccgcagccccagccccctggtgtccctgcaggccgtgaaggagagcgtgagcagctttgtgaggaagaccacagagaagattggcaccctgcacaccagcccagacctgaaggtgcggcctgagctgcggggagatgagcagagctgtgaagaagatgtgtccagtgacacctgccccaaggaggaggacacagaggaggagaaggaggtgaccagccccccaccagaagaagatcgcttccaggagctgaaggtggccacagctgaggccatgaccaagctgcaggaccccctggtgctgtttgaaagtgagagcctgaggatggtgctgcaggagtggctgagccacctggagaagacctttgccatgaaggacttctctggagtgtctgacacagacaacagctccatgaagctgaaccaggatgtgctgctggtgaatgaaagcaagaagggcatcctggatgaggacaatgagaaggagaagagggacagcctgggcaatgaggagagcgtggacaagacagcctgtgaatgtgtgcgcagcccccgggagagcctggatgacctcttccagatctgcagcccctgtgccatcgccagcggcctgagaaatgacctggccgagctgaccaccctgtgcctggagctgaatgtgctgaacagcaagatcaagagcaccagcggccacgtggaccacaccctgcagcagtacagccctgagatcctggcctgccagttcctgaagaagtacttcttcctgctgaacctgaagagggccaaggagagcatcaagctgagctacagcaacagccccagcgtgtgggacaccttcatcgagggcctgaaggagatggccagcagcaaccctgtgtacatggagatggagaagggggacctgcccacccggctgaagctgctggatgatgaggtgccctttgacagccccctgctggtggtgtatgccacccggctgtatgagaagtttggagagagcgccctgcggagcctcatcaagttcttccccagcatcctgcccagcgacatcatccagctgtgccaccaccaccctgctgagttcctggcctacctggacagcctggtgaagagcaggcctgaggaccagaggagcagcttcctggagagcctgctgcagcctgagagcctgcggctggactggctgctgctggccgtgtccctggatgccccacccagcaccagcaccatggatgatgagggctacccccggccccacagccacctgctgtcctggggctacagccagctgatcctgcacctgatcaagctgcctgctgacttcatcaccaaggagaagatgacagacatctgccgcagctgtggcttctggccaggctacctgatcctgtgcctggagctggagaggagaagagaggccttcaccaacatcgtgtacctgaatgacatgagcctgatggagggggacaatggctggatccctgagaccgtggaggagtggaagctgctgctgcacctgatccagagcaagagcaccaggcctgccccccaggagagcctgaatggcagcctgagtgatggccccagccccatcaacgtggagaatgtggccctgctgctggccaaggccatgggccctgaccgggcctggagcctgctgcaggagtgtggcctggccctggagctgtctgagaagttcaccaggacctgtgacatcctgagaattgctgagaagaggcagagggccctgatccagagcatgctggagaagtgtgaccgcttcctgtggagccagcaggcctag

SEQ ID NO: 255061 - DNA, 3390 bp, Artificial Sequence
  derived and/or modified sequence
atggccttcgtgcccgtgatccccgagagctacagccacgtgctggcggagttcgagagcctcgacccactgctttctgcacttcgcctggactcttctaggcttaagtgcacctctattgcagtttcccggaaatggctcgctcttggctcgagcggtggaggcttacacctgattcagaaagaaggctggaaacatagactcttcctctcccacagagagggcgcaatttctcaggttgcgtgttgcttgcatgacgatgactacgtggcagtggccacatctcaaggactggtggtggtgtgggagctcaatcaggagagacggggaaaacccgagcagatgtacgtaagttcagagcataagggacggcgggttacagctctttgctgggatacagcgattctgcgtgtgtttgtgggagatcatgctggtaaagtctcagccatcaaactgaatacaagcaagcaagccaaggccgccgctgcattcgtgatgtttcccgtacagacaatcaccacggttgattcttgcgtcgtacagttagactatctggacgggcgactgctgatttcttcactgacccggtcatttctgtgcgacactgagcgagaaaagttctggaagattgggaataaggagagggacggggagtatggcgcctgcttctttcccggaagatgcagcggaggccagcagcctttgatatattgcgccaggcccggctcccgcatgtgggaggtgaatttcgacggcgaggttatttcaacgcaccagtttaagaaattgttgtccctacctcccttgcctgtgatcaccctgcgctcagagcctcagtacgatcatactgccggctcatctcagtctctgtcgtttccgaagctcctccatctatccgagcactgtgtccttacttggacagagcgcgggatttatatcttcatcccgcagaacgttcaggtgctgctctggagcgaggttaaggatatacaggacgtcgccgtttgtagaaatgaactcttctgtctgcacctcaacggcaaggtgagtcacctgagtcttatctcagttgagcgctgcgtcgaacggctgctccgccgcggcttgtggaatctcgcagcgagaacatgttgcttgtttcaaaactctgttatcgcctccagggctcggaagactctgacagctgacaagctggagcacctcaaaagccagctcgatcatggcacatacaacgatttaatttctcaactcgaggagctaatcctcaagttcgagccgttagacagtgcctgcagcagccgacgatcaagcatcagttcccacgagagcttttcaatactggatagtggtatttatcgaattatttctagccggaggggctcacaaagtgatgaggactcctgctctctgcacagccaaaccctgtctgaagacgagagattcaaagagtttacctcacagcaagaggaagatctccctgatcaatgctgtggaagccatggcaacgaagataatgtctcgcatgctccggtgatgttcgagacagataagaatgaaacattcttgccattcggaataccactcccattccgatccccctcccccctggttagtctgcaagcagtgaaggagagcgtgagctcctttgttcgaaagacaactgagaagattggaacactgcacaccagccctgatctgaaagtgcggcctgagctgagaggagatgaacagtcctgtgaagaagatgtgtcgtccgatacctgtcctaaagaggaggatacagaggaggagaaagaggtaacatcccctccccccgaggaggaccgatttcaggagttgaaggtcgccaccgctgaggccatgacaaagctgcaggatcccctggtactctttgagtccgaaagcttgcggatggtgctgcaggagtggctgtcccacctggagaaaaccttcgccatgaaagacttttcgggagtatcagacactgacaattctagcatgaagctcaaccaggacgtcctactggtcaacgagtcgaagaaaggcatactcgacgaggacaatgagaaagagaagcgcgactccctcggtaacgaagaaagtgtcgataaaactgcctgcgagtgtgtcaggtcaccccgggagagccttgacgatctatttcagatttgttcaccctgcgccatagcatcaggtctgcgtaacgatctggccgaattgaccacgctttgtctggaactaaatgtgctgaactccaaaattaagagcacaagtggccacgtcgaccacaccttgcagcagtacagcccagagattctcgcctgtcagtttttgaaaaaatacttctttctgctgaacctgaagcgagctaaggaatcaataaaacttagctattctaactccccgtctgtctgggatacttttattgagggactcaaagagatggccagcagcaacccagtttacatggagatggagaagggagatctaccaaccagactcaagctcctcgatgacgaagtgccttttgactcacccctgctggtcgtgtacgccacccgcctgtacgaaaagttcggcgagagcgcgctgcgctcactgattaaattttttccgagcatcctgccatcagatattattcagctgtgccaccaccatccggccgaatttcttgcttatcttgacagcttggtgaaaagcagacctgaagaccagagaagttctttcctagagagcttgttgcaaccagaatctttaaggctggattggctgttactggctgttagtcttgatgcacctccttccaccagcactatggacgacgaggggtacccgcgtcctcactctcacctcttgtcctggggttatagtcagcttattctccatctaattaagctgcccgctgatttcattacgaaggaaaaaatgacagacatctgccgctcatgcggcttttggccaggctacttgattctctgtttggagcttgagcgacgcagagaggcattcactaatatcgtttacctcaacgacatgagtctgatggagggagacaatggatggattccagagacagttgaagagtggaagctccttctccatctgatccagagtaagtccactagacctgccccgcaggaatcacttaacggctccctgagtgacggaccctcaccaattaatgtcgaaaacgtcgccctgctactggctaaggctatgggccccgatagagcttggtccctacttcaggaatgtggcctggccctggaactcagcgagaagtttacaaggacctgtgacatcctcagaattgcagaaaaacgccagcgggctctgatccagtcaatgttagagaaatgcgaccggttcctttggtcacaacaagcctag

SEQ ID NO: 255062 - DNA, 3390 bp, Artificial Sequence
  derived and/or modified sequence
atggcatttgtaccagttattcccgagtcctattctcatgtcctggccgagtttgagtctttggacccactattatccgcccttcgactagatagttcaagattgaaatgtacttctattgccgttagccggaaatggctggccctgggtagctcaggaggtggccttcacctgatccagaaggaaggatggaagcaccggctgttcctgagtcaccgggagggggcaatttcccaggtagcttgttgtcttcatgacgatgactatgtggctgtggccacatcgcaggggctggttgtggtttgggagctcaaccaagagcgacgtggtaaaccggaacagatgtatgtgagcagtgagcataaaggcaggcgcgtcaccgcactctgctgggacacagctatccttagagtgtttgttggggaccacgcaggaaaagtgtccgccattaagctgaacactagcaagcaggcaaaggcggctgcggcttttgtgatgttccctgtacaaaccattacaaccgtagactcctgcgtggtccagctggactatctggatggaaggctccttatttcctcattgactagatcctttttatgcgatactgagagggagaagttctggaagatcggaaacaaggaaagggatggggaatatggtgcttgcttcttccccggtaggtgctcaggaggccagcagcccctcatttattgcgccaggcctggttctcgcatgtgggaagtgaatttcgacggagaagtgataagtacgcatcagtttaaaaagctattgtcactcccccctctgccagtgattacccttcgatcagagccgcagtacgatcacacggccggaagctcccagagcttaagctttcctaagttactgcatctgtcagaacactgcgtactgacctggaccgaaagaggcatctacatcttcattccccagaacgtgcaggtgctcctatggagcgaggtcaaggatatacaagatgtcgccgtttgcaggaatgagctgttctgtctccacctaaacggcaaggtgagtcatctgtcattgatttcggtggagaggtgcgtcgagagactgctcaggcggggtctttggaatcttgctgccaggacctgctgcctgtttcagaactctgtgattgcctcacgcgctcgcaaaacacttacagccgacaaactggaacatctaaagagtcaactggatcacggaacttacaacgatctgataagtcagttggaggagctcattctcaagtttgagccactcgattcagcctgctcctccaggcgctcttcaatcagcagccatgagagtttcagcattcttgactcaggcatttacaggataatctctagcaggcgcggaagccagagcgatgaggactcctgttcattgcactctcagaccctcagcgaggacgagaggtttaaggagttcacaagccagcaggaggaggatctgcccgaccagtgctgtggctctcatggcaacgaggacaacgtctcgcacgcccctgttatgtttgagactgacaagaacgagaccttcctgcctttcggaatacctttgccattccgttctccctcccctctggtttcgctccaagccgtaaaggaatccgtgagttccttcgtcaggaaaacaacagagaaaattggcacactgcacacatcccccgatctcaaggttaggccggaactcaggggggatgagcaatcttgtgaggaagacgtgtcgtccgacacttgtcccaaagaggaggatacggaagaggagaaggaggttacgtctcctccaccggaagaggacaggtttcaagagctgaaagttgccactgccgaggcaatgaccaaattgcaggatcctctggtcctctttgaaagcgaatccctccgtatggtgctacaggagtggctgtctcacctggaaaaaacattcgcaatgaaagacttctcgggggtcagcgatacagacaattcatccatgaagcttaatcaggatgttttgctggtcaacgaatccaagaaaggcatcttggatgaagataatgagaaagaaaaaagagacagcctcgggaatgaggagtccgtcgataagaccgcctgtgagtgtgtgcgatctcctcgtgagtctttagacgatcttttccagatttgttcaccttgtgcaatcgcatccggactgagaaacgatctggccgaactgaccacgttgtgccttgaattaaacgtgctgaattccaagattaagtcaacctccggacacgtcgaccatactcttcagcagtattctcctgaaatccttgcctgccaattcctgaagaaatatttcttcttactgaaccttaagcgcgctaaagaatctatcaaacttagttattctaactctccgtctgtctgggacacatttattgagggactgaaagaaatggctagctccaatcccgtctacatggaaatggagaaaggcgatttacctacaagactgaaactcttagacgatgaggtgcctttcgattctccccttcttgttgtctatgctacaagactgtatgagaagttcggcgagtcagcattgagatcgttgataaagtttttcccgagtatcctgccttcggacatcatccagctctgccatcaccaccccgcagaattcctggcatacctggatagtctagtgaagagccgccctgaggaccagcggagctcgttcctggagagtctgctgcagcctgaatccctacgtctggattggctgttattggccgtcagccttgacgctcctccaagcacttccacaatggacgacgaagggtatcccaggcctcattctcacctgctgagctgggggtactcccagctgatcttgcaccttatcaagttaccagctgatttcatcaccaaggagaaaatgaccgatatatgtagatcctgtggtttctggccgggatatttaatactttgccttgagttagagagacgaagggaagcctttaccaacatcgtatacctcaatgatatgtcactgatggaaggagacaatgggtggattccggagacagtcgaggaatggaaactgctgctgcacttaattcagtccaaaagcactaggccggctccgcaggaatcgctgaacggatctctgagcgatggaccgtcaccgatcaatgtagagaacgttgccctcctgttggctaaagccatggggcctgaccgagcctggtccctcttgcaggagtgcggtctggcgctagagctgtcggagaagttcactagaacatgcgacattttgagaatcgccgaaaaacggcagcgcgctctgatccaatcaatgctggaaaagtgtgacaggtttctgtggtcccaacaagcctag

SEQ ID NO: 255063 - DNA, 3390 bp, Artificial Sequence
  derived and/or modified sequence
atggccttcgtgcccgtgatccccgagagctacagccacgtgctggccgagttcgagagcctggaccccctgctgagcgccctgagactggacagcagcagactgaagtgcaccagcatcgccgtgagcagaaagtggctggccctgggcagcagcggcggcggcctgcacctgatccagaaggagggctggaagcacagactgttcctgagccacagagagggcgccatcagccaggtggcctgctgcctgcacgacgacgactacgtggccgtggccaccagccagggcctggtggtggtgtgggagctgaaccaggagagaagaggcaagcccgagcagatgtacgtgagcagcgagcacaagggcagaagagtgaccgccctgtgctgggacaccgccatcctgagagtgttcgtgggcgaccacgccggcaaggtgagcgccatcaagctgaacaccagcaagcaggccaaggccgccgccgccttcgtgatgttccccgtgcagaccatcaccaccgtggacagctgcgtggtgcagctggactacctggacggcagactgctgatcagcagcctgaccagaagcttcctgtgcgacaccgagagagagaagttctggaagatcggcaacaaggagagagacggcgagtacggcgcctgcttcttccccggcagatgcagcggcggccagcagcccctgatctactgcgccagacccggcagcagaatgtgggaggtgaacttcgacggcgaggtgatcagcacccaccagttcaagaagctgctgagcctgccccccctgcccgtgatcaccctgagaagcgagccccagtacgaccacaccgccggcagcagccagagcctgagcttccccaagctgctgcacctgagcgagcactgcgtgctgacctggaccgagagaggcatctacatcttcatcccccagaacgtgcaggtgctgctgtggagcgaggtgaaggacatccaggacgtggccgtgtgcagaaacgagctgttctgcctgcacctgaacggcaaggtgagccacctgagcctgatcagcgtggagagatgcgtggagagactgctgagaagaggcctgtggaacctggccgccagaacctgctgcctgttccagaacagcgtgatcgccagcagagccagaaagaccctgaccgccgacaagctggagcacctgaagagccagctggaccacggcacctacaacgacctgatcagccagctggaggagctgatcctgaagttcgagcccctggacagcgcctgcagcagcagaagaagcagcatcagcagccacgagagcttcagcatcctggacagcggcatctacagaatcatcagcagcagaagaggcagccagagcgacgaggacagctgcagcctgcacagccagaccctgagcgaggacgagagattcaaggagttcaccagccagcaggaggaggacctgcccgaccagtgctgcggcagccacggcaacgaggacaacgtgagccacgcccccgtgatgttcgagaccgacaagaacgagaccttcctgcccttcggcatccccctgcccttcagaagccccagccccctggtgagcctgcaggccgtgaaggagagcgtgagcagcttcgtgagaaagaccaccgagaagatcggcaccctgcacaccagccccgacctgaaggtgagacccgagctgagaggcgacgagcagagctgcgaggaggacgtgagcagcgacacctgccccaaggaggaggacaccgaggaggagaaggaggtgaccagccccccccccgaggaggacagattccaggagctgaaggtggccaccgccgaggccatgaccaagctgcaggaccccctggtgctgttcgagagcgagagcctgagaatggtgctgcaggagtggctgagccacctggagaagaccttcgccatgaaggacttcagcggcgtgagcgacaccgacaacagcagcatgaagctgaaccaggacgtgctgctggtgaacgagagcaagaagggcatcctggacgaggacaacgagaaggagaagagagacagcctgggcaacgaggagagcgtggacaagaccgcctgcgagtgcgtgagaagccccagagagagcctggacgacctgttccagatctgcagcccctgcgccatcgccagcggcctgagaaacgacctggccgagctgaccaccctgtgcctggagctgaacgtgctgaacagcaagatcaagagcaccagcggccacgtggaccacaccctgcagcagtacagccccgagatcctggcctgccagttcctgaagaagtacttcttcctgctgaacctgaagagagccaaggagagcatcaagctgagctacagcaacagccccagcgtgtgggacaccttcatcgagggcctgaaggagatggccagcagcaaccccgtgtacatggagatggagaagggcgacctgcccaccagactgaagctgctggacgacgaggtgcccttcgacagccccctgctggtggtgtacgccaccagactgtacgagaagttcggcgagagcgccctgagaagcctgatcaagttcttccccagcatcctgcccagcgacatcatccagctgtgccaccaccaccccgccgagttcctggcctacctggacagcctggtgaagagcagacccgaggaccagagaagcagcttcctggagagcctgctgcagcccgagagcctgagactggactggctgctgctggccgtgagcctggacgccccccccagcaccagcaccatggacgacgagggctaccccagaccccacagccacctgctgagctggggctacagccagctgatcctgcacctgatcaagctgcccgccgacttcatcaccaaggagaagatgaccgacatctgcagaagctgcggcttctggcccggctacctgatcctgtgcctggagctggagagaagaagagaggccttcaccaacatcgtgtacctgaacgacatgagcctgatggagggcgacaacggctggatccccgagaccgtggaggagtggaagctgctgctgcacctgatccagagcaagagcaccagacccgccccccaggagagcctgaacggcagcctgagcgacggccccagccccatcaacgtggagaacgtggccctgctgctggccaaggccatgggccccgacagagcctggagcctgctgcaggagtgcggcctggccctggagctgagcgagaagttcaccagaacctgcgacatcctgagaatcgccgagaagagacagagagccctgatccagagcatgctggagaagtgcgacagattcctgtggagccagcaggcctag

SEQ ID NO: 255064 - protein, 1015 aa, Artificial Sequence
  derived and/or modified sequence
MYVSSEHKGRRVTALCWDTAILRVFVGDHAGKVSAIKLNTSKQAKAAAAFVMFPVQTITTVDSCVVQLDYLDGRLLISSLTRSFLCDTEREKFWKIGNKERDGEYGACFFPGRCSGGQQPLIYCARPGSRMWEVNFDGEVISTHQFKKLLSLPPLPVITLRSEPQYDHTAGSSQSLSFPKLLHLSEHCVLTWTERGIYIFIPQNVQVLLWSEVKDIQDVAVCRNELFCLHLNGKVSHLSLISVERCVERLLRRGLWNLAARTCCLFQNSVIASRARKTLTADKLEHLKSQLDHGTYNDLISQLEELILKFEPLDSACSSRRSSISSHESFSILDSGIYRIISSRRGSQSDEDSCSLHSQTLSEDERFKEFTSQQEEDLPDQCCGSHGNEDNVSHAPVMFETDKNETFLPFGIPLPFRSPSPLVSLQAVKESVSSFVRKTTEKIGTLHTSPDLKVRPELRGDEQSCEEDVSSDTCPKEEDTEEEKEVTSPPPEEDRFQELKVATAEAMTKLQDPLVLFESESLRMVLQEWLSHLEKTFAMKDFSGVSDTDNSSMKLNQDVLLVNESKKGILDEDNEKEKRDSLGNEESVDKTACECVRSPRESLDDLFQICSPCAIASGLRNDLAELTTLCLELNVLNSKIKSTSGHVDHTLQQYSPEILACQFLKKYFFLLNLKRAKESIKLSYSNSPSVWDTFIEGLKEMASSNPVYMEMEKGDLPTRLKLLDDEVPFDSPLLVVYATRLYEKFGESALRSLIKFFPSILPSDIIQLCHHHPAEFLAYLDSLVKSRPEDQRSSFLESLLQPESLRLDWLLLAVSLDAPPSTSTMDDEGYPRPHSHLLSWGYSQLILHLIKLPADFITKEKMTDICRSCGFWPGYLILCLELERRREAFTNIVYLNDMSLMEGDNGWIPETVEEWKLLLHLIQSKSTRPAPQESLNGSLSDGPSPINVENVALLLAKAMGPDRAWSLLQECGLALELSEKFTRTCDILRIAEKRQRALIQSMLEKCDRFLWSQQA

SEQ ID NO: 255065 - DNA, 3048 bp, Artificial Sequence
  derived and/or modified sequence
atgtacgtaagcagcgaacacaaggggcgccgagtgactgctctgtgttgggataccgcaatcctgagggtgtttgttggggatcatgcaggcaaggtgtctgcaatcaaacttaatacttccaaacaagctaaggctgccgcggcatttgtgatgttccctgtgcagaccatcaccacggtcgattcttgtgtggttcagttggattacctggatggtaggctgctaatctcgagtctaacgaggagttttttgtgcgatacggaacgcgagaaattctggaagattggcaataaagaacgggacggggagtatggcgcctgtttttttcctggaagatgctctggagggcaacaacccctcatttactgcgctcggcctggatcacgcatgtgggaagtcaactttgatggggaagtcatctccacacaccagttcaaaaaattactctctttacctccacttcctgtgatcacactgcgaagcgaacctcagtacgatcataccgcgggcagtagtcagagtctcagctttccgaagttgctgcatctcagtgaacactgcgtgctgacttggacggaacgcgggatctacatctttataccccagaatgtgcaggtcctgttgtggtctgaggtcaaggatatccaggatgtggcagtttgtagaaatgagttgttctgcctccatttgaacggcaaggtttctcacctctccctgattagcgttgagcggtgtgtggaacggctcctgcggagaggcctttggaacctggccgctcggacctgttgcctctttcagaactcagtgatagcatcccgcgctcgtaaaacccttactgccgataagcttgagcatttgaagtcccagctggatcacggcacatacaatgacctcatctctcagctagaggagctaattctgaagtttgaacccctcgattcagcttgcagttcccgcaggtccagtattagttcacacgaatcatttagtattctggattccggaatataccgcataataagctcacgcaggggctcccagtccgacgaagactcatgtagtctgcatagtcaaacactctccgaggatgagaggttcaaggaattcacatctcagcaagaggaggacctacctgaccaatgttgcggctctcatggtaatgaggacaatgtgagccatgcacctgtaatgttcgaaaccgataagaatgagaccttccttccgtttggaatccctctccccttccgcagtccctccccgctagtgtccctgcaagcagttaaggaatctgtgagcagcttcgtgcggaagaccacagaaaaaattggcaccctgcacacaagccctgacttgaaagtgaggcccgaactgcgcggagacgagcaatcctgtgaagaagacgtttcctccgatacttgtcccaaagaagaggatacagaagaagaaaaggaggttacaagcccaccaccagaagaagatcgattccaagagctcaaagtggccaccgccgaggccatgaccaagctccaagaccccttagtgctctttgagtccgaaagtctgcgcatggttcttcaggaatggctgtcacacctcgagaagacctttgccatgaaggattttagtggggttagtgatactgataatagcagtatgaagctgaaccaggatgtgctgttggtcaatgaatccaaaaaaggaatccttgacgaggacaacgagaaagagaagagggacagtctgggcaatgaggagagtgtcgataaaaccgcctgcgaatgtgtgcggtcaccgagagaatctttagacgacttatttcaaatatgctcaccctgcgccattgcttccggactgagaaatgatctcgctgaacttaccaccctttgccttgaactaaacgtgcttaactccaagattaaaagcactagtgggcatgttgaccacacactgcagcagtacagtcccgagatacttgcgtgtcagtttctgaagaaatacttttttttgttgaacctgaagcgggcgaaggagagtattaaactttcttatagtaattctcccagtgtgtgggatacgttcattgaaggccttaaggagatggcctcctctaaccctgtgtatatggaaatggagaagggagacctccccactaggcttaagctgttggacgacgaggtgccatttgattctccactgctggtggtttatgccacgcgcctgtatgagaaattcggcgagagcgcactcaggagtctgattaagtttttcccttctattctgcccagtgacattatccagctgtgtcatcatcacccggccgaattcctagcctacctagactctctcgttaagagtcgtcccgaggaccagcggagtagctttttggagtctctgctacaaccagaatccctcaggctggattggctgctcctcgctgtaagtttggatgcgcctccgagcaccagcactatggacgatgaaggctacccgcgcccccattcccacttgctgagttggggttactctcagctgatcttgcacctcattaagctaccggccgacttcataacaaaagaaaagatgaccgacatttgccgcagctgcggtttctggcctggttatctgatcctgtgcttggagcttgaacggaggcgtgaggctttcactaatatcgtgtatctgaatgacatgtcactgatggagggagacaatgggtggattcctgagacagtcgaagagtggaaactcctgctgcatctgatacagtctaagtccacaagacccgcccctcaggaatccctaaacgggtctctgagcgacggaccaagtcctattaatgtggaaaatgtggcattgctgctggccaaagccatgggacctgatagagcttggtccctactgcaggagtgcggcctggcgctggaattgagtgaaaaattcacacggacttgcgatatccttcggattgctgagaagcgacagcgagcactgatccagtccatgctcgagaaatgtgatcggtttctgtggagccagcaggcctag

SEQ ID NO: 255066 - DNA, 3048 bp, Artificial Sequence
  derived and/or modified sequence
atgtatgtatcctcggaacataagggcagaagggtaaccgctttgtgttgggatacggcaatcctgcgcgtattcgttggggaccacgcaggaaaagtgtctgctataaagttgaatacatctaaacaggctaaagccgcagctgcttttgtgatgttccccgtgcagacgattactacagttgattcttgcgttgtccagttagactatctggacggaagactgctgatctcctccctcacacgctcctttctttgcgatacagagagagaaaagttttggaagatcgggaacaaggaacgcgatggggaatatggggcttgtttctttcccggacgctgtagtggaggccaacaacctcttatttactgtgctcggcccggtagccgaatgtgggaggtgaatttcgacggagaggtgatctctacccatcaatttaaaaagcttctgagtctgcctcctctgcccgtgatcaccctcaggagcgaacctcagtacgatcacacagccggctcatctcagtccctgtcgtttcctaaactgctgcacctgtctgaacattgtgttctgacgtggacagaacgcggtatttatattttcatcccccagaacgtgcaggtgttgctctggtccgaggtgaaagacattcaggatgtggccgtctgtagaaatgaattgttttgcctccatctgaacggaaaggtttcacacctgtccttaatttcggtcgagaggtgcgtcgagcggttgctgagaagggggctctggaatctggccgcccggacttgttgtttatttcagaatagcgttatcgcctccagggcccggaagaccctgacagctgacaagctcgaacatctgaagtcccagctggatcacggcacctacaatgatctgattagtcagctggaggagctgattttgaagtttgagccgctggattccgcctgcagcagccgcagaagctctatttccagccatgaatccttttccattctggactcgggcatctatcgcatcatttcaagcagacgggggtctcaatcagatgaggattcatgctctttgcacagccagacgctgtctgaagacgagcggttcaaagagttcacatctcaacaggaggaagatctgcccgaccagtgctgtggatcacatggaaacgaggacaatgtttctcatgcaccagtgatgttcgagacagacaaaaatgaaacttttctgcctttcggcatcccactgccattcagaagccccagtcctctcgtgagcttgcaagctgtgaaggagtctgtgtcttcctttgtgcgtaaaaccaccgagaagattgggacactgcacacctctccggatctgaaagtgcgtccagaactgagaggggacgaacagtcttgcgaagaagatgtcagcagcgacacctgccccaaagaagaggacactgaggaggaaaaggaagtgaccagcccccccccggaggaggatcgtttccaggagcttaaagtcgcaaccgctgaagccatgactaagctgcaagatcccctcgtgctgtttgaaagcgagagcctgcgaatggtgcttcaggagtggctttctcacttggaaaagactttcgcgatgaaagatttttccggagtgtctgacactgacaattccagcatgaagctcaaccaggacgtgctactcgtgaatgaatctaaaaaaggaatcctagatgaggacaatgaaaaggagaaacgtgactccctgggaaatgaggagagcgtcgacaagaccgcatgcgagtgcgtccgcagcccaagagagtccctggatgacctctttcaaatttgcagcccatgtgcaattgcgagcggactgagaaatgacctggcggaattaactactctttgtttagaacttaatgttctcaactcaaaaataaaatctacaagcggacacgtagaccacaccctgcagcaatactcgccagagatcttagcctgtcagtttctcaagaaatacttctttctgctgaaccttaagagggccaaagagtccatcaaactgtcctatagcaattcccccagcgtgtgggatacctttatcgagggtctgaaagaaatggcctcgtccaacccagtttacatggagatggagaagggcgatctgcctactagactcaagcttctcgatgacgaagtcccctttgatagcccgctgttagtagtttacgccacaaggttgtacgaaaaattcggggagagcgcgcttaggagcctgatcaagtttttcccatcgatcctgcccagtgatataatccaactctgccatcatcatcccgcagagttcttagcctatctggacagcctggtgaagtctcgccccgaggaccagcgctcatctttccttgaaagtctgctccagccggagtctctacgactggactggttactgctcgcagttagcctggatgctcctccatccacaagtacaatggacgacgaaggatacccacgtcctcattcacacctgttgtcttggggctacagccagctgatcctccaccttatcaagttaccggctgattttattaccaaggaaaaaatgaccgacatctgcaggtcatgcggtttttggccagggtaccttatactctgcctcgaactcgagaggaggcgagaggcattcactaatattgtgtatcttaatgacatgtctctgatggagggggataatggatggatccccgagacagtcgaggagtggaaactcttattgcatttaatccagagcaaaagcacaaggccagctccgcaggaatcgttgaatggttcgctctccgatggcccctcacccatcaatgttgagaatgtggcactgctgctggcgaaggctatggggcccgatagagcctggagcctcctgcaggaatgcggcttagccttggagctgtccgagaagtttactagaacctgtgacatcctgcgcattgctgaaaagaggcaaagagctctgattcagtcgatgctagagaagtgcgaccggtttctctggtctcaacaggcgtag

SEQ ID NO: 255067 - DNA, 3048 bp, Artificial Sequence
  derived and/or modified sequence
atgtatgtgtcctctgagcacaagggccggcgggtgacagccctgtgctgggacacagccatcctgcgggtgtttgtgggggaccacgccggcaaggtgtctgccatcaagctgaacaccagcaagcaggccaaggctgctgctgcctttgtgatgtttcctgtgcagaccatcaccaccgtggacagctgtgtggtgcagctggactacctggatggccgcctgctgatcagcagcctgaccaggagcttcctgtgtgacacagagcgggagaagttctggaagattggcaacaaggagagagatggagaatatggagcctgcttcttccctggccgctgcagcggcggccagcagcccctcatctactgtgcccggcccggcagcaggatgtgggaggtgaactttgatggagaggtgatcagcacccaccagttcaagaagctgctgagcctgccccccctgcccgtcatcaccctgcggtctgagccccagtatgaccacacagctggcagcagccagagcctgtccttccccaagctgctgcacctgtctgagcactgtgtgctgacctggacagagcggggcatctacatcttcatcccccagaatgtgcaggtgctgctgtggagcgaggtgaaggacatccaggatgtggccgtgtgcagaaatgagctgttctgcctgcacctgaatggcaaggtgagccacctgagcctcatctctgtggagcgctgtgtggagcggctgctgcggcggggcctgtggaacctggccgcccggacctgctgcctcttccagaacagcgtgattgccagccgggccaggaagaccctgacagctgacaagctggagcacctgaagagccagctggaccacggcacctacaatgacctgatcagccagctggaggagctgatcctgaagtttgagcccctggacagcgcctgcagcagccgccgcagcagcatcagcagccatgagagcttcagcatcctggacagcggcatctaccgcatcatcagcagccggcggggcagccagagtgatgaggacagctgcagcctgcacagccagaccctgtctgaagatgagcgcttcaaggagttcaccagccagcaggaggaggacctgcctgaccagtgctgcggcagccacggcaatgaagataatgtgagccacgcccctgtgatgtttgaaacagacaagaatgagaccttcctgcccttcggcatccccctgcccttccgcagccccagccccctggtgtccctgcaggccgtgaaggagagcgtgagcagctttgtgaggaagaccacagagaagattggcaccctgcacaccagcccagacctgaaggtgcggcctgagctgcggggagatgagcagagctgtgaagaagatgtgtccagtgacacctgccccaaggaggaggacacagaggaggagaaggaggtgaccagccccccaccagaagaagatcgcttccaggagctgaaggtggccacagctgaggccatgaccaagctgcaggaccccctggtgctgtttgaaagtgagagcctgaggatggtgctgcaggagtggctgagccacctggagaagacctttgccatgaaggacttctctggagtgtctgacacagacaacagctccatgaagctgaaccaggatgtgctgctggtgaatgaaagcaagaagggcatcctggatgaggacaatgagaaggagaagagggacagcctgggcaatgaggagagcgtggacaagacagcctgtgaatgtgtgcgcagcccccgggagagcctggatgacctcttccagatctgcagcccctgtgccatcgccagcggcctgagaaatgacctggccgagctgaccaccctgtgcctggagctgaatgtgctgaacagcaagatcaagagcaccagcggccacgtggaccacaccctgcagcagtacagccctgagatcctggcctgccagttcctgaagaagtacttcttcctgctgaacctgaagagggccaaggagagcatcaagctgagctacagcaacagccccagcgtgtgggacaccttcatcgagggcctgaaggagatggccagcagcaaccctgtgtacatggagatggagaagggggacctgcccacccggctgaagctgctggatgatgaggtgccctttgacagccccctgctggtggtgtatgccacccggctgtatgagaagtttggagagagcgccctgcggagcctcatcaagttcttccccagcatcctgcccagcgacatcatccagctgtgccaccaccaccctgctgagttcctggcctacctggacagcctggtgaagagcaggcctgaggaccagaggagcagcttcctggagagcctgctgcagcctgagagcctgcggctggactggctgctgctggccgtgtccctggatgccccacccagcaccagcaccatggatgatgagggctacccccggccccacagccacctgctgtcctggggctacagccagctgatcctgcacctgatcaagctgcctgctgacttcatcaccaaggagaagatgacagacatctgccgcagctgtggcttctggccaggctacctgatcctgtgcctggagctggagaggagaagagaggccttcaccaacatcgtgtacctgaatgacatgagcctgatggagggggacaatggctggatccctgagaccgtggaggagtggaagctgctgctgcacctgatccagagcaagagcaccaggcctgccccccaggagagcctgaatggcagcctgagtgatggccccagccccatcaacgtggagaatgtggccctgctgctggccaaggccatgggccctgaccgggcctggagcctgctgcaggagtgtggcctggccctggagctgtctgagaagttcaccaggacctgtgacatcctgagaattgctgagaagaggcagagggccctgatccagagcatgctggagaagtgtgaccgcttcctgtggagccagcaggcctag

SEQ ID NO: 255068 - DNA, 3048 bp, Artificial Sequence
  derived and/or modified sequence
atgtacgtgagcagcgagcacaagggccggcgggtgaccgccctgtgctgggacactgctatcctgcgagtgttcgttggcgatcacgccggtaaagtgtcggcaatcaaactcaatacaagcaagcaggccaaggccgcagctgctttcgtcatgttccctgtgcagacgatcacgaccgtggacagctgtgtagtccagctggattacctcgatgggcgactgctgatttccagcctaaccagatccttcctctgtgacaccgaacgagagaaattttggaagatcggcaacaaagagcgagatggcgagtacggcgcatgttttttccccggccgttgcagtgggggccagcaacccttgatctattgcgcccgcccaggcagtcgaatgtgggaagtgaacttcgacggcgaagtgattagtacccaccagttcaaaaagttgctatcacttcccccgttgcctgttattacgctccggtccgaaccacagtacgaccacaccgccggctcgagtcaaagtctttcatttcctaagttgctgcacttgtcagagcactgcgtgctgacatggaccgaacgggggatatacattttcattccacagaatgttcaggtgctgctttggagcgaggtcaaggacatccaggatgtggcggtctgccggaatgagttgttttgcctgcacctgaacggaaaagtcagccatctctccctgatcagcgtagagcggtgcgtcgagcgtctgctccgacggggtctctggaacctggcagcgcgcacttgctgtctgttccagaactccgtaatcgcaagcagagctcgtaaaactttgaccgctgataaactggaacacctgaagtcccagctggaccacggcacctataacgaccttatcagtcaactcgaggagctgattctgaaatttgagcccttagacagtgcatgcagtagcagaagatcgtccatcagctctcacgagagtttttccatcctggattcaggcatctaccgcatcatttcctcaaggcgcggatcacagtcagatgaagattcctgttcactgcacagccagaccttgtccgaagatgaaagattcaaggaattcacctcacagcaagaggaggacctgccggaccagtgttgtgggtctcatggcaacgaagacaatgtatcgcatgcccctgtgatgtttgagaccgacaaaaacgagacattcctgccatttgggattcccctccccttcagatccccttcaccactggtcagtttgcaggccgtaaaggaaagcgtgtcaagcttcgtccgcaaaacgactgagaaaatcggcaccctgcacacatcacccgacctaaaggttaggcctgagcttcgtggagatgaacagtcctgcgaggaagatgtgagctctgacacttgccccaaggaagaagatacagaagaggaaaaggaggtgacctcacctcctcccgaggaggacaggtttcaggaactgaaggtggctaccgcagaagctatgacaaaattacaggatcctttggtgctgttcgaatccgaatctctccggatggtgctccaggaatggctctcacacctcgaaaagacattcgctatgaaagatttttctggtgttagcgacacggataattcctccatgaaacttaatcaggacgtgttgttggttaacgaatccaagaagggtattctggacgaggataacgagaaagaaaagcgcgactcattaggaaatgaagagtccgtggacaaaaccgcttgcgaatgtgtaagaagcccgcgggaatcccttgacgacctctttcagatctgttccccgtgtgccatcgcttccggtctgcgcaacgacctggccgagctgactacactttgcttggagctgaacgtgcttaactcaaagatcaagtcaacatccggccacgtggatcacaccctccagcagtattcaccggaaattcttgcttgccagttcctaaagaagtatttttttctgctgaatctgaaaagggctaaggagagtatcaaactgtcctacagtaactcgccgagcgtttgggacacgtttatagagggactgaaggagatggccagctccaatcccgtgtacatggagatggaaaaaggtgacctgcctacacgcctcaagctcctggacgacgaggttcctttcgactcccctctgttggttgtgtacgccactaggctttatgaaaagttcggcgagtctgcactcagatctttgattaagttcttcccttctatcctgcctagcgatatcattcagctctgccatcatcacccagccgagtttctcgcttaccttgactcgctggttaaaagcaggccagaggaccagcggtcaagcttcctggagtcactgttgcagccagaatctctacggctagattggctgcttctagccgtgtccctggacgccccacctagcacctcaaccatggacgatgagggctatcctagaccccactcccacttgcttagttggggatacagtcagctcatactgcacctaatcaagctgcccgccgactttattaccaaagaaaaaatgaccgacatctgcagatcatgcggcttttggcctggatacctcatcctctgtcttgagctggagagacgccgcgaggcttttaccaatattgtgtatctcaacgatatgtccctgatggaaggagacaatggatggattcctgagaccgttgaggagtggaagctgttactccatctgattcagagcaaatcgaccagaccagcaccccaagaatcactaaatggcagcctgtccgacggcccgagtccaatcaacgtggagaacgtggctctgctgctggccaaggctatggggccagatcgagcttggagtctgcttcaagagtgcggactggctctcgagctgagcgaaaaattcactcgcacatgcgacatccttcgtatcgcagagaagcgacaacgcgccttaattcagagcatgcttgaaaagtgcgatagattcctgtggtctcagcaggcatag

SEQ ID NO: 255069 - DNA, 3048 bp, Artificial Sequence
  derived and/or modified sequence
atgtacgtgagcagcgagcacaagggccggcgggtgaccgccctgtgttgggatacggcgatacttagggtgttcgtcggggaccatgctgggaaagtgtccgccatcaagctcaatacaagcaagcaggccaaggccgctgctgccttcgtaatgtttcctgtgcagacaatcacaaccgtcgattcatgtgtagtccaactggactatctggacgggaggctgctgattagctcactgaccagatctttcctatgcgacactgaaagagaaaaattctggaagattggaaacaaggagcgtgatggagagtacggggcctgctttttcccaggcaggtgtagcggcggccagcaacccctaatctactgcgcccgaccaggctcccggatgtgggaggtcaacttcgacggagaagtgatttcaacacaccagttcaagaaattgctgtctctgccacccctccccgtcattacattgaggagcgaaccacaatatgaccacaccgccggctcctcccaaagcctgtccttccccaagctgctgcatctgtctgagcactgtgtactcacctggacagaaagaggtatttacattttcatcccccagaatgtgcaggtcctattgtggtccgaggtcaaagacatccaggacgtggccgtgtgccgcaatgaactgttttgtctgcatcttaatggcaaggtcagtcacctctccctgatatccgtggaacgatgcgttgaacggttattgagacgaggactatggaacctggccgcccggacctgttgcctgtttcagaatagcgtcattgcctctagagccagaaagactctcacagccgataagctggagcacctgaaatctcagctggatcacggtacctataacgaccttatctcccagctcgaggagctgatcctaaagtttgagcctctggactccgcctgttcctcaagacgctctagcatcagctcgcatgaatccttctctattctcgattccggcatctatcgtattatctcatcacggagaggcagccagagcgatgaggactcatgttctctccatagccagaccctctctgaagacgaacggtttaaagagttcacatcacagcaggaggaggacctccctgatcagtgctgtggatctcacggaaacgaggataatgtgtctcatgctcctgtcatgttcgaaactgataagaacgagacctttctgcccttcgggatcccgttaccttttagatccccttccccgttggtttccctgcaagcagttaaagagtcagtctcctcctttgtgcgaaagactacggaaaaaatcggaacgctgcatacttctccagacctgaaagtccggcctgagctgaggggagacgagcagagctgtgaagaagatgtttcatctgatacctgccctaaagaggaagacactgaggaagagaaggaggtgacaagcccccctccggaggaagacagattccaagaactgaaggtagctactgcagaagctatgacaaaacttcaggatccactggtattgttcgagagcgaatccttacgcatggttctccaggagtggctgagccatcttgagaaaacgttcgccatgaaagacttcagtggcgtatctgataccgacaactcttccatgaaactcaatcaggatgtgttactggtcaacgaaagtaagaagggcatcctcgatgaagataacgagaaggagaagcgggactcccttggtaatgaggaatctgtcgataaaactgcttgcgagtgcgtcagatcccctagggagagtctggatgacttgtttcagatctgcagcccttgtgcaattgctagtggcctgaggaacgaccttgcggaactcacgacattgtgtttggagctgaacgtcctgaatagcaagatcaaaagcacttccggtcatgtggatcacactctccagcaatacagtcctgaaatcctggcctgtcagttcctgaaaaagtacttcttcctcctaaatctaaagcgcgcgaaagagtctattaagttgagttactccaattccccttctgtatgggacacctttattgaaggtttgaaagaaatggctagttcaaatcccgtctatatggaaatggagaagggcgatctgcctacccgactgaagctcctagatgacgaagtgccttttgattcccctctgttagtggtatatgctacccggttgtacgaaaaatttggcgaaagcgcacttcgctccctgataaaattcttccccagtatcctcccctccgatataattcagttatgccatcaccacccggctgagtttttagcgtatcttgactcactggtcaagagtcgccccgaggaccagagatcgagtttcctggaaagtttactgcagcctgaatcactgagactcgactggcttcttcttgcagtgagtctcgatgcgccaccgagtacatccactatggatgatgaaggatacccacgcccacacagtcacttactgagctgggggtacagtcagcttatactgcaccttattaaattacctgcagactttatcacaaaagagaagatgactgatatttgtcgcagctgcggtttctggcctggatacctgatactgtgcctcgagttggagcggcggagggaggcatttaccaatatcgtgtatttgaacgatatgagtcttatggagggagacaatggatggattccagagacagtcgaagagtggaagctgctgctccacctgattcagagcaaatcgaccaggcctgcgccacaggaaagcctaaatgggagcctcagcgatgggcctagtccaatcaacgttgagaatgtggcgcttctccttgccaaggccatgggtccagatagggcatggtctctgttgcaggagtgcggtttggccctcgagctgagtgaaaagttcacacgcacgtgtgatatcctgcggattgccgagaagagacagagagctctgatccaatcaatgttggagaaatgcgataggttcctgtggtcccagcaggcatag

SEQ ID NO: 255070 - DNA, 3048 bp, Artificial Sequence
  derived and/or modified sequence
atgtatgtttcaagtgagcacaaagggagacgcgttaccgctctgtgttgggacacagcaattttgcgcgtatttgtgggtgaccatgctggcaaggtgagtgcaatcaagctgaacacatccaagcaggcaaaggcagctgcagcctttgtgatgttcccagtccagaccattacaacagtggatagctgtgtcgttcagttggactacctcgacggtaggctgctgatttcctccctcacgagaagttttctgtgcgataccgaaagagagaaattttggaagattggaaacaaggagcgcgacggggagtacggagcttgcttctttcccggtcggtgtagtggcggtcagcagcctctgatttattgtgccaggcccggttctcggatgtgggaggtgaacttcgacggggaggtgatctctacccatcagttcaaaaaacttcttagcttgccacccctacccgttataaccttaaggtcggagccacagtatgaccacaccgccggatcctcccagtctttgtctttcccaaaactgctgcacctgagtgagcactgtgtccttacctggacagaaaggggaatctatatctttatacctcagaatgtgcaggtgctactgtggtcagaagtgaaagacattcaggacgtagccgtgtgtaggaacgaactgttttgtcttcacttgaatggtaaggtgtcgcatctcagtttgatcagtgttgagcgctgcgtcgagaggctactccgcagaggtctgtggaacctggccgctcgtacatgctgtctttttcaaaactcagtgattgcgagccgcgctcggaaaaccttaacggctgataaactggagcatctcaagtcccagcttgaccacgggacatataatgatctaatctctcagttggaggagctgattttgaaattcgagcctctggatagcgcttgttctagcaggcggagttcgattagttcccacgaatcatttagtatcctcgattccggcatctaccgcattattagctcccgacgaggctcccagagtgacgaagacagttgttccctccattcccagactttgtccgaggacgagagattcaaggagttcacctcacagcaggaggaagacctgcctgaccaatgctgcggaagccatggtaatgaagataatgtttctcacgctcccgttatgtttgagacggacaaaaatgaaacattcctcccctttggcatccccctgccctttaggtccccttcaccactggtctctctgcaggctgtgaaggagtcagtctcaagttttgtgcggaaaacaacagaaaagataggcaccctccacaccagcccagacctcaaagtgcggcctgaactaagaggcgacgagcaatcgtgcgaagaggatgtttcttccgatacctgtcctaaggaggaggataccgaagaggagaaagaagtcacatcccctcctccagaagaagacagattccaggagctgaaagtagccaccgcagaggcgatgacaaagttacaagatccactagtgttgttcgagtcagaaagtctcaggatggttcttcaggagtggctctcccatctggagaaaacttttgctatgaaagatttttccggcgtctccgataccgataactcaagtatgaaactcaatcaggatgtactgctggtgaatgagtctaagaaagggattctcgacgaagacaacgaaaaagagaagagagactcactgggcaatgaggaatcagtcgacaagaccgcctgtgagtgcgtgcgctcaccacgcgaatctctggacgatttgttccaaatatgctccccttgcgccatcgcaagtggactccggaacgacctggcagagctcacgaccctgtgtctggagctgaatgtactaaattccaaaatcaaatcaacaagcggtcacgtggaccatactcttcagcaatactccccggagatactggcttgccagtttctgaagaagtacttcttcctgctaaatctcaaaagagcaaaagagtctatcaagctcagctatagcaactcacctagtgtgtgggatacttttatcgagggactgaaagagatggcatctagcaatcccgtgtacatggaaatggagaaaggcgatctgcccacccgattgaagttgctggatgacgaggtcccttttgacagcccattattagtggtttacgccaccaggctctacgaaaaattcggtgaaagcgcgcttaggagccttattaaattttttccctccatcctacccagcgacattatccaactctgccatcatcacccggcagagttcttggcatatttggattctcttgtgaagtcccgtcctgaggaccaaaggagctcatttcttgagtctctgcttcagcctgaaagtctgcgacttgattggctgctgttggccgtcagccttgatgctcccccttcaacctccacaatggatgatgagggatatccgcgaccccacagccatctcctgtcatggggctattctcagcttatcttacacctcataaagctgccagctgactttattactaaggaaaaaatgacggacatctgccgttcgtgcggtttctggcccggttatctgatcctttgtctggagctggagaggagaagagaagccttcacaaacatagtgtacttgaacgatatgagtttaatggagggagacaacggctggatcccagaaactgtagaggagtggaagttgctgctgcacctcattcaatcaaagagcacccgccctgcacctcaggaatcactgaacggctccctgagtgacggacccagccccattaatgtcgaaaatgtggcgctcctccttgcgaaggcaatgggacctgatagagcatggtccctacttcaagaatgcggtttggcactggagttgagcgagaaattcaccaggacttgcgacatattgcgcatcgccgaaaaacgtcagagagctcttatccagtccatgctcgagaagtgcgaccgcttcctctggtcccagcaagcatag

SEQ ID NO: 255071 - DNA, 3048 bp, Artificial Sequence
  derived and/or modified sequence
atgtacgttagcagtgagcacaagggtcgaagagtgacagccttatgctgggatacagccatcctgagggtgttcgtcggagaccatgccggaaaggttagcgccatcaaactcaataccagtaagcaggcaaaggctgctgcagcttttgtgatgttcccagtgcagactatcacaaccgtcgacagctgcgtggtgcagctagactacctggacggtaggcttcttattagcagccttactcgtagtttcctctgcgacaccgagcgggagaagttttggaagataggcaacaaggagcgtgacggggagtacggggcttgtttttttcccggtcggtgttcaggcggacagcagccgttgatttattgtgcaaggcctggatcccgtatgtgggaggtgaatttcgacggggaagttatttccacacaccaatttaagaaactcctgtctctgcctcccctgcctgtgattacactcagaagcgagccccagtacgaccacacagcagggtcctcacagtctctgtcttttcctaaactcttacatcttagcgagcactgtgtactcacgtggacagagaggggcatttatatctttataccacagaacgtgcaagtgttgctctggagcgaggtcaaggacatccaggacgtcgcagtatgtcgaaacgagctcttctgcctccatttaaatggcaaagtgtcacacctcagcttaattagcgtggagaggtgcgtcgaacgcctgttaaggcgaggactgtggaatttggctgccaggacttgttgtttgtttcagaactctgttatagcgtctcgagcccgaaagacactaacagccgacaaactggaacacttaaagtctcaactagaccacgggacttacaacgacctcatctctcaactggaggagttaattcttaaattcgaaccactggacagcgcttgcagcagcaggcgctcatcaatatcatcccatgagagcttctcgattctggacagtgggatttatcgtatcatttcgtctcgcagaggaagccagtctgatgaggattcctgctccctccactctcagaccctgtctgaggatgagcggtttaaagaatttactagccagcaggaagaagatctcccagatcagtgctgcggcagtcatggaaatgaagataatgtctcacacgcccctgttatgtttgaaaccgataaaaatgagacatttcttccatttggcattcccctaccattccgatccccgtcacctctggtctcccttcaggccgtcaaggagtctgtatcatcgtttgttcgtaagactactgaaaagatcggaactctccatacatctcctgatctcaaggtaaggcctgagctgagaggagacgaacagtcctgtgaagaagatgtttcgtctgacacatgccccaaagaagaggatactgaagaagaaaaggaggttacgagccctcctcctgaggaggacaggttccaagaactcaaggttgctaccgctgaggcgatgactaaactacaagatcctctggttcttttcgaatccgaatctctcagaatggtccttcaggaatggctttctcacctggagaagacctttgctatgaaggatttttccggggtaagcgacaccgataatagctccatgaagttaaaccaggacgtgttgcttgtgaacgagagtaagaaagggattttagatgaagacaacgaaaaggagaagcgtgactcactgggcaacgaagagtcagtggacaagaccgcctgcgagtgcgtccggtctcctcgtgaaagcctcgatgaccttttccagatctgttctccatgcgcaatcgcatccgggctgaggaatgacttggctgaacttacaacactgtgcctggagctgaacgtgctgaacagcaaaattaaaagtacctcggggcacgtcgatcacaccttacaacaatactccccggagattctggcctgccagtttctgaaaaagtattttttcctcttaaacctgaaacgggctaaagagtcaattaagctctcctactctaactccccttctgtgtgggatacttttatcgagggcttgaaagagatggccagcagtaatccagtgtatatggaaatggagaagggcgacttgcccactaggcttaaactactggatgacgaagtgccctttgacagccctctgctggttgtgtatgcaacaaggctgtatgaaaaattcggtgagtccgctctccgtagtctgatcaagtttttcccatcaattcttccttccgacataattcaactgtgccatcaccaccctgccgagttcctagcttatcttgatagccttgttaagtcaaggccagaggaccagcgcagttccttcctcgaaagtctgctgcagcctgagtcccttcggttggattggctcttgctggccgttagtcttgatgctcctcccagcaccagcactatggacgacgaaggctaccccagaccccattcccacctcctctcgtggggttacagtcagttgatcttacatctaataaagctccctgccgactttattactaaagaaaaaatgactgacatctgtagatcatgcgggttctggccagggtacctgatcctgtgccttgagctggagagaaggagagaggcgttcaccaacatcgtgtatttaaacgatatgagcctgatggaaggagacaatggctggataccagaaacggtagaggagtggaagctcctccttcacttgattcagtctaaaagcaccagacccgctcctcaggagtcgctgaacgggagcctttcggacggcccaagtcctataaatgttgagaacgtggctctgctcttggcaaaggccatgggacctgatcgggcttggagcctcctccaagagtgtggccttgctttagaactcagcgaaaaattcaccagaacatgcgacattcttagaattgccgagaaacggcagcgagcgctgattcaatctatgctggagaagtgtgacagattcctatggagccagcaggcctag

SEQ ID NO: 255072 - DNA, 3048 bp, Artificial Sequence
  derived and/or modified sequence
atgtacgtgagcagcgagcacaagggcagaagagtgaccgccctgtgctgggacaccgccatcctgagagtgttcgtgggcgaccacgccggcaaggtgagcgccatcaagctgaacaccagcaagcaggccaaggccgccgccgccttcgtgatgttccccgtgcagaccatcaccaccgtggacagctgcgtggtgcagctggactacctggacggcagactgctgatcagcagcctgaccagaagcttcctgtgcgacaccgagagagagaagttctggaagatcggcaacaaggagagagacggcgagtacggcgcctgcttcttccccggcagatgcagcggcggccagcagcccctgatctactgcgccagacccggcagcagaatgtgggaggtgaacttcgacggcgaggtgatcagcacccaccagttcaagaagctgctgagcctgccccccctgcccgtgatcaccctgagaagcgagccccagtacgaccacaccgccggcagcagccagagcctgagcttccccaagctgctgcacctgagcgagcactgcgtgctgacctggaccgagagaggcatctacatcttcatcccccagaacgtgcaggtgctgctgtggagcgaggtgaaggacatccaggacgtggccgtgtgcagaaacgagctgttctgcctgcacctgaacggcaaggtgagccacctgagcctgatcagcgtggagagatgcgtggagagactgctgagaagaggcctgtggaacctggccgccagaacctgctgcctgttccagaacagcgtgatcgccagcagagccagaaagaccctgaccgccgacaagctggagcacctgaagagccagctggaccacggcacctacaacgacctgatcagccagctggaggagctgatcctgaagttcgagcccctggacagcgcctgcagcagcagaagaagcagcatcagcagccacgagagcttcagcatcctggacagcggcatctacagaatcatcagcagcagaagaggcagccagagcgacgaggacagctgcagcctgcacagccagaccctgagcgaggacgagagattcaaggagttcaccagccagcaggaggaggacctgcccgaccagtgctgcggcagccacggcaacgaggacaacgtgagccacgcccccgtgatgttcgagaccgacaagaacgagaccttcctgcccttcggcatccccctgcccttcagaagccccagccccctggtgagcctgcaggccgtgaaggagagcgtgagcagcttcgtgagaaagaccaccgagaagatcggcaccctgcacaccagccccgacctgaaggtgagacccgagctgagaggcgacgagcagagctgcgaggaggacgtgagcagcgacacctgccccaaggaggaggacaccgaggaggagaaggaggtgaccagccccccccccgaggaggacagattccaggagctgaaggtggccaccgccgaggccatgaccaagctgcaggaccccctggtgctgttcgagagcgagagcctgagaatggtgctgcaggagtggctgagccacctggagaagaccttcgccatgaaggacttcagcggcgtgagcgacaccgacaacagcagcatgaagctgaaccaggacgtgctgctggtgaacgagagcaagaagggcatcctggacgaggacaacgagaaggagaagagagacagcctgggcaacgaggagagcgtggacaagaccgcctgcgagtgcgtgagaagccccagagagagcctggacgacctgttccagatctgcagcccctgcgccatcgccagcggcctgagaaacgacctggccgagctgaccaccctgtgcctggagctgaacgtgctgaacagcaagatcaagagcaccagcggccacgtggaccacaccctgcagcagtacagccccgagatcctggcctgccagttcctgaagaagtacttcttcctgctgaacctgaagagagccaaggagagcatcaagctgagctacagcaacagccccagcgtgtgggacaccttcatcgagggcctgaaggagatggccagcagcaaccccgtgtacatggagatggagaagggcgacctgcccaccagactgaagctgctggacgacgaggtgcccttcgacagccccctgctggtggtgtacgccaccagactgtacgagaagttcggcgagagcgccctgagaagcctgatcaagttcttccccagcatcctgcccagcgacatcatccagctgtgccaccaccaccccgccgagttcctggcctacctggacagcctggtgaagagcagacccgaggaccagagaagcagcttcctggagagcctgctgcagcccgagagcctgagactggactggctgctgctggccgtgagcctggacgccccccccagcaccagcaccatggacgacgagggctaccccagaccccacagccacctgctgagctggggctacagccagctgatcctgcacctgatcaagctgcccgccgacttcatcaccaaggagaagatgaccgacatctgcagaagctgcggcttctggcccggctacctgatcctgtgcctggagctggagagaagaagagaggccttcaccaacatcgtgtacctgaacgacatgagcctgatggagggcgacaacggctggatccccgagaccgtggaggagtggaagctgctgctgcacctgatccagagcaagagcaccagacccgccccccaggagagcctgaacggcagcctgagcgacggccccagccccatcaacgtggagaacgtggccctgctgctggccaaggccatgggccccgacagagcctggagcctgctgcaggagtgcggcctggccctggagctgagcgagaagttcaccagaacctgcgacatcctgagaatcgccgagaagagacagagagccctgatccagagcatgctggagaagtgcgacagattcctgtggagccagcaggcctag

SEQ ID NO: 255073 - protein, 125 aa, Artificial Sequence
  derived and/or modified sequence
MKMRFFSSPCGKAAVDPADRCKEVQQIRDQHPSKIPVIIERYKGEKQLPVLDKTKFLVPDHVNMSELVKIIRRRLQLNPTQAFFLLVNQHSMVSVSTPIADIYEQEKDEDGFLYMVYASQETFGF

SEQ ID NO: 255074 - DNA, 378 bp, Artificial Sequence
  derived and/or modified sequence
atgaagatgagattcttcagcagcccctgcggcaaggccgccgtggaccccgccgacagatgcaaggaggtgcagcagatcagagaccagcaccccagcaagatccccgtgatcatcgagagatacaagggcgagaagcagctgcccgtgctggacaagaccaagttcctggtgcccgaccacgtgaacatgagcgagctggtgaagatcatcagaagaagactgcagctgaaccccacccaggccttcttcctgctggtgaaccagcacagcatggtgagcgtgagcacccccatcgccgacatctacgagcaggagaaggacgaggacggcttcctgtacatggtgtacgccagccaggagaccttcggcttctag

SEQ ID NO: 255075 - DNA, 378 bp, Artificial Sequence
  derived and/or modified sequence
atgaagatgcgtttcttcagttctccgtgcggaaaagctgctgtggatccggcggatcgttgtaaggaggtacagcagatccgcgaccagcacccgagtaagatccccgtgatcatcgagcggtacaaaggtgagaaacagctgcctgtgctggacaaaacaaagttcttggtgcccgaccatgtcaacatgagtgaactggttaaaatcatcaggaggcgcctccagctgaatccaacccaagccttctttcttctggtgaaccaacatagtatggtctcggtgtcgactcctattgcggatatctacgagcaggaaaaggatgaggacgggttcctctacatggtgtacgctagccaggaaacttttggcttttag

SEQ ID NO: 255076 - DNA, 378 bp, Artificial Sequence
  derived and/or modified sequence
atgaagatgaggttcttcagcagcccctgtgggaaggctgctgtggaccctgctgaccgctgcaaggaggtgcagcagatccgggaccagcaccccagcaagatccctgtgatcatcgagcgctacaagggggagaagcagctgcctgtgctggacaagaccaagttcctggtgcctgaccacgtgaacatgtctgagctggtgaagatcatcagaagaaggctgcagctgaaccccacccaggccttcttcctgctggtgaaccagcacagcatggtgtctgtgtccacccccatcgctgacatctatgagcaggagaaggatgaagatggcttcctgtacatggtgtatgccagccaggagaccttcggcttctag

SEQ ID NO: 255077 - DNA, 961 bp, Artificial Sequence
  derived and/or modified sequence
cagccacctgccactcctgactgcatggaagccaggtgcaaggagaaaggattttgaggaggggactccatggcttccgagttgctgactgaccctccacctcagaggtagttctgacactgtctcagttttgcagatgaagatgagattcttcagttctccatgtggaaaagcagctgtggacccagccgaccgctgtaaggaggtacagcagatccgcgaccagcaccccagcaaaatcccggtgatcatcgagcgctacaagggtgagaagcagctgcccgtcctggacaagaccaagtttttggtcccggaccatgtcaacatgagcgagttggtcaagatcatccggcgccgcctgcagctgaaccccacgcaggccttcttcctgctggtgaaccagcacagcatggtgagtgtgtccacgcccatcgcggacatctacgagcaggagaaagacgaggacggcttcctctatatggtctacgcctcccaggaaaccttcggcttctgagccagcagtaggggggctcggcctgggagtcgggcggccccggtcaggccctgcccagagagctcctggttcctgaactgagctgcctctaccgtggtgggctgggcaggcatgtgcccccctagtcagagggcaccaacccacctactctgcccctgggtggatcctgggccggtcgtgttagggttgtccctctgggtgctggctggtgggatgggggagggtggggagcagctcccagcacccctgctgtgtggttcatcttttttttaggcccctgcctgtctgcccatctgcccctcacccacccgaggctctgcccaccgcctggacctgcccacccctgaaagactggcccctggctccccgcccctcggtctccacgtggtgtatggatctgtggtcattgtccctctgcagaataaagattgctcaggcctgcctggc

SEQ ID NO: 255078 - DNA, 378 bp, Artificial Sequence
  derived and/or modified sequence
atgaagatgcggttcttcagcagcccctgcggcaaggccgccgtggaccccgctgaccgctgtaaagaagtccagcagattagagatcaacatcctagcaagatccccgtgatcatcgagaggtacaagggggaaaagcagctgcctgtgttggacaaaaccaaattcttggtccctgaccatgtgaacatgagcgagctggttaagataattaggagacgtctgcagctgaatcccacacaagctttcttcctgctcgtgaaccagcactcgatggtcagcgtcagcactcccatcgctgatatctacgagcaggaaaaggacgaggacgggtttctttatatggtctatgcatcccaggagacctttggcttttag

SEQ ID NO: 255079 - DNA, 378 bp, Artificial Sequence
  derived and/or modified sequence
atgaagatgagatttttttcatccccctgcggcaaagccgcagtggaccctgcggatcgctgtaaggaagtgcagcagatccgcgatcagcatcctagtaaaattcctgtgatcattgaaaggtacaagggggagaaacaactgcctgtgctcgataagacaaaattccttgtgcctgaccacgtcaacatgtccgagctggtgaagatcattaggagaaggttgcagctgaatccgactcaggccttctttctcttggtgaaccagcattctatggtcagcgtgtccacacccatcgcagacatctatgagcaggagaaggacgaggatgggtttctgtacatggtttacgcaagtcaggagacttttggattctag

SEQ ID NO: 255080 - protein, 724 aa, Artificial Sequence
  derived and/or modified sequence
MSAEGYQYRALYDYKKEREEDIDLHLGDILTVNKGSLVALGFSDGQEARPEEIGWLNGYNETTGERGDFPGTYVEYIGRKKISPPTPKPRPPRPLPVAPGSSKTEADVEQQALTLPDLAEQFAPPDIAPPLLIKLVEAIEKKGLECSTLYRTQSSSNLAELRQLLDCDTPSVDLEMIDVHVLADAFKRYLLDLPNPVIPAAVYSEMISLAPEVQSSEEYIQLLKKLIRSPSIPHQYWLTLQYLLKHFFKLSQTSSKNLLNARVLSEIFSPMLFRFSAASSDNTENLIKVIEILISTEWNERQPAPALPPKPPKPTTVANNGMNNNMSLQDAEWYWGDISREEVNEKLRDTADGTFLVRDASTKMHGDYTLTLRKGGNNKLIKIFHRDGKYGFSDPLTFSSVVELINHYRNESLAQYNPKLDVKLLYPVSKYQQDQVVKEDNIEAVGKKLHEYNTQFQEKSREYDRLYEEYTRTSQEIQMKRTAIEAFNETIKIFEEQCQTQERYSKEYIEKFKREGNEKEIQRIMHNYDKLKSRISEIIDSRRRLEEDLKKQAAEYREIDKRMNSIKPDLIQLRKTRDQYLMWLTQKGVRQKKLNEWLGNENTEDQYSLVEDDEDLPHHDEKTWNVGSSNRNKAENLLRGKRDGTFLVRESSKQGCYACSVVVDGEVKHCVINKTATGYGFAEPYNLYSSLKELVLHYQHTSLVQHNDSLNVTLAYPVYAQQRR

SEQ ID NO: 255081 - protein, 732 aa, Artificial Sequence
  derived and/or modified sequence
MSAEGYQYRALYDYKKEREEDIDLHLGDILTVNKGSLVALGFSDGQEARPEEIGWLNGYNETTGERGDFPGTYVEYIGRKKISPPTPKPRPPRPLPVAPGSSKTEADVEQQALTLPDLAEQFAPPDIAPPLLIKLVEAIEKKGLECSTLYRTQSSSNLAELRQLLDCDTPSVDLEMIDVHVLADAFKRYLLDLPNPVIPAAVYSEMISLAPEVQSSEEYIQLLKKLIRSPSIPHQYWLTLQYLLKHFFKLSQTSSKNLLNARVLSEIFSPMLFRFSAASSDNTENLIKVIEILISTEWNERQPAPALPPKPPKPTTVANNGMNNNMSLQDAEWYWGDISREEVNEKLRDTADGTFLVRDASTKMHGDYTLTLRKGGNNKLIKIFHRDGKYGFSDPLTFSSVVELINHYRNESLAQYNPKLDVKLLYPVSKYQQDQVVKEDNIEAVGKKLHEYNTQFQEKSREYDRLYEEYTRTSQEIQMKRTAIEAFNETIKIFEEQCQTQERYSKEYIEKFKREGNEKEIQRIMHNYDKLKSRISEIIDSRRRLEEDLKKQAAEYREIDKRMNSIKPDLIQLRKTRDQYLMWLTQKGVRQKKLNEWLGNENTEENFLSCLPSQYSLVEDDEDLPHHDEKTWNVGSSNRNKAENLLRGKRDGTFLVRESSKQGCYACSVVVDGEVKHCVINKTATGYGFAEPYNLYSSLKELVLHYQHTSLVQHNDSLNVTLAYPVYAQQRR

SEQ ID NO: 255082 - DNA, 2175 bp, Artificial Sequence
  derived and/or modified sequence
atgagcgccgagggctaccagtacagagccctgtacgactacaagaaggagagagaggaggacatcgacctgcacctgggcgacatcctgaccgtgaacaagggcagcctggtggccctgggcttcagcgacggccaggaggccagacccgaggagatcggctggctgaacggctacaacgagaccaccggcgagagaggcgacttccccggcacctacgtggagtacatcggcagaaagaagatcagcccccccacccccaagcccagaccccccagacccctgcccgtggcccccggcagcagcaagaccgaggccgacgtggagcagcaggccctgaccctgcccgacctggccgagcagttcgccccccccgacatcgccccccccctgctgatcaagctggtggaggccatcgagaagaagggcctggagtgcagcaccctgtacagaacccagagcagcagcaacctggccgagctgagacagctgctggactgcgacacccccagcgtggacctggagatgatcgacgtgcacgtgctggccgacgccttcaagagatacctgctggacctgcccaaccccgtgatccccgccgccgtgtacagcgagatgatcagcctggcccccgaggtgcagagcagcgaggagtacatccagctgctgaagaagctgatcagaagccccagcatcccccaccagtactggctgaccctgcagtacctgctgaagcacttcttcaagctgagccagaccagcagcaagaacctgctgaacgccagagtgctgagcgagatcttcagccccatgctgttcagattcagcgccgccagcagcgacaacaccgagaacctgatcaaggtgatcgagatcctgatcagcaccgagtggaacgagagacagcccgcccccgccctgccccccaagccccccaagcccaccaccgtggccaacaacggcatgaacaacaacatgagcctgcaggacgccgagtggtactggggcgacatcagcagagaggaggtgaacgagaagctgagagacaccgccgacggcaccttcctggtgagagacgccagcaccaagatgcacggcgactacaccctgaccctgagaaagggcggcaacaacaagctgatcaagatcttccacagagacggcaagtacggcttcagcgaccccctgaccttcagcagcgtggtggagctgatcaaccactacagaaacgagagcctggcccagtacaaccccaagctggacgtgaagctgctgtaccccgtgagcaagtaccagcaggaccaggtggtgaaggaggacaacatcgaggccgtgggcaagaagctgcacgagtacaacacccagttccaggagaagagcagagagtacgacagactgtacgaggagtacaccagaaccagccaggagatccagatgaagagaaccgccatcgaggccttcaacgagaccatcaagatcttcgaggagcagtgccagacccaggagagatacagcaaggagtacatcgagaagttcaagagagagggcaacgagaaggagatccagagaatcatgcacaactacgacaagctgaagagcagaatcagcgagatcatcgacagcagaagaagactggaggaggacctgaagaagcaggccgccgagtacagagagatcgacaagagaatgaacagcatcaagcccgacctgatccagctgagaaagaccagagaccagtacctgatgtggctgacccagaagggcgtgagacagaagaagctgaacgagtggctgggcaacgagaacaccgaggaccagtacagcctggtggaggacgacgaggacctgccccaccacgacgagaagacctggaacgtgggcagcagcaacagaaacaaggccgagaacctgctgagaggcaagagagacggcaccttcctggtgagagagagcagcaagcagggctgctacgcctgcagcgtggtggtggacggcgaggtgaagcactgcgtgatcaacaagaccgccaccggctacggcttcgccgagccctacaacctgtacagcagcctgaaggagctggtgctgcactaccagcacaccagcctggtgcagcacaacgacagcctgaacgtgaccctggcctaccccgtgtacgcccagcagagaagatag

SEQ ID NO: 255083 - DNA, 2199 bp, Artificial Sequence
  derived and/or modified sequence
atgagcgccgagggctaccagtacagagccctgtacgactacaagaaggagagagaggaggacatcgacctgcacctgggcgacatcctgaccgtgaacaagggcagcctggtggccctgggcttcagcgacggccaggaggccagacccgaggagatcggctggctgaacggctacaacgagaccaccggcgagagaggcgacttccccggcacctacgtggagtacatcggcagaaagaagatcagcccccccacccccaagcccagaccccccagacccctgcccgtggcccccggcagcagcaagaccgaggccgacgtggagcagcaggccctgaccctgcccgacctggccgagcagttcgccccccccgacatcgccccccccctgctgatcaagctggtggaggccatcgagaagaagggcctggagtgcagcaccctgtacagaacccagagcagcagcaacctggccgagctgagacagctgctggactgcgacacccccagcgtggacctggagatgatcgacgtgcacgtgctggccgacgccttcaagagatacctgctggacctgcccaaccccgtgatccccgccgccgtgtacagcgagatgatcagcctggcccccgaggtgcagagcagcgaggagtacatccagctgctgaagaagctgatcagaagccccagcatcccccaccagtactggctgaccctgcagtacctgctgaagcacttcttcaagctgagccagaccagcagcaagaacctgctgaacgccagagtgctgagcgagatcttcagccccatgctgttcagattcagcgccgccagcagcgacaacaccgagaacctgatcaaggtgatcgagatcctgatcagcaccgagtggaacgagagacagcccgcccccgccctgccccccaagccccccaagcccaccaccgtggccaacaacggcatgaacaacaacatgagcctgcaggacgccgagtggtactggggcgacatcagcagagaggaggtgaacgagaagctgagagacaccgccgacggcaccttcctggtgagagacgccagcaccaagatgcacggcgactacaccctgaccctgagaaagggcggcaacaacaagctgatcaagatcttccacagagacggcaagtacggcttcagcgaccccctgaccttcagcagcgtggtggagctgatcaaccactacagaaacgagagcctggcccagtacaaccccaagctggacgtgaagctgctgtaccccgtgagcaagtaccagcaggaccaggtggtgaaggaggacaacatcgaggccgtgggcaagaagctgcacgagtacaacacccagttccaggagaagagcagagagtacgacagactgtacgaggagtacaccagaaccagccaggagatccagatgaagagaaccgccatcgaggccttcaacgagaccatcaagatcttcgaggagcagtgccagacccaggagagatacagcaaggagtacatcgagaagttcaagagagagggcaacgagaaggagatccagagaatcatgcacaactacgacaagctgaagagcagaatcagcgagatcatcgacagcagaagaagactggaggaggacctgaagaagcaggccgccgagtacagagagatcgacaagagaatgaacagcatcaagcccgacctgatccagctgagaaagaccagagaccagtacctgatgtggctgacccagaagggcgtgagacagaagaagctgaacgagtggctgggcaacgagaacaccgaggagaacttcctgagctgcctgcccagccagtacagcctggtggaggacgacgaggacctgccccaccacgacgagaagacctggaacgtgggcagcagcaacagaaacaaggccgagaacctgctgagaggcaagagagacggcaccttcctggtgagagagagcagcaagcagggctgctacgcctgcagcgtggtggtggacggcgaggtgaagcactgcgtgatcaacaagaccgccaccggctacggcttcgccgagccctacaacctgtacagcagcctgaaggagctggtgctgcactaccagcacaccagcctggtgcagcacaacgacagcctgaacgtgaccctggcctaccccgtgtacgcccagcagagaagatag

SEQ ID NO: 255084 - DNA, 2175 bp, Artificial Sequence
  derived and/or modified sequence
atgagcgccgaggggtaccagtacagagcactttacgattacaaaaaagagcgagaggaagacatcgacctgcaccttggagatatattgactgttaacaaagggtctcttgtggctctgggcttcagtgacgggcaggaggctagacccgaggagataggctggttgaatggctacaatgaaacgaccggtgagcgtggagattttccaggaacttacgttgagtacattgggcgaaagaagatctcccctcctacaccgaagccgaggccccctaggccattgccggtggcccctggcagctctaagactgaagcagacgtcgaacagcaagctctgacactgccagatctggccgagcagtttgcgccaccagatatagcacctccactactgattaaactggtcgaagctattgagaaaaaaggcctggagtgctccaccctgtataggacacagtccagcagcaaccttgctgaactgcgtcaactcttggactgtgacactccaagcgtggatctggaaatgattgatgtccacgtgctggccgacgctttcaaacgatatttgctcgacttacctaatcccgttattcccgcagcagtgtactctgagatgatcagtttggctcccgaagtccaaagttccgaggagtacatacagctgctgaagaaactgatcaggtccccgagtataccccaccaatattggttgactctgcaatacttactgaagcatttttttaagctcagccagacttcaagcaagaatctcttgaacgcccgagtcctttctgagatttttagccccatgttatttcggttctcagctgcctcttcagacaataccgagaatttaataaaggtgatagagatcttaataagcaccgaatggaatgaacgacaacctgctcccgcccttccaccaaaacctcccaagcccactactgtcgcaaacaacgggatgaataataacatgagcctgcaagatgcagaatggtattggggagacatcagtcgggaagaggtgaacgagaagctgcgggacaccgctgacgggacctttttggtgcgtgacgcctctacgaaaatgcacggagattatacactcacattacggaaaggtgggaacaacaaactgattaagattttccaccgggatggcaaatatggattctccgatccattaacattcagcagcgtcgtcgagcttattaatcactatagaaacgagtctctggcccagtacaacccaaagcttgatgttaaactcttataccccgtctccaagtaccagcaggatcaggtggtgaaagaggataacattgaggcggttggtaaaaaactgcacgagtacaatacgcaatttcaggagaagtcccgggaatatgacaggctctatgaggaatacacacgcacgtctcaagaaatccagatgaagcggactgccattgaagccttcaacgagactattaaaatttttgaggagcagtgccagactcaagagcggtatagtaaagagtacatcgagaagttcaaacgcgaaggcaacgagaaggaaattcagcggatcatgcacaattacgacaaactgaagtcaagaatttctgaaattatagatagccggcggcgtttggaagaggaccttaaaaaacaggccgcagaatacagagagatcgacaaacgtatgaacagtattaagcccgacctcattcagttgaggaagacgagggatcagtacctcatgtggctgacccaaaagggggtgaggcaaaaaaaactgaatgagtggctaggcaacgaaaataccgaggaccagtattctctggtggaggacgacgaggacttaccccaccacgatgagaagacttggaacgtgggctcttctaaccgcaataaggccgagaacctgcttagaggcaagcgagacggtacattcctggtccgggaatcgtcaaagcaaggctgctatgcatgctctgtcgtggttgatggagaagttaagcactgtgtgataaacaaaacagccaccgggtacggctttgcagagccctataatctgtacagctcgctcaaggaacttgtgttgcactaccagcatacctctttggtgcaacacaacgatagccttaacgtgacactggcgtaccccgtctacgcacagcagcgtaggtag

SEQ ID NO: 255085 - DNA, 2199 bp, Artificial Sequence
  derived and/or modified sequence
atgtccgccgaaggataccaatacagagccctctatgattataaaaaagagcgggaggaagatatcgatctgcacctgggtgatatcctcaccgttaacaaggggagcctagtggccctcggattttctgacgggcaggaggccagacccgaggagattggatggctcaacggttataatgagactacaggggagaggggtgacttccctggcacatacgtggagtacatagggcggaagaagataagcccccctactcccaagccccgaccgcctcggccactgcccgtggcaccggggagcagcaagaccgaggcggatgtcgaacaacaagcgcttacactccctgacttagcagaacagtttgcccccccagatatcgcccctcctctactgataaagctcgtcgaggccatcgagaaaaagggcttggaatgctcaacattgtataggacacagtcgtctagcaacctcgccgagttaagacagctgctggactgcgacactccctctgttgatttagagatgatcgatgtgcacgttctggccgatgcttttaaacgttatcttctcgatttacctaacccagtcataccagctgcggtgtactcggaaatgatcagcctcgcgccggaagtccagtcatctgaagaatacatccagctgctgaagaaactgatccgtagtccgtctatcccacaccaatattggctgaccctacagtacctgctcaaacatttttttaaactcagtcagacctcatccaagaacctgctgaacgctagggtgctgtctgagattttctcacctatgttatttagattctccgccgcctcaagtgataatacagagaatctgataaaggtgattgaaatcctcataagcacagagtggaacgagaggcagccagcacctgcacttccaccaaagccccctaagccaactactgtggctaataacggtatgaataataacatgagcctgcaggatgccgaatggtattggggcgatatttccagagaggaagtgaatgaaaagctgagggacacggccgatggcacgttcctggtccgggacgccagtacaaagatgcatggcgattacaccttgactttgcgaaagggcgggaacaacaaactgatcaagatctttcatcgtgatggcaagtatggatttagtgatcccttgacattctccagcgtggtggagctcattaatcactatcgaaacgagtccctcgcacagtacaaccccaagcttgacgtgaagttgctctatcccgtcagcaaataccagcaggaccaggttgtcaaggaggacaacatagaggccgtaggaaagaagctgcacgaatacaatactcagttccaagaaaagtcacgagagtatgaccggctgtacgaagagtacactagaaccagccaagagatccagatgaaaaggaccgccatagaggcattcaacgagacaataaagatattcgaggagcaatgccaaacacaggaaaggtactccaaagaatacatcgaaaagttcaaaagggaggggaacgaaaaagagatccaacgcatcatgcacaactacgataaactcaagtcacgaatttccgagattatcgatagcagacgacgtctggaagaggatttaaagaaacaggccgcagaataccgggagatcgataagcgcatgaattcgattaaacccgacttgatacagctgcgaaagacacgcgaccagtaccttatgtggctaacacagaaaggagttcgccaaaaaaagttgaatgaatggttgggtaacgagaataccgaggagaacttccttagttgcctaccatctcaatatagcctggtcgaggacgacgaggatttgcctcatcacgacgagaagacgtggaatgtcggatccagtaatcgaaataaagctgagaaccttcttagggggaagagggacggaacatttctcgtaagggagtctagtaaacaggggtgttacgcttgctctgtcgtggtcgatggagaagtaaaacactgcgtgatcaacaaaacagcaaccggatatgggttcgccgagccatacaacctgtatagttctttaaaggagctcgttttgcattaccagcacacttctcttgttcagcataacgattcactgaatgttaccctggcctaccccgtctacgcccagcagcgtcggtag

SEQ ID NO: 255086 - DNA, 2175 bp, Artificial Sequence
  derived and/or modified sequence
atgagtgctgagggctatcaataccgcgcgctgtacgactacaagaaggaacgagaggaggatattgatctgcacctgggggacattctcacagtcaacaaaggaagtctggttgctctggggttttctgatggtcaggaagcacgcccggaagagataggatggctgaacggctacaacgagactactggagagcgaggtgacttccccgggacttacgtcgagtacattggaagaaagaagatctctccgccaacaccgaagcctcgacctcctaggccactccctgttgcacccggatcctctaagactgaagccgacgtcgagcagcaggcactgaccctcccggacttggcggaacagtttgccccacccgacattgctcccccattgctcatcaagttggtcgaagccattgaaaagaaggggttggaatgcagcacactctacaggacacagtctagtagcaacctggccgaactgcggcaacttttggactgcgacacaccttccgtggatctagaaatgattgacgttcacgtcctggcagacgcatttaaacgctacctcctcgatctgccaaatccagtgatcccagctgctgtgtattccgaaatgatttcccttgcacccgaggtgcaatcgagtgaggagtacattcagctgcttaaaaagctgatccgatctccatcgatcccccaccaatattggcttacactccaatatctcctcaaacattttttcaagctgtctcagactagcagcaagaatctgttgaacgcacgagtgttatcagaaatcttttcccccatgctctttaggttctccgcagcaagctctgacaacacagagaatctcatcaaggttatcgagatcttgatctcaacagagtggaatgagagacagcccgcgcctgctctgccacccaaaccacctaagcccacaacggtcgctaataacgggatgaacaataatatgtccttgcaagacgccgagtggtactggggggacatctccagagaagaggtcaacgagaagcttcgggatacagccgatggcaccttcctggtgagagacgctagcacaaagatgcatggagactatacactcacccttcggaagggtgggaacaataagcttatcaagatatttcatcgagatggcaaatacgggtttagcgatcctctaaccttttcaagtgtggtggagttaataaatcattatcgcaacgagtccctggcccaatacaatccaaagctcgatgtgaaactcctatatccagtctcaaagtatcagcaggatcaggtggtcaaggaggacaacatcgaggccgtgggcaagaaacttcacgaatataacacgcagttccaggagaagtccagagaatatgacagactctatgaggagtatacacgaaccagtcaggagatccaaatgaaacgtacggcaattgaggcatttaatgagacgataaaaatttttgaggagcagtgccagacgcaagagcgttacagcaaagagtacattgaaaagtttaaacgcgagggcaatgagaaggaaattcagagaataatgcacaactacgacaagttgaagtcccggatatccgaaattatcgactccaggagacggttagaagaggacttgaagaagcaggctgcagagtatcgagaaattgacaaacgaatgaatagcattaagccggacttaatccagctgaggaaaacacgggaccaatatctcatgtggctaacccagaagggggttcgtcagaagaagctgaatgagtggcttggcaacgaaaataccgaagatcagtatagcttggtggaggacgacgaagacttgcctcatcacgacgaaaaaacctggaacgtggggtcttcaaatcgaaataaagcggaaaacctcctgcggggtaagcgcgatggcacgttcctggttcgggagagctctaagcagggctgctacgcgtgcagcgtagtggtggacggagaagtcaagcattgtgtgatcaacaaaaccgcaaccgggtacggattcgcggaaccctataatctttacagttcgctcaaggagctggtcctccattatcagcatacatctttagttcagcataatgattcccttaacgtgacgttggcctacccagtttatgcccaacagagacgatag

SEQ ID NO: 255087 - DNA, 2175 bp, Artificial Sequence
  derived and/or modified sequence
atgtctgccgagggctaccagtatcgagccctgtacgactataagaaagaaagagaggaggacattgatttgcatctgggtgacatcctcacggttaacaaggggtccttggtggccttaggcttctccgacggccaggaagcacggccagaagagattgggtggttaaacggttataacgaaacaaccggcgagcgtggcgattttccaggtacttacgtggaatatattggacgaaagaagatctctcccccaacacccaagccaaggccccctaggcccttgcccgtcgcacctggttctagtaaaacagaagccgatgtcgagcagcaggccctgaccctgcctgacctcgcggaacaatttgccccccccgacattgccccacctctgctaattaaactggtggaggcaatcgagaagaagggactcgagtgtagcaccctgtatcggacccaaagttcctcaaatctggcagaattgagacagctgctggactgtgacacacctagcgtggatctggagatgatagatgtgcacgtgttggccgatgcgttcaagaggtacctgctcgaccttcctaatccagtaattcctgccgctgtgtattccgaaatgatctctttggcgcccgaggttcagagctctgaggagtacatccagctgctgaaaaaactgatccgatctccgagtattccccaccagtactggctaacactgcagtacctgctgaaacatttctttaagctgagtcagactagctcaaaaaacctgctgaacgcccgcgtgctgagtgagatctttagtcccatgctgtttcgcttctcggctgcctcttccgacaacaccgagaacctgatcaaggtaattgaaattttgatctccaccgagtggaacgaacggcagcccgcccccgcgctgccgcccaagccaccaaagcctactactgtggccaacaacggaatgaacaacaatatgtccctgcaggacgcggagtggtactggggcgacatttctcgagaagaggtgaacgaaaaactgcgcgatacggctgacggtacttttcttgtgagagatgccagcaccaagatgcacggcgattatactttgactctgcgaaagggcggaaacaacaagctgataaagatctttcatcgtgatggaaagtatggattctcagaccccctcacattcagcagtgtagtggagctaatcaaccattatagaaacgagagcctcgcccaatataacccaaagctagatgtgaagctcctctatcctgtatccaagtaccagcaggatcaggtcgtgaaggaagataacatcgaggctgtgggaaagaaactccatgaatacaatacacagttccaagaaaaatcacgcgagtatgacaggctttacgaggagtatacacgaacctcccaggagatccagatgaagcggacagccatcgaggcctttaacgagaccatcaagatctttgaggagcagtgtcagactcaggagagatactccaaggaatatatcgagaaattcaagagagaggggaatgagaaggagattcagaggatcatgcataattacgataaactcaagtcccgcatttcagagatcatcgactcacggagacgtctggaggaagacctgaagaagcaggccgccgagtacagagaaatcgacaagaggatgaatagcatcaagccggatctcattcaactgaggaagaccagagaccagtacctgatgtggctcacccagaaaggagtccgacagaagaagctcaacgagtggttgggcaacgagaacaccgaagaccagtattctctagtggaggatgacgaggatctcccgcatcacgacgagaaaacctggaatgtcggaagttccaaccgaaacaaggccgagaatttgcttcgggggaagagggacgggaccttcctggtcagggagagttcaaagcaaggatgctatgcctgctcggttgttgttgatggcgaggttaagcattgcgtgattaacaaaacagccactgggtacggtttcgcagagccttacaacctgtactccagccttaaagaactggtactgcattatcaacacacttccctggtccagcacaacgatagtcttaatgtcactctggcatatcctgtttacgcgcagcaacgaagatag

SEQ ID NO: 255088 - DNA, 2175 bp, Artificial Sequence
  derived and/or modified sequence
atgtctgctgagggctaccagtaccgggccctgtatgactacaagaaggagcgggaggaggacatcgacctgcacctgggggacatcctgactgtgaacaagggcagcctggtggccctgggcttcagtgatggccaggaggcccggcctgaggagatcggctggctgaatggctacaatgagaccactggagagcggggggacttccctggcacctacgtggagtacatcggcaggaagaagatcagcccccccacccccaagcccaggcctccccggcccctgcctgtggcccctggcagcagcaagacagaagcagatgtggagcagcaggccctgaccctgcctgacctggccgagcagtttgcccccccagacatcgccccacccctgctgatcaagctggtggaggccatcgagaagaagggcctggagtgcagcaccctgtaccgcacccagagcagcagcaacctggccgagctgcggcagctgctggactgtgacaccccatctgtggacctggagatgattgatgtgcacgtgctggctgatgccttcaagcgctacctgctggacctgcccaaccctgtgatcccagctgctgtgtacagcgagatgatcagcctggcccctgaggtgcagagcagcgaggagtacatccagctgctgaagaagctgatccgcagccccagcatcccccaccagtactggctgaccctgcagtacctgctgaagcacttcttcaagctgagccagaccagcagcaagaacctgctgaatgcccgggtgctgtctgagatcttcagccccatgctgttccgcttctctgctgccagcagtgacaacacagagaacctgatcaaggtgattgagatcctgatcagcacagagtggaatgaaaggcagcctgccccagccctgccccccaagccacccaagcccaccaccgtggccaacaacggcatgaacaacaacatgagcctgcaggatgctgagtggtactggggagacatcagccgggaggaggtgaatgagaagctgcgggacacagcagatggcaccttcctggtgagagatgccagcaccaagatgcatggagactacaccctgaccctgaggaagggcggcaacaacaagctgatcaagatcttccacagagatggcaagtatggcttcagtgaccccctgaccttcagctctgtggtggagctgatcaaccactacagaaatgaaagcctggcccagtacaaccccaagctggatgtgaagctgctgtaccctgtgtccaagtaccagcaggaccaggtggtgaaggaggacaacatcgaggccgtgggcaagaagctgcacgagtacaacacccagttccaggagaagagccgggagtatgaccggctgtatgaggagtacaccaggaccagccaggagatccagatgaagaggacagccatcgaggccttcaatgagaccatcaagatctttgaggagcagtgccagacccaggagcgctacagcaaggagtacatcgagaagttcaagcgggagggcaatgagaaggagatccagaggatcatgcacaactatgacaagctgaagagccgcatcagcgagatcatcgacagcagaagaaggctggaggaggacctgaagaagcaggccgctgagtaccgggagattgacaagaggatgaacagcatcaagccagacctgatccagctgaggaagacccgggaccagtacctgatgtggctgacccagaagggcgtgcggcagaagaagctgaatgagtggctgggcaatgaaaatacagaggaccagtacagcctggtggaggatgatgaggacctgccccaccatgatgagaagacctggaatgtgggcagcagcaacagaaacaaggccgagaacctgctgcggggcaagagagatggcaccttcctggtgcgggagagcagcaagcagggctgctacgcctgcagcgtggtggtggatggagaggtgaagcactgcgtcatcaacaagacagccaccggctacggctttgctgagccctacaacctgtacagcagcctgaaggagctggtgctgcactaccagcacaccagcctggtgcagcacaatgacagcctgaatgtgaccctggcctaccctgtgtatgcccagcagaggaggtag

SEQ ID NO: 255089 - DNA, 2199 bp, Artificial Sequence
  derived and/or modified sequence
atgtctgctgagggctaccagtaccgggccctgtatgactacaagaaggagcgggaggaggacatcgacctgcacctgggggacatcctgactgtgaacaagggcagcctggtggccctgggcttcagtgatggccaggaggcccggcctgaggagatcggctggctgaatggctacaatgagaccactggagagcggggggacttccctggcacctacgtggagtacatcggcaggaagaagatcagcccccccacccccaagcccaggcctccccggcccctgcctgtggcccctggcagcagcaagacagaagcagatgtggagcagcaggccctgaccctgcctgacctggccgagcagtttgcccccccagacatcgccccacccctgctgatcaagctggtggaggccatcgagaagaagggcctggagtgcagcaccctgtaccgcacccagagcagcagcaacctggccgagctgcggcagctgctggactgtgacaccccatctgtggacctggagatgattgatgtgcacgtgctggctgatgccttcaagcgctacctgctggacctgcccaaccctgtgatcccagctgctgtgtacagcgagatgatcagcctggcccctgaggtgcagagcagcgaggagtacatccagctgctgaagaagctgatccgcagccccagcatcccccaccagtactggctgaccctgcagtacctgctgaagcacttcttcaagctgagccagaccagcagcaagaacctgctgaatgcccgggtgctgtctgagatcttcagccccatgctgttccgcttctctgctgccagcagtgacaacacagagaacctgatcaaggtgattgagatcctgatcagcacagagtggaatgaaaggcagcctgccccagccctgccccccaagccacccaagcccaccaccgtggccaacaacggcatgaacaacaacatgagcctgcaggatgctgagtggtactggggagacatcagccgggaggaggtgaatgagaagctgcgggacacagcagatggcaccttcctggtgagagatgccagcaccaagatgcatggagactacaccctgaccctgaggaagggcggcaacaacaagctgatcaagatcttccacagagatggcaagtatggcttcagtgaccccctgaccttcagctctgtggtggagctgatcaaccactacagaaatgaaagcctggcccagtacaaccccaagctggatgtgaagctgctgtaccctgtgtccaagtaccagcaggaccaggtggtgaaggaggacaacatcgaggccgtgggcaagaagctgcacgagtacaacacccagttccaggagaagagccgggagtatgaccggctgtatgaggagtacaccaggaccagccaggagatccagatgaagaggacagccatcgaggccttcaatgagaccatcaagatctttgaggagcagtgccagacccaggagcgctacagcaaggagtacatcgagaagttcaagcgggagggcaatgagaaggagatccagaggatcatgcacaactatgacaagctgaagagccgcatcagcgagatcatcgacagcagaagaaggctggaggaggacctgaagaagcaggccgctgagtaccgggagattgacaagaggatgaacagcatcaagccagacctgatccagctgaggaagacccgggaccagtacctgatgtggctgacccagaagggcgtgcggcagaagaagctgaatgagtggctgggcaatgaaaatacagaggagaacttcctgagctgcctgcccagccagtacagcctggtggaggatgatgaggacctgccccaccatgatgagaagacctggaatgtgggcagcagcaacagaaacaaggccgagaacctgctgcggggcaagagagatggcaccttcctggtgcgggagagcagcaagcagggctgctacgcctgcagcgtggtggtggatggagaggtgaagcactgcgtcatcaacaagacagccaccggctacggctttgctgagccctacaacctgtacagcagcctgaaggagctggtgctgcactaccagcacaccagcctggtgcagcacaatgacagcctgaatgtgaccctggcctaccctgtgtatgcccagcagaggaggtag

SEQ ID NO: 255090 - DNA, 2175 bp, Artificial Sequence
  derived and/or modified sequence
atgagcgccgagggctaccagtaccgggccctgtacgactacaagaaggagcgggaggaagacattgatcttcatctaggcgatatcctaacagtaaacaaaggaagtctggtggccctgggattttccgatggacaagaggcacgccccgaagagatcggatggctgaatggctataacgaaactacaggggagcgtggcgacttccctggaacctacgtggagtatatcggacgaaagaagatttctccccccacccccaagccgcgcccccctcgaccgcttcctgtggctccaggttcctctaaaaccgaggcagacgtcgaacagcaagccctcactctgcctgatcttgctgagcagttcgcgccccctgatatcgcccctcctctactgattaaactagtagaggctattgaaaaaaaaggtctggagtgcagcactctctatcgaactcagagttccagcaacctggccgaacttcgtcagctgctcgactgcgacactccgtcggttgacctggagatgatagatgtccatgtactggctgatgcattcaaacggtacctgttggatcttcccaaccccgtgatcccggctgctgtatacagcgaaatgatatctcttgcaccagaggtgcaaagttcagaggaatacatccagctacttaaaaagctcatccggagtcccagtattcctcaccaatactggctcaccttgcagtatcttctcaagcactttttcaagttatctcaaacgtccagcaagaatctgctgaacgctcgcgtgctgtcagaaatattctccccgatgttatttagattctctgctgcaagctccgataataccgagaacctgattaaggtaatcgaaatattaatctccaccgaatggaacgagagacagccagcgcctgctctgccgcccaaaccccctaagccaactaccgtggcaaataatggcatgaacaataatatgagtcttcaggacgccgagtggtactggggggatatctctcgcgaggaggtgaacgagaaattacgagatactgctgatggcacatttctggtccgggatgccagcaccaagatgcatggggattatacactgacactgaggaagggagggaataataaactgatcaaaatctttcacagagacgggaagtatggctttagcgacccactgaccttctcctccgtggttgagctgatcaatcattaccgcaatgagagcctggctcagtacaatcctaagcttgatgtgaaactgctatatcctgtttccaagtatcagcaggatcaagttgtgaaggaggataatattgaggccgtcggcaagaagctgcatgagtacaacacccagttccaggagaaatccagggagtatgacagactgtacgaggagtacactcgcacaagccaggaaatccagatgaaaaggaccgctattgaggcattcaacgagaccatcaaaattttcgaggagcagtgccagacacaggagaggtactcaaaagaatatatcgaaaagtttaaaagggaggggaatgaaaaagagatacagcggatcatgcacaactatgataaacttaaatcacgcataagtgaaatcatagattcacgaagacgcttggaagaggacctcaaaaagcaggccgctgaatatcgtgaaatcgacaagaggatgaattctattaagcctgatctgatccagctccgcaaaacccgcgaccagtatttgatgtggctgacgcagaagggtgtgagacaaaagaaattgaatgagtggctgggaaatgagaatactgaggaccagtattctctggttgaagatgatgaagatttgccacatcatgacgaaaagacatggaacgtgggctcaagcaacaggaataaagcggaaaatcttctcagggggaaaagagacggaacttttcttgtccgggagagcagtaagcagggatgctacgcttgcagcgtcgttgtcgatggcgaagtcaagcattgtgtaattaacaagacggcaacagggtacggtttcgccgagccctataacttgtacagctccctcaaagagctcgtgctgcattaccagcataccagcctggtgcagcataatgactcactaaatgtcaccctggcttacccagtatacgctcagcaacgacgctag

SEQ ID NO: 255091 - DNA, 2199 bp, Artificial Sequence
  derived and/or modified sequence
atgagcgccgagggctaccagtaccgggccctgtacgactacaagaaggagagagaggaggatattgacctgcatctgggtgatatcctgactgtgaacaagggaagtctggtggctctggggttttctgatggtcaggaggcccgacctgaagagattggttggctgaatggatataatgaaaccactggggaacgaggggattttccaggaacttacgtcgagtatataggaagaaaaaagatatctcctcctactccgaagcccagaccaccccggcccctacctgttgccccagggtcaagcaagacggaggccgatgtggaacaacaggccctgaccttgcccgatctagcagaacagttcgcccctcctgacatcgcccctcccttacttataaaactggtggaggcgatcgagaaaaaaggtctggaatgttccacactgtatcgtactcagagctcaagcaacctggcggagttacgccagttgcttgattgcgacaccccctcagttgacctggagatgatcgatgtgcacgtgcttgccgatgcattcaaaaggtatctgctggatctgccaaatccagtgattccggccgccgtgtatagcgagatgatcagtttggctcctgaagtacaaagctctgaggaatatatccagctgctgaagaagcttatccgcagcccgagcattccacatcaatactggctcacactgcaataccttctcaaacactttttcaagttgagtcagacttcatcaaagaaccttctgaacgccagggtcctatctgaaatcttcagccctatgctgtttagattctctgctgcttcctcagacaataccgaaaacttaattaaggtcatcgaaatactgattagtacagaatggaatgagagacagcctgcccccgcccttccacccaaaccgcctaagccgactacagtggctaacaacgggatgaacaacaatatgtccctgcaggacgctgaatggtactggggcgacatatctcgggaggaagtgaacgaaaaacttagggacacagctgatggtacctttctggttcgcgacgccagcactaaaatgcacggggattacacccttaccctacgaaaaggagggaataacaaactcattaagatctttcatcgggacggtaagtatgggttctccgatcctttgacgtttagctcagtggtggaactgataaaccactaccgtaacgaaagcctggcccaatataatccaaagctggatgtgaaactgttgtatccagttagcaaatatcagcaggaccaagtagtgaaggaggacaacatagaggctgtcggaaagaaactgcacgagtataacacgcagttccaggaaaagtcccgggagtacgatcgtctgtacgaggagtacaccaggactagccaggagatccagatgaagaggactgccattgaggcttttaacgagactatcaaaatattcgaagagcagtgccaaactcaggaaaggtactcaaaagaatacattgagaaatttaagcgcgaagggaacgaaaaggaaatacagaggatcatgcacaattatgataagctgaagtctaggatctcagaaattatcgactcacggcgcaggctagaggaggacctgaaaaagcaggcagcagagtatcgtgagatcgacaagcggatgaacagcatcaagccagaccttatccaactgcggaagaccagggaccagtatctcatgtggcttacacagaagggagtacggcagaagaagctgaacgagtggctaggtaatgagaacaccgaggagaacttcctgtcctgtttgccttcacaatactctttagttgaagacgatgaagatctacctcaccatgatgagaagacctggaacgtggggagttctaacaggaataaagctgagaaccttctgaggggaaaacgggacggcacgttcctcgttcgggagtcaagtaaacagggctgctacgcgtgcagcgtggtggttgacggcgaagttaaacattgtgtgattaacaagaccgcgaccgggtatgggtttgcagagccctacaatctgtattcttctctgaaggagttggtgcttcactaccagcacacctcattggtacaacataatgacagcctgaatgtgaccttggcgtatcctgtgtacgcgcagcaacggcggtag

SEQ ID NO: 255092 - DNA, 2175 bp, Artificial Sequence
  derived and/or modified sequence
atgagcgccgagggctaccagtaccgggccctgtacgactacaagaaggagagggaggaagacattgacctgcatttgggggacatcctgacagtgaacaagggctcacttgtggcactgggattctcagacgggcaagaagcccgccccgaggagatcggatggcttaatggctataatgagacaaccggagagcgtggtgattttcctggcacctacgtggagtatatcggtcggaaaaaaatctcccctcccacccctaaacctcgaccacctaggccactgccagtcgcgccagggtcatctaaaactgaagcggacgtggaacaacaggccctaactctgcccgatctcgcagagcagttcgctcctccggacatcgcaccacctcttctgataaaactcgtggaagcgatcgaaaagaaaggacttgaatgctccacactatacaggactcagtccagctccaacctcgctgaactgagacagctgctcgactgtgataccccaagcgttgatttggagatgatcgatgtccacgtgcttgccgacgcctttaagcgctaccttttggacctacccaatcctgtgatacctgcggcagtttattccgagatgattagtctggctcctgaagtgcagtcctcggaagaatacatacagcttctcaaaaagctcatccggtcaccctcaatcccacaccagtattggctgacacttcagtatctgctgaagcacttttttaaactttcacagacctcctctaagaacttacttaatgcacgggtcctgagcgagattttttccccaatgctctttcgattctcggctgccagtagcgataatacggaaaatctgatcaaggtaatcgaaatattgatttctaccgagtggaacgagagacagcccgcgcctgcccttccccccaagcctcctaaacctactactgttgccaataatgggatgaacaacaacatgtcgctccaggacgctgaatggtattggggtgatatttcccgcgaagaagttaacgaaaagctgcgcgacacagcggacggcacattcctggtacgcgacgccagtactaaaatgcacggcgattataccttgacactccgcaaggggggcaataacaagttaatcaaaatctttcaccgagacggtaagtacgggttctcagatcccctgaccttctctagcgtagtggaattgatcaaccattaccgaaacgaatcactggcccagtataaccccaagctagatgtcaaacttttgtaccctgtgagtaaataccagcaggatcaagtggtcaaagaagacaacatagaggccgtcggcaaaaaactgcacgagtacaatacacagtttcaggaaaaatctcgggaatatgatcgtctgtacgaggagtacacccggacgtcccaggagattcaaatgaagcggactgcgattgaggcctttaacgaaactattaaaatcttcgaggaacaatgccagacacaagaacgctactcaaaagagtatatagagaaatttaagagggaagggaatgagaaggagatccagcggattatgcataattacgataaattgaaatctcggatctcagagattatcgacagtcgcaggaggctggaagaggatttgaaaaaacaggccgctgaataccgcgagatagataagaggatgaacagcattaaacccgatcttatccagcttcgaaaaacaagggaccaatatttgatgtggctaacccagaagggtgttagacagaagaagcttaacgagtggcttggcaacgaaaataccgaggaccagtattctcttgtggaggacgatgaagatcttccacaccacgatgagaaaacttggaatgtgggcagcagtaatcgtaacaaggctgagaacctactccgtggcaagcgtgacggcacatttttggtcagggagtcttcgaaacagggctgttatgcgtgctcggtcgttgtcgatggggaagtcaagcactgcgtgatcaacaagacagcaacgggatacggctttgctgaaccgtacaacctttattcatcccttaaagaacttgttctgcactatcagcatacctcattagtccagcacaatgactcacttaacgtgacactggcctaccctgtctatgcacagcagaggcgctag

SEQ ID NO: 255093 - DNA, 2175 bp, Artificial Sequence
  derived and/or modified sequence
atgagcgccgagggctaccagtaccgggccctgtacgactacaagaaggagcgggaggaggatatcgacctgcatctgggggatattcttaccgttaacaagggaagtttagtggccctagggttctctgacggtcaggaagcacgacccgaggagatcggatggctgaacggatacaacgagaccacgggcgaacggggcgatttccccggaacgtacgtggaatacatcggtcggaagaagatcagtccgcccaccccgaagcctcgaccgccccgacccctacccgtcgcaccgggctcaagtaaaacagaggcagacgttgagcagcaggccctaacactgcctgatcttgcagagcagttcgcacccccggacatagcgccacctctgctgatcaaattagtcgaggcaattgagaagaaggggctggagtgtagtactctctatagaacacagtcatctagcaacctggcagagctgaggcagctgctggactgcgataccccctctgtcgatctggagatgatcgatgtgcacgtcctggctgatgcattcaaacgctatctacttgatcttccgaatcccgtcattcccgcagccgtgtactcggaaatgatctccctggctcccgaagtccagtcttccgaggagtacattcagttactgaaaaaactgatcaggagccccagcataccccatcaatactggctgacgctgcaatacctgctgaagcacttttttaaactgtcccagacctcaagtaaaaatctgctgaacgcccgagtcctgagcgagattttttcaccaatgctgttcaggttcagtgccgcgagctccgacaatacagaaaatctcattaaggtgatagaaattttgatcagcaccgagtggaatgagcgccagcccgctccggccctgccacctaagccaccgaaaccaacaactgttgccaacaatggcatgaacaacaatatgtcccttcaagatgccgagtggtactggggtgacattagccgagaagaggtaaatgagaagctccgtgacacggccgatggtacctttcttgtcagagatgcctccacaaagatgcatggtgattataccctgacactgaggaagggagggaataacaaattaataaagatatttcaccgcgacgggaagtatgggttctccgaccctctgactttctcctccgttgtagagttaatcaaccattacagaaacgagagcctggcacaatataacccgaaactcgacgtgaagctcctgtaccccgttagcaagtaccaacaggaccaagttgtaaaggaagacaatattgaagcagtggggaagaagctccatgaatataacacccagttccaggaaaagtcccgagagtatgatcggctctatgaggaatatacaagaacctcacaggagatacagatgaagcgcaccgccattgaggcattcaatgaaactattaagatttttgaagagcagtgccaaacccaggaaagatatagtaaggaatacatcgaaaagttcaagagggagggaaacgaaaaggaaatccaacggattatgcacaattatgacaaattgaaatcaaggatctctgagatcatcgacagccggcggcggcttgaagaggatcttaaaaagcaggctgcagaatacagagagattgacaagagaatgaatagcataaaacctgatctgattcagctcagaaaaacccgagatcaataccttatgtggctgactcagaagggggttcggcagaagaagctgaatgagtggctgggtaacgagaacacggaggatcaatactcgttagtggaggatgacgaggatctaccccatcacgacgagaagacatggaacgtggggtcgagcaaccggaacaaggcagagaacctcctcagggggaagagggacggcacctttctcgtgagggagtcctcaaagcagggttgttacgcttgcagtgtcgtcgtcgacggtgaagtcaagcactgtgtgatcaacaagacggccactggctacggttttgccgagccctacaatctgtactcctcgctgaaagagcttgtgctgcattaccaacacacatcccttgtgcagcataacgacagcctgaacgtgactctagcttatcccgtctatgcccagcaacgtcggtag

SEQ ID NO: 255094 - DNA, 2175 bp, Artificial Sequence
  derived and/or modified sequence
atgtcggccgagggataccaatatcgagcactgtacgattataaaaaagaaagggaagaggacatcgacttacacctcggtgacatacttacagtaaacaaaggttctctggtagcactgggcttctctgatggacaggaggctcggccagaggagattggatggcttaacggctataatgaaactacaggagagcggggtgactttcctggaacctacgttgagtacatcggaagaaaaaagatctcacctcccacacccaagccacgacccccacggccactgcccgtggcgcctggaagctccaagactgaagctgatgttgagcagcaggctctcaccttgcctgacttggccgaacaatttgcacctcccgacatcgcgcctcctcttctcattaagctcgttgaggccatagagaagaaggggctagagtgcagcaccctctataggacacagtcctcttcaaacctggcagagctgaggcaactgttagattgtgatactccctctgttgacctggaaatgatcgacgtacacgtactcgctgacgcttttaagagatatttgctcgatctacctaacccagtaatcccagcggcagtgtactctgaaatgatttcattggcgccagaggtacagagttccgaagagtatatccagctcctgaagaagctgattaggtccccatctatcccacatcagtactggctaacacttcagtacctgctgaagcatttttttaaactgagccagacttcttccaagaaccttttgaatgccagagtcctatctgagattttcagccccatgctcttcaggtttagcgccgctagcagcgacaatactgaaaaccttattaaagtaatcgagattctgatttcaacagaatggaatgaaaggcagccagcgcctgccctgcctcccaagcctcccaagcctacaacagtggctaacaatggtatgaataacaatatgtccctgcaagacgccgagtggtactggggagatatctctcgggaagaagtgaatgagaagctaagagacacagcggacggcacattcctggtgagagatgcttctaccaagatgcacggcgattacacgctgactctgcgcaagggaggcaacaacaagctaatcaagatttttcatagggacggcaaatacgggtttagcgaccctctgacattcagtagcgttgtagagctgattaaccactatagaaacgagagtttggcccagtacaatcctaagttggacgtgaagctgttgtacccggtgtcaaagtatcagcaagaccaggtggtaaaagaggacaacattgaagccgtgggcaagaagcttcatgagtataatacccaatttcaggagaagagccgcgaatatgaccggttatatgaggaatacacacgcacaagtcaggaaatccagatgaagcggacggcaatagaggctttcaacgagactatcaagatttttgaggagcagtgccagactcaggaaaggtatagcaaagagtatatcgaaaagttcaaaagagagggcaacgaaaaggaaatccagcggattatgcataattatgacaaattaaagtcgaggatctctgagataattgatagcaggcgcagactggaagaagacttgaaaaaacaggcagccgagtatagggagattgataaaaggatgaattcaattaagccggatcttatccaacttcgaaaaacaagagatcaatacctgatgtggttgacccagaaaggggtgcggcagaagaagctgaatgaatggttgggtaacgaaaatacagaggatcaatattccctggtcgaggatgatgaggacctgccacatcacgatgaaaagacgtggaatgttggcagctccaatcgcaacaaggcagagaatctgcttagaggaaagcgtgacggtacgtttctcgtccgagaatctagtaaacagggatgctatgcctgttcggtcgtggtagacggggaggtgaagcactgtgtcattaacaaaactgccaccggctatggttttgctgagccctacaacttgtattccagtctgaaggagctggtcctgcattatcagcacacctccctggtgcagcataatgacagcctgaatgttacactggcctatccagtgtatgcgcagcaacgtagatag

SEQ ID NO: 255095 - DNA, 2199 bp, Artificial Sequence
  derived and/or modified sequence
atgagtgcggagggttaccagtatcgggctctttatgattataagaaagaaagggaagaagatattgacctgcatcttggtgacattctgacggtgaacaagggttctctggtcgctttggggttcagtgatgggcaggaggccaggcccgaggagattggctggttaaacggatacaacgagacaactggagagcgaggcgacttccctggtacatatgtggaatatatagggaggaagaagatctcccctcctactcccaaacctcgaccacctaggcctctgccagtcgccccaggatcgtcaaaaacagaggcggacgttgagcaacaggccctcacattgcccgacttagcagaacaatttgcacctccagatatagcacctcccctcttgataaaactggttgaagcaatagagaagaaggggctggagtgtagtaccctgtaccgtacccaatctagcagcaacctcgctgagctcaggcaactgctggattgtgacacaccaagcgtggacctggagatgatcgacgtgcacgtgctcgccgatgcttttaaacgatatctgctggacctccccaatccggtgatacctgcggctgtgtattccgagatgatatctctggctcctgaggttcaaagcagcgaggaatacatccagctcttaaagaagctgatccgcagtccttctattcctcaccagtactggctgacattgcagtacctcctgaagcatttttttaagctttctcagacttcctctaagaacctcttgaacgctcgcgttctttccgagatctttagccctatgctttttcgtttttccgcagcctcttctgacaataccgagaatttgattaaagtgattgaaatcctgatcagcacagaatggaatgagagacaacctgcacccgcattaccccctaagccccctaagccaacaacagtggcaaataatggtatgaacaacaacatgtccctccaggatgcagagtggtactggggtgacatcagtagagaagaggtaaacgagaaacttagagacaccgccgatggcactttcctagtgagggatgcgtccacaaaaatgcacggggattacaccctgaccctccggaaagggggaaacaacaaactgatcaagatctttcaccgcgatggaaaatacggcttctctgacccacttacattctctagcgtcgttgaactcatcaaccactatcggaatgagtcattagctcaatacaaccctaagctagacgtgaagctcctgtatcctgtgagcaagtatcagcaagatcaggtggtgaaggaagacaacatcgaagccgtggggaagaagctccacgagtataacactcaattccaagagaaatcccgcgagtatgatcggctgtatgaggagtacaccaggacatcacaggagatccagatgaagcgcacagctatcgaggcctttaacgagacaatcaagatcttcgaggaacagtgtcagacccaggagcgatattccaaagagtatattgaaaagttcaagagagagggcaacgagaaagagattcagaggatcatgcacaactatgacaaactcaagtcccggatcagcgaaattatcgactcaaggagacgcctggaggaagatctaaaaaaacaggcagccgaatatcgggagatagataaacgcatgaattctattaaacctgacttgattcagctgcgaaaaacacgcgatcagtatttaatgtggctcacacagaaaggggtacgccagaagaagctcaatgagtggttaggtaacgaaaataccgaagaaaactttctcagctgcctgccctctcagtactcattagtggaggatgacgaggaccttccccatcacgacgaaaagacctggaacgttggctccagcaatcggaataaggctgagaatctcctaagggggaagcgagacggcaccttcctcgttcgtgagagctcaaaacaaggttgctacgcctgtagcgtcgttgttgacggggaagtgaagcattgcgtcatcaacaaaacagcaacaggctacggattcgcagaaccttataatctctactctagtttaaaggagctggtgctgcactatcagcacacatcactggtccagcataacgactccctgaatgtgactctggcctatccagtctatgctcaacaacggagatag

SEQ ID NO: 255096 - DNA, 2175 bp, Artificial Sequence
  derived and/or modified sequence
atgagtgccgaagggtaccagtaccgggcactatacgattataaaaaagagcgagaggaggatatcgaccttcacctcggcgatattttgaccgtcaacaaaggatccctggtggctctgggatttagcgacggacaggaagcccgtccggaagaaatcgggtggttgaatggctataatgagacaactggggaacggggagacttccctggtacgtatgttgaatacatcgggagaaaaaagatcagtccaccaactcccaaaccacgccctcccagacctctgcccgttgccccaggctcttctaagaccgaggcagatgtggagcagcaggccctgacactgccagacctcgcagaacaattcgccccacctgacattgcaccacctcttctgatcaaacttgtggaggccatcgaaaaaaaaggactggaatgttctacactgtacagaacacagtctagttcaaatctggcagaactccgccagttactggactgtgacaccccctccgtggacctcgagatgatcgatgtgcacgtgctagcagatgctttcaagcggtatctactcgatcttcccaatcctgtgattccagctgctgtatactccgagatgattagtctggcccctgaggtacagagcagcgaagaatatatccagttactgaaaaagttgatccggtccccttctattcctcatcagtactggctcacattgcaatatcttctgaaacatttcttcaagctgagccaaacaagctccaagaacctgttaaatgctcgcgtgttaagcgagatattctctcctatgctattccgatttagtgcagcttccagcgacaataccgaaaacctgatcaaggttattgaaattctgatcagtaccgagtggaatgaaaggcaacctgccccagcccttccaccgaagcctcctaaaccaactaccgtcgctaacaacgggatgaacaacaatatgagtctgcaagatgccgaatggtactggggagatatcagcagggaagaggttaatgagaagctgcgcgacacggccgacggcacattcttagtccgcgatgcatcgaccaagatgcacggcgactatacactgaccctaagaaaagggggtaacaataaactgatcaaaatatttcaccgcgacgggaagtacgggtttagcgatcccctaaccttcagttccgtcgtggagcttataaaccactacaggaatgaatccttggcccagtacaatcccaagttggacgttaagcttttgtacccggtttccaagtaccagcaggaccaggtcgtgaaagaagacaacattgaggctgtgggtaagaagcttcacgaatataacacgcagtttcaagaaaagagcagagaatacgacagactgtacgaggaatatacaaggaccagtcaggagatccagatgaaaaggactgccatagaggccttcaatgaaacaatcaagatattcgaggaacaatgccaaacccaggagaggtactcgaaggaatatatcgaaaaattcaagcgagaagggaacgagaaggaaattcaacgcatcatgcacaattacgacaaactgaagtctaggatctcggaaattattgatagccgcaggcggctagaagaagatctcaaaaagcaggccgcagaataccgggagatcgacaagagaatgaatagtattaaaccggatttgatacagctaaggaagacccgcgatcagtacctgatgtggctgacccaaaagggtgtgaggcagaaaaaactcaacgaatggctgggcaatgagaacacagaggaccagtactccctggtggaggatgatgaagatctaccacaccatgacgaaaaaacatggaacgtgggaagcagtaatcggaacaaagccgaaaacttgctgaggggcaaacgcgatggaacctttctggtccgcgaatcaagcaaacagggctgttacgcctgttcagtggtcgtagatggggaagtaaaacactgtgtaataaataaaaccgccaccggatacggattcgccgaaccatacaatttgtactcctctctaaaagaacttgtccttcactatcagcacacctcactggtgcagcataatgacagcctgaacgtgaccctagcataccctgtctacgctcaacagcgtcggtag

SEQ ID NO: 255097 - DNA, 2175 bp, Artificial Sequence
  derived and/or modified sequence
atgtccgcagaagggtatcaataccgggctctatatgattacaaaaaggaaagagaggaagacattgatctgcatttaggcgatatattaaccgtgaacaagggtagtctggtggctctgggctttagtgacggccaagaggctcgacccgaagagatcggctggttaaacggttataatgagaccactggtgaaagaggcgatttcccaggcacatacgtggaatacattggacgcaagaagatctccccgccaacccccaagcccaggccacccagaccactgcccgtggctccaggatcctccaagaccgaggctgacgtggagcagcaagcactcacattgccagacttggcagaacagtttgccccacctgacatcgcgccaccactgctgattaaactggtggaagccatcgaaaagaagggcctggaatgttcaactctgtaccgcacccagtccagctcgaaccttgccgagctgcggcagctgctcgactgcgatacacccagcgtcgatttagaaatgatcgacgtgcatgtgctggcagacgcattcaagaggtatctgctggatctgcctaaccccgtgattcctgccgcagtgtatagcgaaatgatttccctggccccagaagtacagagtagcgaagagtacatccagctgctgaaaaaactcataagatcgccgtccatcccacaccagtactggcttactttgcagtacctgttaaaacatttctttaaactcagccaaacctcaagcaagaacctgcttaacgccagggttctctctgaaattttcagccctatgctgttcaggttttctgcggcaagctccgataacacagaaaacctgattaaagtgatcgaaatacttatctctaccgagtggaacgagcgtcagcctgcgcctgccctaccgcctaagccccctaaacccaccacagtagctaacaatggaatgaacaacaatatgtctctacaagatgccgagtggtactggggggatatctctcgtgaagaggtaaatgagaaattgagggacacagcagacggtacattcctggtgcgagatgcgtctacgaagatgcatggggactataccctcacactccgcaagggtggcaacaacaaactcattaaaatctttcatagagacggtaagtacgggtttagtgatccattgactttctcatccgtcgtggaactcatcaaccactatagaaacgagtcactggcgcaatataatcccaagctggacgtcaagctgctctatccagttagtaagtaccagcaggaccaggtggtcaaggaggataacattgaggccgtgggtaagaagttacatgaatataatacccagtttcaggaaaagtcacgagaatacgacaggttgtacgaggaatatacaaggactagccaagaaattcagatgaaacggaccgccatcgaagcattcaatgagaccatcaagatttttgaagaacagtgccaaacccaggagcgctactccaaggaatacatagaaaaattcaagcgggagggcaatgagaaggagatccagcgaatcatgcataactacgacaaactgaaatcacggatttcggaaattatcgatagtaggcgcagactagaggaagacctgaaaaaacaggctgctgagtatcgagagatcgacaaaaggatgaactctattaagccagatcttattcagctgagaaaaacaagagatcagtatctgatgtggctgacgcagaaaggtgtcagacagaaaaaactgaatgagtggcttgggaacgagaataccgaggaccagtattccctggtcgaggacgacgaagaccttcctcaccacgacgagaaaacctggaatgtgggttcctccaacaggaacaaggctgagaacctgttgcggggaaagagggacggcacatttctcgtacgagagagttctaagcagggctgctacgcgtgctcagtggtcgttgacggcgaagtgaaacattgtgttatcaataagaccgccaccggctacgggttcgcagagccttacaatctctactccagtctgaaggaactggttcttcattaccagcacacctcactggtccagcacaacgattccctgaatgtgacccttgcatatcccgtgtacgcacagcagcgaaggtag

SEQ ID NO: 255098 - DNA, 6435 bp, Artificial Sequence
  derived and/or modified sequence
tacaaccaggctcaactgttgcatggtagcagatttgcaaacatgagtgctgaggggtaccagtacagagcgctgtatgattataaaaaggaaagagaagaagatattgacttgcacttgggtgacatattgactgtgaataaagggtccttagtagctcttggattcagtgatggacaggaagccaggcctgaagaaattggctggttaaatggctataatgaaaccacaggggaaaggggggactttccgggaacttacgtagaatatattggaaggaaaaaaatctcgcctcccacaccaaagccccggccacctcggcctcttcctgttgcaccaggttcttcgaaaactgaagcagatgttgaacaacaagctttgactctcccggatcttgcagagcagtttgcccctcctgacattgccccgcctcttcttatcaagctcgtggaagccattgaaaagaaaggtctggaatgttcaactctatacagaacacagagctccagcaacctggcagaattacgacagcttcttgattgtgatacaccctccgtggacttggaaatgatcgatgtgcacgttttggctgacgctttcaaacgctatctcctggacttaccaaatcctgtcattccagcagccgtttacagtgaaatgatttctttagctccagaagtacaaagctccgaagaatatattcagctattgaagaagcttattaggtcgcctagcatacctcatcagtattggcttacgcttcagtatttgttaaaacatttcttcaagctctctcaaacctccagcaaaaatctgttgaatgcaagagtactctctgaaattttcagccctatgcttttcagattctcagcagccagctctgataatactgaaaacctcataaaagttatagaaattttaatctcaactgaatggaatgaacgacagcctgcaccagcactgcctcctaaaccaccaaaacctactactgtagccaacaacggtatgaataacaatatgtccttacaagatgctgaatggtactggggagatatctcgagggaagaagtgaatgaaaaacttcgagatacagcagacgggacctttttggtacgagatgcgtctactaaaatgcatggtgattatactcttacactaaggaaagggggaaataacaaattaatcaaaatatttcatcgagatgggaaatatggcttctctgacccattaaccttcagttctgtggttgaattaataaaccactaccggaatgaatctctagctcagtataatcccaaattggatgtgaaattactttatccagtatccaaataccaacaggatcaagttgtcaaagaagataatattgaagctgtagggaaaaaattacatgaatataacactcagtttcaagaaaaaagtcgagaatatgatagattatatgaagaatatacccgcacatcccaggaaatccaaatgaaaaggacagctattgaagcatttaatgaaaccataaaaatatttgaagaacagtgccagacccaagagcggtacagcaaagaatacatagaaaagtttaaacgtgaaggcaatgagaaagaaatacaaaggattatgcataattatgataagttgaagtctcgaatcagtgaaattattgacagtagaagaagattggaagaagacttgaagaagcaggcagctgagtatcgagaaattgacaaacgtatgaacagcattaaaccagaccttatccagctgagaaagacgagagaccaatacttgatgtggttgactcaaaaaggtgttcggcaaaagaagttgaacgagtggttgggcaatgaaaacactgaagaccaatattcactggtggaagatgatgaagatttgccccatcatgatgagaagacatggaatgttggaagcagcaaccgaaacaaagctgaaaacctgttgcgagggaagcgagatggcacttttcttgtccgggagagcagtaaacagggctgctatgcctgctctgtagtggtggacggcgaagtaaagcattgtgtcataaacaaaacagcaactggctatggctttgccgagccctataacttgtacagctctctgaaagaactggtgctacattaccaacacacctcccttgtgcagcacaacgactccctcaatgtcacactagcctacccagtatatgcacagcagaggcgatgaagcgcttactctttgatccttctcctgaagttcagccaccctgaggcctctggaaagcaaagggctcctctccagtctgatctgtgaattgagctgcagaaacgaagccatctttctttggatgggactagagctttctttcacaaaaaagaagtaggggaagacatgcagcctaaggctgtatgatgaccacacgttcctaagctggagtgcttatcccttctttttctttttttctttggtttaatttaaagccacaaccacatacaacacaaagagaaaaagaaatgcaaaaatctctgcgtgcagggacaaagaggcctttaaccatggtgcttgttaatgctttctgaagctttaccagctgaaagttgggactctggagagcggaggagagagaggcagaagaaccctggcctgagaaggtttggtccagcctggtttagcctggatgttgctgtgcacggtggacccagacacatcgcactgtggattatttcattttgtaacaaatgaacgatatgtagcagaaaggcacgtccactcacaagggacgctttgggagaatgtcagttcatgtatgttcagaagaaattctgtcatagaaagtgccagaaagtgtttaacttgtcaaaaaacaaaaacccagcaacagaaaaatggagtttggaaaacaggacttaaaatgacattcagtatataaaatatgtacataatattggatgactaactatcaaatagatggatttgtatcaataccaaatagcttctgttttgttttgctgaaggctaaattcacagcgctatgcaattcttaattttcattaagttgttatttcagttttaaatgtaccttcagaataagcttccccaccccagtttttgttgcttgaaaatattgttgtcccggatttttgttaatattcatttttgttatccttttttaaaagtaaatgtacaggatgccagtaaaaaaaaaaaatggcttcagaattaaaactatgaaatattttacagtttttcttgtacagagtacttggctgttagcccaaggttaaaaagttcataacagattttttttggactgttttgttgggcagtgcctgataagcttcaaagctgctttattcaataaaaaaaagaaatgaaaaagatatatgaatatgacaaagtattgctgagtccaacaatgttgttttaagactcttaaaatacggtacctggcaatgtttatttcataaagaattgtgaacttcttgaatctagggagggggaatgtagtgaagggatgtatcaagtggggtggtgggagggggaggcaaggttatatgcactttctcatgatttacagagaagtgaataactgcaaagtgaagttgcttcttctacttcagtcttctctcactttgatttgctagttgttatcaattaatgacaattacaaacctactgtatctctaatacagtgtgactggtcaggtatttcagttcttaggaaggaagtgccaagtttgtttttgggttcctggaacagcgctcacctttgtttagaacactggtttaaagggataatcatctctgtcacattagactatccatcatgaccagcaaatactcattttaggaaaaaaaaaagcatgatctgaaaaatacttttggtggtatgttggttaccctcctagctttccatttggtttagaacataaagcaaatagacacagtcatactgtcactgctctggactgtgtggagctcgctaaagtcatggtcattgcaggaatccaagtggcagtccttctcattcattctaatcattgtatgtgcttcactacgggggggagaaggaaacgttagcatcatgtttcccatttagggcaggagtgagaggtctctcttcctgatttagatatgcaaaagctggtatgttcagtaggaactgtacatgtgttgggaggcataaagactaattagcaaccataatatggtcactaccctaatagactaaatgaaatcttgcaatttcaaattactctttctccatattagatttacccacagctatatttctgtttaagtactagggtgagggttttctgttactttgttttttaatgttgttccttttgaaagaatcagtcttgcagctgagtgaaaaatctgtggaatgtattatttgtcctctttacatgaaactactcatacttaagcaaaagtcagtcttatagcaagactgttagccctcaaacttgactctactgatctgaccatttccctctcatcgccagacaactgacgatttccctggttttagtctgcgtctctgctttaaagttattgtgatatccttctagatcatacacaagtctaacagttaattagttaacagtttttaaactaggtttgtgggtatttttttggtagcacatgtatgctattacatacaaatttttatttctaaaatataagatctgagattgaatattttcattaaaagctacagttttgtgaatctttgtgcttcaacattctttgcaagatgatacggtatttaggcatttgccttatttttgcatctcacaaacataagtgcaatagatcttttcattgaacagcaaagtaggattcatcattccatatgacttgagttacaccagacctgttctgcccaatgcctttttgattacagtgtagcttgcccaccgcatttgtcgttttagatactttgctagccggccactttggatttcatcagacagtcctaacaatattgtctgaacggctgaatatgaatagatacagcagaggcactcctgatatatgatttttatccatgcgtcagtttttcccacccagtgtagcatcctaaagataaagccagaagctaagctgcagtgaggctgtgattgggcgtagaagtgggagcattgggacctcacattacacacacgagagatcataaccatgtgaaaaggcaaaaagcatgtgtttgcaacatctgataacttcatggcctttgataaatgtatatatgtatatgtgcatggactgtgtttccagtacacctttcagccaaaacagatccacagtagttgttgagttcaagtacataaagtacataacaagcgaacgtctagtacaattcttacttatgtgtatgggatttttccctttgaggttgctttgttttgtcttacaaaggtgaaaattgtttgtaagtgaagtgagaagttcatatttctttggcttttttgtgtttttaaaagttactccttttagggagctggtctgatgacttgcttagcttggaaatccttgttttcagtgtgtcgagtcaaaatgtgtttatgtgagctgtcactgtggggaaccaattgctttgtcatatagctggttatgaactagtaacatgtttgggaagtcctactgatgttcctttggaagaaaaaatctgctggttttaacaactgtgcttttgctatgtatggtatccaagttagttgaaacgcagacactgagatctgtttgagtttagggtcatttttagaaaggggcagtttaaagcacaatgtctcacatgggacaaagttccaaaatgccaaattcttattttttaaaaagctagttctataaaatactggtattatgggtggggaggaaatagaattgagtcaattggaaagactatccaacttaacatgaaacttgtcaccatgagatagcattagctgcccaggatgctgctatatatatatatatatatatatatgtgtgtgtgtgtgtgtgtgtgtgtgtatatatatatatatatatatatatatatatatatatatatgtgtgtgtatatatatatatatgtgtatatatatatgtatatacatatatgtatatatatgcacatatatatatgtatttaaaaaaatcaaaacaaaaaaaaactcatttatacctgtgtattttttaaagctacaatctgttcaatgtttttaaaaatctgtttatatgacattgttaaaataaagttggtcttttgacgagagggaggatgtcacggtcagttgtaactttgccttcacaaggcaactggggtggggggtgggggtagtgtgcctccttgacatttcgttcaagttatagattcaatggagctatgtcttgttttaagttgctttaatgcattgtattagatcttcaaacagaataaaggttgttttgaaactg

SEQ ID NO: 255099 - DNA, 6459 bp, Artificial Sequence
  derived and/or modified sequence
tacaaccaggctcaactgttgcatggtagcagatttgcaaacatgagtgctgaggggtaccagtacagagcgctgtatgattataaaaaggaaagagaagaagatattgacttgcacttgggtgacatattgactgtgaataaagggtccttagtagctcttggattcagtgatggacaggaagccaggcctgaagaaattggctggttaaatggctataatgaaaccacaggggaaaggggggactttccgggaacttacgtagaatatattggaaggaaaaaaatctcgcctcccacaccaaagccccggccacctcggcctcttcctgttgcaccaggttcttcgaaaactgaagcagatgttgaacaacaagctttgactctcccggatcttgcagagcagtttgcccctcctgacattgccccgcctcttcttatcaagctcgtggaagccattgaaaagaaaggtctggaatgttcaactctatacagaacacagagctccagcaacctggcagaattacgacagcttcttgattgtgatacaccctccgtggacttggaaatgatcgatgtgcacgttttggctgacgctttcaaacgctatctcctggacttaccaaatcctgtcattccagcagccgtttacagtgaaatgatttctttagctccagaagtacaaagctccgaagaatatattcagctattgaagaagcttattaggtcgcctagcatacctcatcagtattggcttacgcttcagtatttgttaaaacatttcttcaagctctctcaaacctccagcaaaaatctgttgaatgcaagagtactctctgaaattttcagccctatgcttttcagattctcagcagccagctctgataatactgaaaacctcataaaagttatagaaattttaatctcaactgaatggaatgaacgacagcctgcaccagcactgcctcctaaaccaccaaaacctactactgtagccaacaacggtatgaataacaatatgtccttacaagatgctgaatggtactggggagatatctcgagggaagaagtgaatgaaaaacttcgagatacagcagacgggacctttttggtacgagatgcgtctactaaaatgcatggtgattatactcttacactaaggaaagggggaaataacaaattaatcaaaatatttcatcgagatgggaaatatggcttctctgacccattaaccttcagttctgtggttgaattaataaaccactaccggaatgaatctctagctcagtataatcccaaattggatgtgaaattactttatccagtatccaaataccaacaggatcaagttgtcaaagaagataatattgaagctgtagggaaaaaattacatgaatataacactcagtttcaagaaaaaagtcgagaatatgatagattatatgaagaatatacccgcacatcccaggaaatccaaatgaaaaggacagctattgaagcatttaatgaaaccataaaaatatttgaagaacagtgccagacccaagagcggtacagcaaagaatacatagaaaagtttaaacgtgaaggcaatgagaaagaaatacaaaggattatgcataattatgataagttgaagtctcgaatcagtgaaattattgacagtagaagaagattggaagaagacttgaagaagcaggcagctgagtatcgagaaattgacaaacgtatgaacagcattaaaccagaccttatccagctgagaaagacgagagaccaatacttgatgtggttgactcaaaaaggtgttcggcaaaagaagttgaacgagtggttgggcaatgaaaacactgaagaaaactttctgtcctgcctgcctagccaatattcactggtggaagatgatgaagatttgccccatcatgatgagaagacatggaatgttggaagcagcaaccgaaacaaagctgaaaacctgttgcgagggaagcgagatggcacttttcttgtccgggagagcagtaaacagggctgctatgcctgctctgtagtggtggacggcgaagtaaagcattgtgtcataaacaaaacagcaactggctatggctttgccgagccctataacttgtacagctctctgaaagaactggtgctacattaccaacacacctcccttgtgcagcacaacgactccctcaatgtcacactagcctacccagtatatgcacagcagaggcgatgaagcgcttactctttgatccttctcctgaagttcagccaccctgaggcctctggaaagcaaagggctcctctccagtctgatctgtgaattgagctgcagaaacgaagccatctttctttggatgggactagagctttctttcacaaaaaagaagtaggggaagacatgcagcctaaggctgtatgatgaccacacgttcctaagctggagtgcttatcccttctttttctttttttctttggtttaatttaaagccacaaccacatacaacacaaagagaaaaagaaatgcaaaaatctctgcgtgcagggacaaagaggcctttaaccatggtgcttgttaatgctttctgaagctttaccagctgaaagttgggactctggagagcggaggagagagaggcagaagaaccctggcctgagaaggtttggtccagcctggtttagcctggatgttgctgtgcacggtggacccagacacatcgcactgtggattatttcattttgtaacaaatgaacgatatgtagcagaaaggcacgtccactcacaagggacgctttgggagaatgtcagttcatgtatgttcagaagaaattctgtcatagaaagtgccagaaagtgtttaacttgtcaaaaaacaaaaacccagcaacagaaaaatggagtttggaaaacaggacttaaaatgacattcagtatataaaatatgtacataatattggatgactaactatcaaatagatggatttgtatcaataccaaatagcttctgttttgttttgctgaaggctaaattcacagcgctatgcaattcttaattttcattaagttgttatttcagttttaaatgtaccttcagaataagcttccccaccccagtttttgttgcttgaaaatattgttgtcccggatttttgttaatattcatttttgttatccttttttaaaagtaaatgtacaggatgccagtaaaaaaaaaaaatggcttcagaattaaaactatgaaatattttacagtttttcttgtacagagtacttggctgttagcccaaggttaaaaagttcataacagattttttttggactgttttgttgggcagtgcctgataagcttcaaagctgctttattcaataaaaaaaagaaatgaaaaagatatatgaatatgacaaagtattgctgagtccaacaatgttgttttaagactcttaaaatacggtacctggcaatgtttatttcataaagaattgtgaacttcttgaatctagggagggggaatgtagtgaagggatgtatcaagtggggtggtgggagggggaggcaaggttatatgcactttctcatgatttacagagaagtgaataactgcaaagtgaagttgcttcttctacttcagtcttctctcactttgatttgctagttgttatcaattaatgacaattacaaacctactgtatctctaatacagtgtgactggtcaggtatttcagttcttaggaaggaagtgccaagtttgtttttgggttcctggaacagcgctcacctttgtttagaacactggtttaaagggataatcatctctgtcacattagactatccatcatgaccagcaaatactcattttaggaaaaaaaaaagcatgatctgaaaaatacttttggtggtatgttggttaccctcctagctttccatttggtttagaacataaagcaaatagacacagtcatactgtcactgctctggactgtgtggagctcgctaaagtcatggtcattgcaggaatccaagtggcagtccttctcattcattctaatcattgtatgtgcttcactacgggggggagaaggaaacgttagcatcatgtttcccatttagggcaggagtgagaggtctctcttcctgatttagatatgcaaaagctggtatgttcagtaggaactgtacatgtgttgggaggcataaagactaattagcaaccataatatggtcactaccctaatagactaaatgaaatcttgcaatttcaaattactctttctccatattagatttacccacagctatatttctgtttaagtactagggtgagggttttctgttactttgttttttaatgttgttccttttgaaagaatcagtcttgcagctgagtgaaaaatctgtggaatgtattatttgtcctctttacatgaaactactcatacttaagcaaaagtcagtcttatagcaagactgttagccctcaaacttgactctactgatctgaccatttccctctcatcgccagacaactgacgatttccctggttttagtctgcgtctctgctttaaagttattgtgatatccttctagatcatacacaagtctaacagttaattagttaacagtttttaaactaggtttgtgggtatttttttggtagcacatgtatgctattacatacaaatttttatttctaaaatataagatctgagattgaatattttcattaaaagctacagttttgtgaatctttgtgcttcaacattctttgcaagatgatacggtatttaggcatttgccttatttttgcatctcacaaacataagtgcaatagatcttttcattgaacagcaaagtaggattcatcattccatatgacttgagttacaccagacctgttctgcccaatgcctttttgattacagtgtagcttgcccaccgcatttgtcgttttagatactttgctagccggccactttggatttcatcagacagtcctaacaatattgtctgaacggctgaatatgaatagatacagcagaggcactcctgatatatgatttttatccatgcgtcagtttttcccacccagtgtagcatcctaaagataaagccagaagctaagctgcagtgaggctgtgattgggcgtagaagtgggagcattgggacctcacattacacacacgagagatcataaccatgtgaaaaggcaaaaagcatgtgtttgcaacatctgataacttcatggcctttgataaatgtatatatgtatatgtgcatggactgtgtttccagtacacctttcagccaaaacagatccacagtagttgttgagttcaagtacataaagtacataacaagcgaacgtctagtacaattcttacttatgtgtatgggatttttccctttgaggttgctttgttttgtcttacaaaggtgaaaattgtttgtaagtgaagtgagaagttcatatttctttggcttttttgtgtttttaaaagttactccttttagggagctggtctgatgacttgcttagcttggaaatccttgttttcagtgtgtcgagtcaaaatgtgtttatgtgagctgtcactgtggggaaccaattgctttgtcatatagctggttatgaactagtaacatgtttgggaagtcctactgatgttcctttggaagaaaaaatctgctggttttaacaactgtgcttttgctatgtatggtatccaagttagttgaaacgcagacactgagatctgtttgagtttagggtcatttttagaaaggggcagtttaaagcacaatgtctcacatgggacaaagttccaaaatgccaaattcttattttttaaaaagctagttctataaaatactggtattatgggtggggaggaaatagaattgagtcaattggaaagactatccaacttaacatgaaacttgtcaccatgagatagcattagctgcccaggatgctgctatatatatatatatatatatatatgtgtgtgtgtgtgtgtgtgtgtgtgtatatatatatatatatatatatatatatatatatatatatgtgtgtgtatatatatatatatgtgtatatatatatgtatatacatatatgtatatatatgcacatatatatatgtatttaaaaaaatcaaaacaaaaaaaaactcatttatacctgtgtattttttaaagctacaatctgttcaatgtttttaaaaatctgtttatatgacattgttaaaataaagttggtcttttgacgagagggaggatgtcacggtcagttgtaactttgccttcacaaggcaactggggtggggggtgggggtagtgtgcctccttgacatttcgttcaagttatagattcaatggagctatgtcttgttttaagttgctttaatgcattgtattagatcttcaaacagaataaaggttgttttgaaactg

SEQ ID NO: 255100 - DNA, 7011 bp, Artificial Sequence
  derived and/or modified sequence
gcgccgggcgctggagctgcgggcgcacggagaggagtcgccagcagctggagcggagttggaggaagcagcggcagcggcgagggcggcaggctagctgtcggagacggcaagcacggatcgggcacggccggcgggtcgcagccgggctggaggccggtcggaaccgagcgggcaggaggccaccgctgcagcgcgggccccgcagaggaaggaagccggcgggcggggtgaagctcgtgtgtggagtgccacggtacaatcagacgacagatggacagtgtgacaaaagtgtcagaaaggattgggcctcgctgtgagagtcagcctggattcaaagtgttgacaagttgctgaaaaggaagccagtgagaggactgtggcacgcagaggaagtggagccctgtcttcggtcacaccattgatggaggacagatggacagccgtatggccagtcacctctcctcttaaacctttggagagtggtcctttgtcctctgctggacacataataggaattctaacacattctctgaattcacttttcataaaaacgtaaaatcagactgctctgtacaaccaggctcaactgttgcatggtagcagatttgcaaacatgagtgctgaggggtaccagtacagagcgctgtatgattataaaaaggaaagagaagaagatattgacttgcacttgggtgacatattgactgtgaataaagggtccttagtagctcttggattcagtgatggacaggaagccaggcctgaagaaattggctggttaaatggctataatgaaaccacaggggaaaggggggactttccgggaacttacgtagaatatattggaaggaaaaaaatctcgcctcccacaccaaagccccggccacctcggcctcttcctgttgcaccaggttcttcgaaaactgaagcagatgttgaacaacaagctttgactctcccggatcttgcagagcagtttgcccctcctgacattgccccgcctcttcttatcaagctcgtggaagccattgaaaagaaaggtctggaatgttcaactctatacagaacacagagctccagcaacctggcagaattacgacagcttcttgattgtgatacaccctccgtggacttggaaatgatcgatgtgcacgttttggctgacgctttcaaacgctatctcctggacttaccaaatcctgtcattccagcagccgtttacagtgaaatgatttctttagctccagaagtacaaagctccgaagaatatattcagctattgaagaagcttattaggtcgcctagcatacctcatcagtattggcttacgcttcagtatttgttaaaacatttcttcaagctctctcaaacctccagcaaaaatctgttgaatgcaagagtactctctgaaattttcagccctatgcttttcagattctcagcagccagctctgataatactgaaaacctcataaaagttatagaaattttaatctcaactgaatggaatgaacgacagcctgcaccagcactgcctcctaaaccaccaaaacctactactgtagccaacaacggtatgaataacaatatgtccttacaagatgctgaatggtactggggagatatctcgagggaagaagtgaatgaaaaacttcgagatacagcagacgggacctttttggtacgagatgcgtctactaaaatgcatggtgattatactcttacactaaggaaagggggaaataacaaattaatcaaaatatttcatcgagatgggaaatatggcttctctgacccattaaccttcagttctgtggttgaattaataaaccactaccggaatgaatctctagctcagtataatcccaaattggatgtgaaattactttatccagtatccaaataccaacaggatcaagttgtcaaagaagataatattgaagctgtagggaaaaaattacatgaatataacactcagtttcaagaaaaaagtcgagaatatgatagattatatgaagaatatacccgcacatcccaggaaatccaaatgaaaaggacagctattgaagcatttaatgaaaccataaaaatatttgaagaacagtgccagacccaagagcggtacagcaaagaatacatagaaaagtttaaacgtgaaggcaatgagaaagaaatacaaaggattatgcataattatgataagttgaagtctcgaatcagtgaaattattgacagtagaagaagattggaagaagacttgaagaagcaggcagctgagtatcgagaaattgacaaacgtatgaacagcattaaaccagaccttatccagctgagaaagacgagagaccaatacttgatgtggttgactcaaaaaggtgttcggcaaaagaagttgaacgagtggttgggcaatgaaaacactgaagaccaatattcactggtggaagatgatgaagatttgccccatcatgatgagaagacatggaatgttggaagcagcaaccgaaacaaagctgaaaacctgttgcgagggaagcgagatggcacttttcttgtccgggagagcagtaaacagggctgctatgcctgctctgtagtggtggacggcgaagtaaagcattgtgtcataaacaaaacagcaactggctatggctttgccgagccctataacttgtacagctctctgaaagaactggtgctacattaccaacacacctcccttgtgcagcacaacgactccctcaatgtcacactagcctacccagtatatgcacagcagaggcgatgaagcgcttactctttgatccttctcctgaagttcagccaccctgaggcctctggaaagcaaagggctcctctccagtctgatctgtgaattgagctgcagaaacgaagccatctttctttggatgggactagagctttctttcacaaaaaagaagtaggggaagacatgcagcctaaggctgtatgatgaccacacgttcctaagctggagtgcttatcccttctttttctttttttctttggtttaatttaaagccacaaccacatacaacacaaagagaaaaagaaatgcaaaaatctctgcgtgcagggacaaagaggcctttaaccatggtgcttgttaatgctttctgaagctttaccagctgaaagttgggactctggagagcggaggagagagaggcagaagaaccctggcctgagaaggtttggtccagcctggtttagcctggatgttgctgtgcacggtggacccagacacatcgcactgtggattatttcattttgtaacaaatgaacgatatgtagcagaaaggcacgtccactcacaagggacgctttgggagaatgtcagttcatgtatgttcagaagaaattctgtcatagaaagtgccagaaagtgtttaacttgtcaaaaaacaaaaacccagcaacagaaaaatggagtttggaaaacaggacttaaaatgacattcagtatataaaatatgtacataatattggatgactaactatcaaatagatggatttgtatcaataccaaatagcttctgttttgttttgctgaaggctaaattcacagcgctatgcaattcttaattttcattaagttgttatttcagttttaaatgtaccttcagaataagcttccccaccccagtttttgttgcttgaaaatattgttgtcccggatttttgttaatattcatttttgttatccttttttaaaagtaaatgtacaggatgccagtaaaaaaaaaaaatggcttcagaattaaaactatgaaatattttacagtttttcttgtacagagtacttggctgttagcccaaggttaaaaagttcataacagattttttttggactgttttgttgggcagtgcctgataagcttcaaagctgctttattcaataaaaaaaagaaatgaaaaagatatatgaatatgacaaagtattgctgagtccaacaatgttgttttaagactcttaaaatacggtacctggcaatgtttatttcataaagaattgtgaacttcttgaatctagggagggggaatgtagtgaagggatgtatcaagtggggtggtgggagggggaggcaaggttatatgcactttctcatgatttacagagaagtgaataactgcaaagtgaagttgcttcttctacttcagtcttctctcactttgatttgctagttgttatcaattaatgacaattacaaacctactgtatctctaatacagtgtgactggtcaggtatttcagttcttaggaaggaagtgccaagtttgtttttgggttcctggaacagcgctcacctttgtttagaacactggtttaaagggataatcatctctgtcacattagactatccatcatgaccagcaaatactcattttaggaaaaaaaaaagcatgatctgaaaaatacttttggtggtatgttggttaccctcctagctttccatttggtttagaacataaagcaaatagacacagtcatactgtcactgctctggactgtgtggagctcgctaaagtcatggtcattgcaggaatccaagtggcagtccttctcattcattctaatcattgtatgtgcttcactacgggggggagaaggaaacgttagcatcatgtttcccatttagggcaggagtgagaggtctctcttcctgatttagatatgcaaaagctggtatgttcagtaggaactgtacatgtgttgggaggcataaagactaattagcaaccataatatggtcactaccctaatagactaaatgaaatcttgcaatttcaaattactctttctccatattagatttacccacagctatatttctgtttaagtactagggtgagggttttctgttactttgttttttaatgttgttccttttgaaagaatcagtcttgcagctgagtgaaaaatctgtggaatgtattatttgtcctctttacatgaaactactcatacttaagcaaaagtcagtcttatagcaagactgttagccctcaaacttgactctactgatctgaccatttccctctcatcgccagacaactgacgatttccctggttttagtctgcgtctctgctttaaagttattgtgatatccttctagatcatacacaagtctaacagttaattagttaacagtttttaaactaggtttgtgggtatttttttggtagcacatgtatgctattacatacaaatttttatttctaaaatataagatctgagattgaatattttcattaaaagctacagttttgtgaatctttgtgcttcaacattctttgcaagatgatacggtatttaggcatttgccttatttttgcatctcacaaacataagtgcaatagatcttttcattgaacagcaaagtaggattcatcattccatatgacttgagttacaccagacctgttctgcccaatgcctttttgattacagtgtagcttgcccaccgcatttgtcgttttagatactttgctagccggccactttggatttcatcagacagtcctaacaatattgtctgaacggctgaatatgaatagatacagcagaggcactcctgatatatgatttttatccatgcgtcagtttttcccacccagtgtagcatcctaaagataaagccagaagctaagctgcagtgaggctgtgattgggcgtagaagtgggagcattgggacctcacattacacacacgagagatcataaccatgtgaaaaggcaaaaagcatgtgtttgcaacatctgataacttcatggcctttgataaatgtatatatgtatatgtgcatggactgtgtttccagtacacctttcagccaaaacagatccacagtagttgttgagttcaagtacataaagtacataacaagcgaacgtctagtacaattcttacttatgtgtatgggatttttccctttgaggttgctttgttttgtcttacaaaggtgaaaattgtttgtaagtgaagtgagaagttcatatttctttggcttttttgtgtttttaaaagttactccttttagggagctggtctgatgacttgcttagcttggaaatccttgttttcagtgtgtcgagtcaaaatgtgtttatgtgagctgtcactgtggggaaccaattgctttgtcatatagctggttatgaactagtaacatgtttgggaagtcctactgatgttcctttggaagaaaaaatctgctggttttaacaactgtgcttttgctatgtatggtatccaagttagttgaaacgcagacactgagatctgtttgagtttagggtcatttttagaaaggggcagtttaaagcacaatgtctcacatgggacaaagttccaaaatgccaaattcttattttttaaaaagctagttctataaaatactggtattatgggtggggaggaaatagaattgagtcaattggaaagactatccaacttaacatgaaacttgtcaccatgagatagcattagctgcccaggatgctgctatatatatatatatatatatatatgtgtgtgtgtgtgtgtgtgtgtgtgtatatatatatatatatatatatatatatatatatatatatgtgtgtgtatatatatatatatgtgtatatatatatgtatatacatatatgtatatatatgcacatatatatatgtatttaaaaaaatcaaaacaaaaaaaaactcatttatacctgtgtattttttaaagctacaatctgttcaatgtttttaaaaatctgtttatatgacattgttaaaataaagttggtcttttgacgagagggaggatgtcacggtcagttgtaactttgccttcacaaggcaactggggtggggggtgggggtagtgtgcctccttgacatttcgttcaagttatagattcaatggagctatgtcttgttttaagttgctttaatgcattgtattagatcttcaaacagaataaaggttgttttgaaactgaa

SEQ ID NO: 255101 - DNA, 3891 bp, Artificial Sequence
  derived and/or modified sequence
agttggaggaagcagcggcagcggcgagggcggcaggctagctgtcggagacggcaagcacggatcgggcacggccggcgggtcgcagccgggctggaggccggtcggaaccgagcgggcaggaggccaccgctgcagcgcgggccccgcagaggaaggaagccggcgggcggggtaggtgaagctcgtgtgtggagtgccacggtacaatcagacgacagatggacagtgtgacaaaagtgtcagaaaggattgggcctcgctgtgagagtcagcctggattcaaagtgttgacaagttgctgaaaaggaagccagtgagaggactgtggcacgcagaggaagtggagccctgtcttcggtcacaccattgatggaggacagatggacagccgtatggccagtcacctctcctcttaaacctttggagagtggtcctttgtcctctgctggacacataataggaattctaacacattctctgaattcacttttcataaaaacgtaaaatcagactgctctgtacaaccaggctcaactgttgcatggtagcagatttgcaaacatgagtgctgaggggtaccagtacagagcgctgtatgattataaaaaggaaagagaagaagatattgacttgcacttgggtgacatattgactgtgaataaagggtccttagtagctcttggattcagtgatggacaggaagccaggcctgaagaaattggctggttaaatggctataatgaaaccacaggggaaaggggggactttccgggaacttacgtagaatatattggaaggaaaaaaatctcgcctcccacaccaaagccccggccacctcggcctcttcctgttgcaccaggttcttcgaaaactgaagcagatgttgaacaacaagctttgactctcccggatcttgcagagcagtttgcccctcctgacattgccccgcctcttcttatcaagctcgtggaagccattgaaaagaaaggtctggaatgttcaactctatacagaacacagagctccagcaacctggcagaattacgacagcttcttgattgtgatacaccctccgtggacttggaaatgatcgatgtgcacgttttggctgacgctttcaaacgctatctcctggacttaccaaatcctgtcattccagcagccgtttacagtgaaatgatttctttagctccagaagtacaaagctccgaagaatatattcagctattgaagaagcttattaggtcgcctagcatacctcatcagtattggcttacgcttcagtatttgttaaaacatttcttcaagctctctcaaacctccagcaaaaatctgttgaatgcaagagtactctctgaaattttcagccctatgcttttcagattctcagcagccagctctgataatactgaaaacctcataaaagttatagaaattttaatctcaactgaatggaatgaacgacagcctgcaccagcactgcctcctaaaccaccaaaacctactactgtagccaacaacggtatgaataacaatatgtccttacaagatgctgaatggtactggggagatatctcgagggaagaagtgaatgaaaaacttcgagatacagcagacgggacctttttggtacgagatgcgtctactaaaatgcatggtgattatactcttacactaaggaaagggggaaataacaaattaatcaaaatatttcatcgagatgggaaatatggcttctctgacccattaaccttcagttctgtggttgaattaataaaccactaccggaatgaatctctagctcagtataatcccaaattggatgtgaaattactttatccagtatccaaataccaacaggatcaagttgtcaaagaagataatattgaagctgtagggaaaaaattacatgaatataacactcagtttcaagaaaaaagtcgagaatatgatagattatatgaagaatatacccgcacatcccaggaaatccaaatgaaaaggacagctattgaagcatttaatgaaaccataaaaatatttgaagaacagtgccagacccaagagcggtacagcaaagaatacatagaaaagtttaaacgtgaaggcaatgagaaagaaatacaaaggattatgcataattatgataagttgaagtctcgaatcagtgaaattattgacagtagaagaagattggaagaagacttgaagaagcaggcagctgagtatcgagaaattgacaaacgtatgaacagcattaaaccagaccttatccagctgagaaagacgagagaccaatacttgatgtggttgactcaaaaaggtgttcggcaaaagaagttgaacgagtggttgggcaatgaaaacactgaagaccaatattcactggtggaagatgatgaagatttgccccatcatgatgagaagacatggaatgttggaagcagcaaccgaaacaaagctgaaaacctgttgcgagggaagcgagatggcacttttcttgtccgggagagcagtaaacagggctgctatgcctgctctgtagtggtggacggcgaagtaaagcattgtgtcataaacaaaacagcaactggctatggctttgccgagccctataacttgtacagctctctgaaagaactggtgctacattaccaacacacctcccttgtgcagcacaacgactccctcaatgtcacactagcctacccagtatatgcacagcagaggcgatgaagcgcttactctttgatccttctcctgaagttcagccaccctgaggcctctggaaagcaaagggctcctctccagtctgatctgtgaattgagctgcagaaacgaagccatctttctttggatgggactagagctttctttcacaaaaaagaagtaggggaagacatgcagcctaaggctgtatgatgaccacacgttcctaagctggagtgcttatcccttctttttctttttttctttggtttaatttaaagccacaaccacatacaacacaaagagaaaaagaaatgcaaaaatctctgcgtgcagggacaaagaggcctttaaccatggtgcttgttaatgctttctgaagctttaccagctgaaagttgggactctggagagcggaggagagagaggcagaagaaccctggcctgagaaggtttggtccagcctggtttagcctggatgttgctgtgcacggtggacccagacacatcgcactgtggattatttcattttgtaacaaatgaacgatatgtagcagaaaggcacgtccactcacaagggacgctttgggagaatgtcagttcatgtatgttcagaagaaattctgtcatagaaagtgccagaaagtgtttaacttgtcaaaaaacaaaaacccagcaacagaaaaatggagtttggaaaacaggacttaaaatgacattcagtatataaaatatgtacataatattggatgactaactatcaaatagatggatttgtatcaataccaaatagcttctgttttgttttgctgaaggctaaattcacagcgctatgcaattcttaattttcattaagttgttatttcagttttaaatgtaccttcagaataagcttccccaccccagtttttgttgcttgaaaatattgttgtcccggatttttgttaatattcatttttgttatccttttttaaaagtaaatgtacaggatgccagtaaaaaaaaaaaatggcttcagaattaaaactatgaaatattttacagtttttcttgtacagagtacttggctgttagcccaaggttaaaaagttcataacagattttttttggactgttttgttgggcagtgcctgataagcttcaaagctgctttattcaataaaaaaaagaaatgaaaaa

SEQ ID NO: 255102 - protein, 424 aa, Artificial Sequence
  derived and/or modified sequence
MHNLQTLPPKPPKPTTVANNGMNNNMSLQDAEWYWGDISREEVNEKLRDTADGTFLVRDASTKMHGDYTLTLRKGGNNKLIKIFHRDGKYGFSDPLTFSSVVELINHYRNESLAQYNPKLDVKLLYPVSKYQQDQVVKEDNIEAVGKKLHEYNTQFQEKSREYDRLYEEYTRTSQEIQMKRTAIEAFNETIKIFEEQCQTQERYSKEYIEKFKREGNEKEIQRIMHNYDKLKSRISEIIDSRRRLEEDLKKQAAEYREIDKRMNSIKPDLIQLRKTRDQYLMWLTQKGVRQKKLNEWLGNENTEDQYSLVEDDEDLPHHDEKTWNVGSSNRNKAENLLRGKRDGTFLVRESSKQGCYACSVVVDGEVKHCVINKTATGYGFAEPYNLYSSLKELVLHYQHTSLVQHNDSLNVTLAYPVYAQQRR

SEQ ID NO: 255103 - DNA, 1275 bp, Artificial Sequence
  derived and/or modified sequence
atgcacaacctgcagaccctgccccccaagccccccaagcccaccaccgtggccaacaacggcatgaacaacaacatgagcctgcaggacgccgagtggtactggggcgacatcagcagagaggaggtgaacgagaagctgagagacaccgccgacggcaccttcctggtgagagacgccagcaccaagatgcacggcgactacaccctgaccctgagaaagggcggcaacaacaagctgatcaagatcttccacagagacggcaagtacggcttcagcgaccccctgaccttcagcagcgtggtggagctgatcaaccactacagaaacgagagcctggcccagtacaaccccaagctggacgtgaagctgctgtaccccgtgagcaagtaccagcaggaccaggtggtgaaggaggacaacatcgaggccgtgggcaagaagctgcacgagtacaacacccagttccaggagaagagcagagagtacgacagactgtacgaggagtacaccagaaccagccaggagatccagatgaagagaaccgccatcgaggccttcaacgagaccatcaagatcttcgaggagcagtgccagacccaggagagatacagcaaggagtacatcgagaagttcaagagagagggcaacgagaaggagatccagagaatcatgcacaactacgacaagctgaagagcagaatcagcgagatcatcgacagcagaagaagactggaggaggacctgaagaagcaggccgccgagtacagagagatcgacaagagaatgaacagcatcaagcccgacctgatccagctgagaaagaccagagaccagtacctgatgtggctgacccagaagggcgtgagacagaagaagctgaacgagtggctgggcaacgagaacaccgaggaccagtacagcctggtggaggacgacgaggacctgccccaccacgacgagaagacctggaacgtgggcagcagcaacagaaacaaggccgagaacctgctgagaggcaagagagacggcaccttcctggtgagagagagcagcaagcagggctgctacgcctgcagcgtggtggtggacggcgaggtgaagcactgcgtgatcaacaagaccgccaccggctacggcttcgccgagccctacaacctgtacagcagcctgaaggagctggtgctgcactaccagcacaccagcctggtgcagcacaacgacagcctgaacgtgaccctggcctaccccgtgtacgcccagcagagaagatag

SEQ ID NO: 255104 - DNA, 1275 bp, Artificial Sequence
  derived and/or modified sequence
atgcacaacctgcagacacttccacccaagccacctaaaccaacgactgtcgccaataatggcatgaataataatatgagcctgcaggatgccgagtggtattggggcgatatcagccgggaggaggtgaatgaaaaactgcgggataccgccgacggcaccttcctagtcagggacgccagcactaagatgcacggggactataccttgaccctgcggaagggagggaataacaaattaatcaaaatattccatcgtgacggtaagtacgggttcagtgaccccctgaccttctcctccgtggtcgaacttatcaatcactaccggaacgaatcgctggcccaatacaatccaaagctggatgtgaaattgctctaccccgtgtccaaataccaacaggatcaggtcgtgaaagaggataatatcgaggccgttggtaagaagctgcatgagtataatacacagttccaggagaaatcgcgggagtacgaccggctgtacgaggagtacacacgtacgtcccaagagattcagatgaagcgcactgctattgaagcattcaatgaaacgattaagatttttgaggaacagtgtcagacacaagagcggtactccaaggaatacatcgagaagtttaagagagagggaaatgagaaagagatccagcgcatcatgcataactatgacaaactgaagagtaggatttcagagatcatcgactcaagacggcgcctcgaagaggatcttaaaaagcaggcagctgagtatcgcgaaattgacaagcggatgaatagcatcaagccagacctcatccagctccgtaagacccgggatcaatacctcatgtggctgacccaaaagggcgttcgccaaaaaaaactgaacgaatggctcggcaacgagaatacagaggatcaatacagtcttgttgaggatgatgaggaccttcctcaccacgatgagaaaacctggaacgtgggatcgtctaatcgcaataaagccgaaaatttgttgcgcgggaaaagggatggcacattcctggtgcgggagtcgtcaaaacaggggtgctacgcatgtagtgtcgtggtcgatggcgaggtgaagcattgtgtgatcaataaaacagctaccggatatggctttgccgaaccctataatttgtactcttcccttaaagaacttgtgctccattaccagcatacttcccttgtgcagcacaatgacagccttaatgttaccttggcctaccctgtgtacgcccagcagcgtcgctag

SEQ ID NO: 255105 - DNA, 1275 bp, Artificial Sequence
  derived and/or modified sequence
atgcacaacctgcagaccctgccccccaagccacccaagcccaccaccgtggccaacaacggcatgaacaacaacatgagcctgcaggatgctgagtggtactggggagacatcagccgggaggaggtgaatgagaagctgcgggacacagcagatggcaccttcctggtgagagatgccagcaccaagatgcatggagactacaccctgaccctgaggaagggcggcaacaacaagctgatcaagatcttccacagagatggcaagtatggcttcagtgaccccctgaccttcagctctgtggtggagctgatcaaccactacagaaatgaaagcctggcccagtacaaccccaagctggatgtgaagctgctgtaccctgtgtccaagtaccagcaggaccaggtggtgaaggaggacaacatcgaggccgtgggcaagaagctgcacgagtacaacacccagttccaggagaagagccgggagtatgaccggctgtatgaggagtacaccaggaccagccaggagatccagatgaagaggacagccatcgaggccttcaatgagaccatcaagatctttgaggagcagtgccagacccaggagcgctacagcaaggagtacatcgagaagttcaagcgggagggcaatgagaaggagatccagaggatcatgcacaactatgacaagctgaagagccgcatcagcgagatcatcgacagcagaagaaggctggaggaggacctgaagaagcaggccgctgagtaccgggagattgacaagaggatgaacagcatcaagccagacctgatccagctgaggaagacccgggaccagtacctgatgtggctgacccagaagggcgtgcggcagaagaagctgaatgagtggctgggcaatgaaaatacagaggaccagtacagcctggtggaggatgatgaggacctgccccaccatgatgagaagacctggaatgtgggcagcagcaacagaaacaaggccgagaacctgctgcggggcaagagagatggcaccttcctggtgcgggagagcagcaagcagggctgctacgcctgcagcgtggtggtggatggagaggtgaagcactgcgtcatcaacaagacagccaccggctacggctttgctgagccctacaacctgtacagcagcctgaaggagctggtgctgcactaccagcacaccagcctggtgcagcacaatgacagcctgaatgtgaccctggcctaccctgtgtatgcccagcagaggaggtag

SEQ ID NO: 255106 - DNA, 1275 bp, Artificial Sequence
  derived and/or modified sequence
atgcacaacctgcagaccctgccccccaagccccccaagcccaccacagttgccaacaacggcatgaataataacatgagcctacaggacgcagagtggtattggggcgacatctcaagagaggaggtgaacgagaagctgagggatacagccgacgggactttcctggtcagagatgccagcactaagatgcacggtgattacaccctgaccctcagaaagggcggaaataacaaactgatcaaaattttccacagagacgggaagtacggcttctccgacccacttactttttccagtgtggttgagctgatcaatcactacagaaacgaaagtctcgctcagtacaatccaaagctggatgtcaaactcctctaccccgtgagtaaatatcagcaagatcaggtcgtgaaggaagacaatatcgaggctgtcgggaaaaagctccacgagtacaatacgcaattccaggaaaaatctcgcgagtatgaccgactgtacgaggagtatacgcggaccagtcaggaaattcagatgaagcggaccgccattgaagccttcaacgaaacaatcaagatcttcgaggagcagtgccagacgcaagagagatatagtaaggagtatattgaaaaattcaaacgggaaggaaatgaaaaggagatccaacgcatcatgcataactacgacaagctgaagagtaggataagtgaaattatcgattcccgccgacgcctggaggaggatttgaaaaaacaggctgccgagtatagggagatcgacaaacgaatgaactcgatcaaacctgacctgattcagttgagaaaaaccagggaccagtatctcatgtggctaacacaaaagggcgtgaggcaaaagaagctaaacgagtggctgggcaatgagaacacggaggatcaatacagcctggtagaagatgacgaagatctccctcaccacgacgagaaaacatggaatgtaggcagctctaacaggaataaagccgaaaatttgctgagggggaagagggatggaaccttcctcgtcagggaaagctctaaacaaggctgctacgcctgttctgtggtggtcgacggtgaggtgaagcactgtgtaattaacaagacagcaactggctacggcttcgcagagccttacaatctgtatagctcactcaaggagctggttcttcattatcagcacactagtctagtccaacataatgactctttaaacgtgacactcgcctatccagtgtacgcacaacagagaagatag

SEQ ID NO: 255107 - DNA, 1275 bp, Artificial Sequence
  derived and/or modified sequence
atgcataacctccaaactctgccaccaaaacctcctaagcctactactgtggcgaataatggaatgaataacaatatgtccttgcaggatgctgagtggtattggggcgacatttccagagaagaagttaacgagaaattaagagacacagcggatggaacattcctggtaagggacgccagcacaaagatgcacggcgattataccctcactctgcgaaaaggaggcaataacaagcttatcaagattttccaccgtgacggaaagtatggatttagcgacccgttgacatttagctcagttgtggaactgataaaccactaccgaaacgagagcttagcccaatacaaccccaagctggacgttaaactgttgtatcccgtgtcaaagtatcagcaggatcaggtggtcaaagaagataatatcgaagccgtagggaaaaagctccatgagtacaacacgcagttccaggaaaagagccgtgagtacgatcggctgtatgaagaatacacacgaacaagccaggaaatccagatgaaaagaacggccatcgaagcgttcaatgagacgattaagatctttgaggaacagtgccagactcaggaacggtatagcaaggaatatatcgagaagtttaagagagagggaaacgagaaggagattcagaggattatgcataattatgacaagttgaagagcagaatttccgagatcattgactccaggcggaggctggaagaggacctgaagaagcaggccgcagaataccgggagatcgacaagaggatgaattcaatcaagccggacctgattcaattaaggaagacgagggatcaatatcttatgtggctaacccagaaaggggttaggcagaagaaattaaacgagtggctggggaacgaaaacaccgaagaccaatactcacttgtggaggatgatgaggatctcccacaccatgatgagaagacttggaacgtgggctcctccaacaggaataaggctgaaaatctgctgcggggaaaaagggatgggacgttcctcgtccgagagtccagcaaacaggggtgttatgcctgtagtgtcgtggtcgacggtgaggtgaaacattgcgtgatcaacaagaccgctaccgggtacggattcgccgaaccgtacaacctgtactcttcactgaaggagttagtgttgcactaccagcataccagcctggtgcagcataacgattccctgaatgtgactcttgcctaccctgtctacgctcagcagcgccgttag

SEQ ID NO: 255108 - DNA, 2473 bp, Artificial Sequence
  derived and/or modified sequence
attattgacagagatgtcagtgaagtgccagagtgaagtggcactgcctaagaacagagtgtgaaggcactctatctattaagcacaactctaagaattcttgccttaaacacaataagaaaacaatgccattttatgttagctttgggaagggggagtaagggaagaagtgaatgaaaaacttcgagatacagcagacgggacctttttggtacgagatgcgtctactaaaatgcatggtgattatactcttacactaaggaaagggggaaataacaaattaatcaaaatatttcatcgagatgggaaatatggcttctctgacccattaaccttcagttctgtggttgaattaataaaccactaccggaatgaatctctagctcagtataatcccaaattggatgtgaaattactttatccagtatccaaataccaacaggatcaagttgtcaaagaagataatattgaagctgtagggaaaaaattacatgaatataacactcagtttcaagaaaaaagtcgagaatatgatagattatatgaagaatatacccgcacatcccaggaaatccaaatgaaaaggacagctattgaagcatttaatgaaaccataaaaatatttgaagaacagtgccagacccaagagcggtacagcaaagaatacatagaaaagtttaaacgtgaaggcaatgagaaagaaatacaaaggattatgcataattatgataagttgaagtctcgaatcagtgaaattattgacagtagaagaagattggaagaagacttgaagaagcaggcagctgagtatcgagaaattgacaaacgtatgaacagcattaaaccagaccttatccagctgagaaagacgagagaccaatacttgatgtggttgactcaaaaaggtgttcggcaaaagaagttgaacgagtggttgggcaatgaaaacactgaagaccaatattcactggtggaagatgatgaagatttgccccatcatgatgagaagacatggaatgttggaagcagcaaccgaaacaaagctgaaaacctgttgcgagggaagcgagatggcacttttcttgtccgggagagcagtaaacagggctgctatgcctgctctgtagtggtggacggcgaagtaaagcattgtgtcataaacaaaacagcaactggctatggctttgccgagccctataacttgtacagctctctgaaagaactggtgctacattaccaacacacctcccttgtgcagcacaacgactccctcaatgtcacactagcctacccagtatatgcacagcagaggcgatgaagcgcttactctttgatccttctcctgaagttcagccaccctgaggcctctggaaagcaaagggctcctctccagtctgatctgtgaattgagctgcagaaacgaagccatctttctttggatgggactagagctttctttcacaaaaaagaagtaggggaagacatgcagcctaaggctgtatgatgaccacacgttcctaagctggagtgcttatcccttctttttctttttttctttggtttaatttaaagccacaaccacatacaacacaaagagaaaaagaaatgcaaaaatctctgcgtgcagggacaaagaggcctttaaccatggtgcttgttaatgctttctgaagctttaccagctgaaagttgggactctggagagcggaggagagagaggcagaagaaccctggcctgagaaggtttggtccagcctggtttagcctggatgttgctgtgcacggtggacccagacacatcgcactgtggattatttcattttgtaacaaatgaacgatatgtagcagaaaggcacgtccactcacaagggacgctttgggagaatgtcagttcatgtatgttcagaagaaattctgtcatagaaagtgccagaaagtgtttaacttgtcaaaaaacaaaaacccagcaacagaaaaatggagtttggaaaacaggacttaaaatgacattcagtatataaaatatgtacataatattggatgactaactatcaaatagatggatttgtatcaataccaaatagcttctgttttgttttgctgaaggctaaattcacagcgctatgcaattcttaattttcattaagttgttatttcagttttaaatgtaccttcagaataagcttccccaccccagtttttgttgcttgaaaatattgttgtcccggatttttgttaatattcatttttgttatccttttttaaaagtaaatgtacaggatgccagtaaaaaaaaaaaatggcttcagaattaaaactatgaaatattttacagtttttcttgtacagagtacttggctgttagcccaaggttaaaaagttcataacagattttttttggactgttttgttgggcagtgcctgataagcttcaaagctgctttattcaataaaaaaaagaaatgaaaaagat

SEQ ID NO: 255109 - DNA, 2625 bp, Artificial Sequence
  derived and/or modified sequence
atctttatctaagggagacgtgcgagcgcctgggctcctttcctccccgatacagtagcgaaatccagttggcttctcaatgaggagccggcagtgagcggcggtggcccggacgcactgccgggcggggcgtggggcggagggacgagccgagccgagccaagcggagctgggccactgtgcacgcccggagggtcctggcggcgcccccgctcctgcgcgcactctcggcgccggacacgagcactgcctgccgggaacaggctggggggaggtgcgggggcttggcccacttggtggaagaacagctttggggattttttttttttcattgtcggatacaggcatttcaaagggaaaccgttgaaatgcataacctgcaaacactgcctcctaaaccaccaaaacctactactgtagccaacaacggtatgaataacaatatgtccttacaagatgctgaatggtactggggagatatctcgagggaagaagtgaatgaaaaacttcgagatacagcagacgggacctttttggtacgagatgcgtctactaaaatgcatggtgattatactcttacactaaggaaagggggaaataacaaattaatcaaaatatttcatcgagatgggaaatatggcttctctgacccattaaccttcagttctgtggttgaattaataaaccactaccggaatgaatctctagctcagtataatcccaaattggatgtgaaattactttatccagtatccaaataccaacaggatcaagttgtcaaagaagataatattgaagctgtagggaaaaaattacatgaatataacactcagtttcaagaaaaaagtcgagaatatgatagattatatgaagaatatacccgcacatcccaggaaatccaaatgaaaaggacagctattgaagcatttaatgaaaccataaaaatatttgaagaacagtgccagacccaagagcggtacagcaaagaatacatagaaaagtttaaacgtgaaggcaatgagaaagaaatacaaaggattatgcataattatgataagttgaagtctcgaatcagtgaaattattgacagtagaagaagattggaagaagacttgaagaagcaggcagctgagtatcgagaaattgacaaacgtatgaacagcattaaaccagaccttatccagctgagaaagacgagagaccaatacttgatgtggttgactcaaaaaggtgttcggcaaaagaagttgaacgagtggttgggcaatgaaaacactgaagaccaatattcactggtggaagatgatgaagatttgccccatcatgatgagaagacatggaatgttggaagcagcaaccgaaacaaagctgaaaacctgttgcgagggaagcgagatggcacttttcttgtccgggagagcagtaaacagggctgctatgcctgctctgtagtggtggacggcgaagtaaagcattgtgtcataaacaaaacagcaactggctatggctttgccgagccctataacttgtacagctctctgaaagaactggtgctacattaccaacacacctcccttgtgcagcacaacgactccctcaatgtcacactagcctacccagtatatgcacagcagaggcgatgaagcgcttactctttgatccttctcctgaagttcagccaccctgaggcctctggaaagcaaagggctcctctccagtctgatctgtgaattgagctgcagaaacgaagccatctttctttggatgggactagagctttctttcacaaaaaagaagtaggggaagacatgcagcctaaggctgtatgatgaccacacgttcctaagctggagtgcttatcccttctttttctttttttctttggtttaatttaaagccacaaccacatacaacacaaagagaaaaagaaatgcaaaaatctctgcgtgcagggacaaagaggcctttaaccatggtgcttgttaatgctttctgaagctttaccagctgaaagttgggactctggagagcggaggagagagaggcagaagaaccctggcctgagaaggtttggtccagcctggtttagcctggatgttgctgtgcacggtggacccagacacatcgcactgtggattatttcattttgtaacaaatgaacgatatgtagcagaaaggcacgtccactcacaagggacgctttgggagaatgtcagttcatgtatgttcagaagaaattctgtcatagaaagtgccagaaagtgtttaacttgtcaaaaaacaaaaacccagcaacagaaaaatggagtttggaaaacaggacttaaaatgacattcagtatataaaatatgtacataatattggatgactaactatcaaatagatggatttgtatcaataccaaatagcttctgttttgttttgctgaaggctaaattcacagcgctatgcaattcttaattttcattaagttgttatttcagttttaaatgtaccttcagaataagcttccccaccccagtttttgttgcttgaaaatattgttgtcccggatttttgttaatattcatttttgttatccttttttaaaagtaaatgtacaggatgccagtaaaaaaaaaaaa

SEQ ID NO: 255110 - DNA, 540 bp, Artificial Sequence
  derived and/or modified sequence
ttcattgtcggatacaggcatttcaaagggaaaccgttgaaatgcataacctgcaaaggaagaagtgaatgaaaaacttcgagatacagcagacgggacctttttggtacgagatgcgtctactaaaatgcatggtgattatactcttacactaaggaaagggggaaataacaaattaatcaaaatatttcatcgagatgggaaatatggcttctctgacccattaaccttcagttctgtggttgaattaataaaccactaccggaatgaatctctagctcagtataatcccaaattggatgtgaaattactttatccagtatccaaataccaacaggatcaagttgtcaaagaagataatattgaagctgtagggaaaaaattacatgaatataacactcagtttcaagaaaaaagtcgagaatatgatagattatatgaagaatatacccgcacatcccaggaaatccaaatgaaaaggacagctattgaagcatttaatgaaaccataaaaatatttgaagaacagtgccagaccca

SEQ ID NO: 255111 - protein, 118 aa, Artificial Sequence
  derived and/or modified sequence
MSSKRAKAKTTKKRPQRATSNVFAMFDQSQIQEFKEAFNMIDQNRDGFIDKEDLHDMLASLGFIHEDHLRELLTTMGDRFTDEEVDEMYREAPIDKKGNFNYVEFTRILKHGAKDKDD

SEQ ID NO: 255112 - DNA, 357 bp, Artificial Sequence
  derived and/or modified sequence
atgagcagcaagagagccaaggccaagaccaccaagaagagaccccagagagccaccagcaacgtgttcgccatgttcgaccagagccagatccaggagttcaaggaggccttcaacatgatcgaccagaacagagacggcttcatcgacaaggaggacctgcacgacatgctggccagcctgggcttcatccacgaggaccacctgagagagctgctgaccaccatgggcgacagattcaccgacgaggaggtggacgagatgtacagagaggcccccatcgacaagaagggcaacttcaactacgtggagttcaccagaatcctgaagcacggcgccaaggacaaggacgactag

SEQ ID NO: 255113 - DNA, 357 bp, Artificial Sequence
  derived and/or modified sequence
atgagttcaaagagggctaaggccaaaaccacaaagaagcggccccagcgcgccaccagtaacgtgtttgctatgtttgatcagagccagatccaggaattcaaagaggccttcaatatgattgaccagaacagggatgggtttatcgataaagaagatttacacgatatgctcgcctcactgggatttatccatgaggaccatctgagggagttgctgacaaccatgggcgaccgctttactgatgaagaggtggacgaaatgtatagggaggctcctatagacaagaaaggaaatttcaactatgtggagtttaccagaatcctcaagcatggagcaaaagataaggatgattag

SEQ ID NO: 255114 - DNA, 357 bp, Artificial Sequence
  derived and/or modified sequence
atgagcagcaagagggccaaggccaagaccaccaagaagaggccccagagggccaccagcaatgtgtttgccatgtttgaccagagccagatccaggagttcaaggaggccttcaacatgattgaccagaacagagatggcttcatcgacaaggaggacctgcatgacatgctggccagcctgggcttcatccacgaggaccacctgcgggagctgctgaccaccatgggagaccgcttcacagatgaggaggtggatgagatgtaccgggaggcccccatcgacaagaagggcaacttcaactacgtggagttcacccgcatcctgaagcatggagccaaggacaaggatgactag

SEQ ID NO: 255115 - DNA, 357 bp, Artificial Sequence
  derived and/or modified sequence
atgagcagcaagcgggccaaggccaagaccaccaagaagcggccccaacgagctacgagcaacgtgtttgctatgtttgatcagtcccagatccaggaatttaaagaagccttcaacatgattgatcaaaatcgcgacggattcattgacaaggaagatctccacgacatgctggccagcttgggatttatccacgaagaccatctgagagagctactcacaaccatgggcgacagatttaccgacgaggaagttgatgaaatgtatagagaagcccccatcgacaaaaaaggaaattttaactacgttgaatttacgcgaatcctcaagcacggggccaaggacaaggatgactag

SEQ ID NO: 255116 - DNA, 1024 bp, Artificial Sequence
  derived and/or modified sequence
gtccagacccgacggccggcccagttccacgcacccagcgagcccaagcgccttctccgcaccagggaagccccacccaccagaagccaagatgtccagcaagcgggccaaagccaagaccaccaagaagcggccacagcgggccacatccaatgtcttcgcaatgtttgaccagtcccagatccaggagtttaaggaggctttcaacatgattgaccagaaccgtgatggcttcattgacaaggaggacctgcacgacatgctggcctcgctgggtttcatccatgaggaccacctccgggagctgctcaccaccatgggtgaccgcttcacagatgaggaagtggacgagatgtaccgggaggcacccattgataagaaaggcaacttcaactacgtggagttcacccgcatcctcaaacatggcgccaaggataaagacgactaggccaccccagccccctgacaccccagcccccgccagtcacccctccccgcacacacccgtccataccagctccctgcccatgaccctcgctcagggatccccctttgaggggttagggtcccagttcccagtggaagaaacaggccaggagaagtgcgtgccgagctgaggcagatgttcccacagtgaccccagagccctgggctatagtctctgacccctccaaggaaagaccaccttctggggacatgggctggagggcaggacctagaggcaccaagggaaggccccattccggggctgttccccgaggaggaagggaaggggctctgtgtgccccccaggaggaagaggccctgagtcctgggatcagacaccccttcacgtgtatccccacacaaatgcaagctcaccaaggtcccctctcagtccccttccctacaccctgaccggccactgccgcacacccacccagagcacgccacccgccatgggagtgtgctcaggagtcgcgggcagcgtggacatctgtcccagagggggcagaatctccaatagaggactgagcactgcttc

SEQ ID NO: 255117 - DNA, 357 bp, Artificial Sequence
  derived and/or modified sequence
atgtccagtaagagagctaaggctaagaccaccaagaagaggccacagcgggcaacatccaacgtgttcgcaatgttcgatcagagccagatccaggaatttaaggaggccttcaacatgatcgaccagaatcgcgacggattcattgacaaggaggacttgcacgatatgcttgctagccttgggttcatccatgaagaccacctgcgggagttgctgacaactatgggggaccgattcacggacgaagaggtcgacgagatgtatagggaggcacctattgataagaagggtaattttaattatgtggagtttaccagaattcttaagcacggagcaaaggataaggacgactag

SEQ ID NO: 255118 - protein, 166 aa, Artificial Sequence
  derived and/or modified sequence
MLSQSCNLDPLTETYGIPFYLQYLAHWPEYFIVAEAPGGELMGYIMGKAEGSVAREEWHGHVTALSVAPEFRRLGLAAKLMELLEEISERKGGFFVDLFVRVSNQVAVNMYKQLGYSVYRTVIEYYSASNGEPDEDAYDMRKALSRDTEKKSIIPLPHPVRPEDIE

SEQ ID NO: 255119 - DNA, 501 bp, Artificial Sequence
  derived and/or modified sequence
atgctgagccagagctgcaacctggaccccctgaccgagacctacggcatccccttctacctgcagtacctggcccactggcccgagtacttcatcgtggccgaggcccccggcggcgagctgatgggctacatcatgggcaaggccgagggcagcgtggccagagaggagtggcacggccacgtgaccgccctgagcgtggcccccgagttcagaagactgggcctggccgccaagctgatggagctgctggaggagatcagcgagagaaagggcggcttcttcgtggacctgttcgtgagagtgagcaaccaggtggccgtgaacatgtacaagcagctgggctacagcgtgtacagaaccgtgatcgagtactacagcgccagcaacggcgagcccgacgaggacgcctacgacatgagaaaggccctgagcagagacaccgagaagaagagcatcatccccctgccccaccccgtgagacccgaggacatcgagtag

SEQ ID NO: 255120 - DNA, 501 bp, Artificial Sequence
  derived and/or modified sequence
atgctttcacagtcttgcaatctggatcccctgactgagacctatggtatcccattttatctccaatatctggcgcactggccggaatattttattgtggcggaggcccctggaggggaactgatgggatatatcatgggaaaggccgaaggatctgtcgcgcgggaggagtggcacggccatgtgacggccttgagtgtggcccctgaattccgccgcctcggcctcgcagccaagctgatggaattattggaggaaatcagtgaaagaaaggggggattctttgttgaccttttcgtgagagtctctaatcaggtggcagtcaacatgtataagcagcttgggtacagtgtgtacagaaccgtaattgagtactactccgcctcaaatggagagcccgatgaagacgcttacgacatgcgcaaggctctgagccgagacactgaaaagaaaagtatcatccctcttcctcacccagtacgtcccgaggacatagagtag

SEQ ID NO: 255121 - DNA, 501 bp, Artificial Sequence
  derived and/or modified sequence
atgctgagccagagctgcaacctggaccccctgacagagacctacggcatccccttctacctgcagtacctggcccactggccagagtacttcatcgtggccgaggcccctggaggagagctgatgggctacatcatgggcaaggccgagggctctgtggcccgggaggagtggcacggccacgtgacagccctgtctgtggcccctgagttccggcggctgggcctggccgccaagctgatggagctgctggaggagatcagcgagaggaaaggaggcttctttgtggacctgtttgtgcgggtgagcaaccaggtggccgtgaacatgtacaagcagctgggctacagcgtgtacagaacagtgattgagtactacagcgccagcaatggagagccagatgaagatgcctatgacatgaggaaggccctgagccgggacacagagaagaagagcatcatccccctgccccaccctgtgcggccagaagatattgaatag

SEQ ID NO: 255122 - DNA, 501 bp, Artificial Sequence
  derived and/or modified sequence
atgctgagccagagctgcaacctggaccccctgaccgagacctacggaattcctttctatctacagtacctggcgcattggcccgaatattttattgtggcagaagctcctggcggcgaactcatgggatacatcatgggaaaagctgaggggagcgttgcaagagaggagtggcatggtcacgtcaccgccctttcagtggcacctgagtttaggaggctgggcctggctgccaaactgatggaactcctagaggagatttcagagaggaagggtggatttttcgtggacctcttcgttcgagtatctaaccaggtggcggtaaacatgtataaacagttgggctactctgtctacagaactgttatcgagtactactctgcgtccaatggtgagccagacgaggatgcctacgacatgcggaaagcactatccagagacactgaaaaaaagagtatcattcctctgccccatccagtgcgtccagaagacattgagtag

SEQ ID NO: 255123 - DNA, 1604 bp, Artificial Sequence
  derived and/or modified sequence
cggcgcgatgaccacgctacgggcctttacctgcgacgacctgttccgcttcaacaacatgtgagtgacacgcgcctagggccagccgctcttggccgggcctcgcttcccggccccgccagctccggccccagccgcgccttcccggccggaccccaagcccggacggggacccgcgagaaccaccccccgccggccaacgtgggcgcctccctggggccacagggtccagggagaggtgggcctggagtcgacgcacgccggccttggcgaccttggccgaggtgctcaaactttgtctctggaccctgcgagctggcaggttctggggcagcgctcgggcctccgctcgtggtcgctgtcaggaggcgctggggtgatggggcgagctggagacgcggcctggagcccacgacctgggcttctcgccctgccctactgcttgctggttcgtggccgggccgcgcctcttctgggcagagggcaccgccgacggccaggccgcagagggggcttgcgaggatcggaagctggtcagcagctgttgggatgtgtacatcgtgaagcccacctggtggccgtggttaaattgtatccaaatgaaatgacactgatcactgcgtcccctgcagcagatgctgtctcagtcatgtaacttggatccacttacagaaacttatgggattcctttctacctacaatacctcgcccactggccagagtatttcattgttgcagaggcacctggtggagaattaatgggttatattatgggtaaagcagaaggctcagtagctagggaagaatggcacgggcacgtcacagctctgtctgttgccccagaatttcgacgccttggtttggctgctaaacttatggagttactagaggagatttcagaaagaaagggtggattttttgtggatctctttgtaagagtatctaaccaagttgcagttaacatgtacaagcagttgggctacagtgtatataggacggtcatagagtactattcggccagcaacggggagcctgatgaggacgcttatgatatgaggaaagcactttccagggatactgagaagaaatccatcataccattacctcatcctgtgaggcctgaagacattgaataaccctgggcagtggttcttaggcagatactctagatgctttatggacaatattattttcattggatgattctggagctctattaggagaaaagtaatcattttaggtcttaaagacttcaagaaaatacaggttatcaatttattttaaatctcattgtttccagttagcaatatcatacctattaaagctgttcattgtaacaaaattcaatcaaaaaggcagctaggtcagaaggaaacataccactctcatggttcatagtattcactgtatgtatgctagggaaaagacttgctccagtctcctcctcagttctgtgcctgagaaccactgctgcatatatttgtttttaaattttgtattgaactgttaattgaagctttaaaagcatatatgaaatgtataaatctaagatgtataatacattattgactctatgaatgttttctgaagtttgttagtcattt

SEQ ID NO: 255124 - DNA, 501 bp, Artificial Sequence
  derived and/or modified sequence
atgttgagccagtcatgtaatctcgaccctttgaccgaaacttacggaatccccttctacctgcagtacttggcccactggcctgagtatttcatcgtggcagaggccccaggcggagagttgatgggctatataatgggcaaagctgaaggatctgtagcgcgagaggagtggcacggacacgttacggctctcagtgtggcccctgaattccggcgattggggctggccgctaagctgatggagctgctggaagaaatatccgaaaggaagggcggattcttcgtagacttattcgtgagagtgtctaatcaggtggccgtgaacatgtacaaacagttagggtactctgtctatcggacggtgatagaatactactcagcatctaacggagaaccggacgaagacgcatatgatatgagaaaggcgttatccagggacacggagaagaaaagcattattccgctgccccaccccgtgcgacctgaggatattgagtag

SEQ ID NO: 255125 - protein, 111 aa, Artificial Sequence
  derived and/or modified sequence
MTTLRAFTCDDLFRFNNINLDPLTETYGIPFYLQYLAHWPEYFIVAEAPGGELMGYIMGKAEGSVAREEWHGHVTALSVAPEFRRLGLAAKLMELLEEISERYEESTFQGY

SEQ ID NO: 255126 - DNA, 336 bp, Artificial Sequence
  derived and/or modified sequence
atgactacgctgagggcatttacatgcgatgacttgttcaggtttaataacatcaacctggacccactcactgaaacctatggcatcccgttctacctccagtatctcgcccactggcccgagtatttcattgtcgccgaagctccaggtggggagctgatgggctacataatggggaaagccgagggaagcgtcgcacgggaggaatggcatggccatgttaccgcccttagtgtggctccagaatttagacgactgggcttggctgccaaactaatggagctgctcgaggagatatcggagaggtacgaagaatctactttccaggggtattag

SEQ ID NO: 255127 - DNA, 336 bp, Artificial Sequence
  derived and/or modified sequence
atgaccaccctgcgggccttcacctgtgatgacctcttccgcttcaacaacatcaacctggaccccctgacagagacctacggcatccccttctacctgcagtacctggcccactggccagagtacttcatcgtggccgaggcccctggaggagagctgatgggctacatcatgggcaaggccgagggctctgtggcccgggaggagtggcacggccacgtgacagccctgtctgtggcccctgagttccggcggctgggcctggccgccaagctgatggagctgctggaggagatcagcgagagatatgaggagagcaccttccagggctactag

SEQ ID NO: 255128 - DNA, 336 bp, Artificial Sequence
  derived and/or modified sequence
atgaccaccctgcgggccttcacctgcgacgacctgttccggttcaataacatcaacctggatcctttaaccgagacctacggaatcccgttctatctccagtatctggcacactggccagagtattttatcgtggccgaggctcccggcggagaactcatgggttatattatgggcaaagctgaagggtccgtggcacgggaggagtggcatggtcatgttacagctctctccgtggcacctgaatttagaaggctcggacttgcggcaaagctgatggaactcctggaggagataagcgagcgctatgaagagtctacattccagggatactag

SEQ ID NO: 255129 - DNA, 336 bp, Artificial Sequence
  derived and/or modified sequence
atgactacactgcgggcattcacctgtgacgatctctttagatttaacaacattaatctggatccactgacggagacttacgggatccctttctatctgcagtacctcgcccattggcctgaatatttcattgtagctgaagccccagggggagagctgatgggctatattatgggaaaagcagagggtagcgttgccagagaagaatggcacggccatgtcaccgctctgtcagtggctcccgaattccgcagactgggcctcgccgctaagctgatggaactgctggaagagatcagcgaaaggtatgaggagtctactttccagggctattag

SEQ ID NO: 255130 - DNA, 920 bp, Artificial Sequence
  derived and/or modified sequence
ggttccgcggcggccacgctccgggagacttccggcagggcgggcgcggggtcttggcgaacggtcttcggaagcggcggcggcgcgatgaccacgctacgggcctttacctgcgacgacctgttccgcttcaacaacattaacttggatccacttacagaaacttatgggattcctttctacctacaatacctcgcccactggccagagtatttcattgttgcagaggcacctggtggagaattaatgggttatattatgggtaaagcagaaggctcagtagctagggaagaatggcacgggcacgtcacagctctgtctgttgccccagaatttcgacgccttggtttggctgctaaacttatggagttactagaggagatttcagaaagatatgaggaaagcactttccagggatactgagaagaaatccatcataccattacctcatcctgtgaggcctgaagacattgaataaccctgggcagtggttcttaggcagatactctagatgctttatggacaatattattttcattggatgattctggagctctattaggagaaaagtaatcattttaggtcttaaagacttcaagaaaatacaggttatcaatttattttaaatctcattgtttccagttagcaatatcatacctattaaagctgttcattgtaacaaaattcaatcaaaaaggcagctaggtcagaaggaaacataccactctcatggttcatagtattcactgtatgtatgctagggaaaagacttgctccagtctcctcctcagttctgtgcctgagaaccactgctgcatatatttgtttttaaattttgtattgaactgttaattgaagctttaaaagcatatatgaaatgtataaatctaagatgtataatacattattgactctatgaa

SEQ ID NO: 255131 - DNA, 336 bp, Artificial Sequence
  derived and/or modified sequence
atgaccaccctgagagccttcacctgcgacgacctgttcagattcaacaacatcaacctggaccccctgaccgagacctacggcatccccttctacctgcagtacctggcccactggcccgagtacttcatcgtggccgaggcccccggcggcgagctgatgggctacatcatgggcaaggccgagggcagcgtggccagagaggagtggcacggccacgtgaccgccctgagcgtggcccccgagttcagaagactgggcctggccgccaagctgatggagctgctggaggagatcagcgagagatacgaggagagcaccttccagggctactag

SEQ ID NO: 255132 - protein, 407 aa, Artificial Sequence
  derived and/or modified sequence
MEPAAALHFSLPASLLLLLLLLLLSLCALVSGLGSKPLIEIKAQEDGSIWLECISGGWYPEPLTVWRDPYGEVVPALKEVSIADADGLFMVTTAVIIRDKYVRNVSCSVNNTLLGQEKETVIFIPESFMPSASPWMVALAVILTASPWMVSMTVILAVFIIFMAVSICCIKKLQREKKILSGEKKVEQEEKEIAQQLQEELRWRRTFLHAADVVLDPDTAHPELFLSEDRRSVRRGPYRQRVPDNPERFDSQPCVLGWESFASGKHYWEVEVENVMVWTVGVCRHSVERKGEVLLIPQNGFWTLEMFGNQYRALSSPERILPLKESLCRVGVFLDYEAGDVSFYNMRDRSHIYTCPRSAFTVPVRPFFRLGSDDSPIFICPALTGASGVMVPEEGLKLHRVGTHQSL

SEQ ID NO: 255133 - protein, 110 aa, Artificial Sequence
  derived and/or modified sequence
MEPAAALHFSLPASLLLLLLLLLLSLCALVSGLGSKPLIEIKAQEDGSIWLECISGGWYPEPLTVWRDPYGEVVPALKEVSIADADGLFMVTTAVIIRDKYVRNVSCSVN

SEQ ID NO: 255134 - protein, 184 aa, Artificial Sequence
  derived and/or modified sequence
MEPAAALHFSLPASLLLLLLLLLLSLCALVSGLGSKPLIEIKAQEDGSIWLECISGGWYPEPLTVWRDPYGEVVPALKEVSIADADGLFMVTTAVIIRDKYVRNVSCSVNNTLLGQEKETVIFIPESFMPSASPWMVALAVILTASPWMVSMTVILAVFIIFMAVSICCIKKLQREKKILSGEK

SEQ ID NO: 255135 - protein, 233 aa, Artificial Sequence
  derived and/or modified sequence
MELPTKPGTFDLGLATWSPSFQGETHRAQARRRDVGRQLPEYKAVVVGASGVGKSALTIQLNHQCFVEDHDPTIQDSYWKELTLDSGDCILNVLDTAGQAIHRALRDQCLAVCDGVLGVFALDDPSSLIQLQQIWATWGPHPAQPLVLVGNKCDLVTTAGDAHAAAAALAHSWGAHFVETSAKTRQGVEEAFSLLVHEIQRVQEAMAKEPMARSCREKTRHQKATCHCGCSVA

SEQ ID NO: 255136 - DNA, 702 bp, Artificial Sequence
  derived and/or modified sequence
atggagctgcccaccaagcccggcaccttcgacctgggcctggccacctggagccccagcttccagggcgagacccacagagcccaggccagaagaagagacgtgggcagacagctgcccgagtacaaggccgtggtggtgggcgccagcggcgtgggcaagagcgccctgaccatccagctgaaccaccagtgcttcgtggaggaccacgaccccaccatccaggacagctactggaaggagctgaccctggacagcggcgactgcatcctgaacgtgctggacaccgccggccaggccatccacagagccctgagagaccagtgcctggccgtgtgcgacggcgtgctgggcgtgttcgccctggacgaccccagcagcctgatccagctgcagcagatctgggccacctggggcccccaccccgcccagcccctggtgctggtgggcaacaagtgcgacctggtgaccaccgccggcgacgcccacgccgccgccgccgccctggcccacagctggggcgcccacttcgtggagaccagcgccaagaccagacagggcgtggaggaggccttcagcctgctggtgcacgagatccagagagtgcaggaggccatggccaaggagcccatggccagaagctgcagagagaagaccagacaccagaaggccacctgccactgcggctgcagcgtggcctag

SEQ ID NO: 255137 - DNA, 1266 bp, Artificial Sequence
  derived and/or modified sequence
cgtgaggagggaaggagagatggggggacgtgggacagggagaaaacaacataaatcatatatatatagcatgcaaattggaaggtgatcagcacacaataggcattcaataaatgttgaaataatgacaccccactgtctccttgccctcaaatggtctcccctaacgtatcccctgttgtcttgcttcttctcttcccacttgcagagcctgctgcccacgtctcttccctgagctgcctgctggggtcatggagctgccaacaaagcctggcaccttcgacctgggcctggccacatggagcccttccttccagggggaaacccaccgggctcaggcacgccgcagggatgttggcaggcagctgcctgagtacaaggctgtggtggtgggcgccagtggcgtgggcaagagtgcgctgaccatccagctgaaccaccagtgcttcgtggaggaccacgaccccaccatccaggattcctactggaaggagttgaccctggacagtggggactgcattctgaatgtgctggacacagcagggcaggccatccatagggccctgcgtgaccagtgcctggctgtctgtgatggtgtgctgggcgtcttcgctctcgatgacccctcgtctctgatccagctgcagcagatatgggccacctggggccctcaccccgcccagccccttgtcctcgtgggcaacaagtgtgaccttgtgaccactgctggagatgctcatgccgctgctgcagccctcgcacacagctggggggcccacttcgtggagacctcggccaaaacacggcaaggcgtggaggaggccttttccctgctggtccatgagatccagagggtccaggaggccatggcgaaggagcccatggcaaggtcctgtagggagaagacccggcaccagaaggccacctgccactgtggctgctctgtggcctgaaggtcttggccaagaaatgtagacctttccccaggccagggtgattgttcatttgacatgagacccctgaggcaactagctttgagggacacatcaggtatactagggaaagatggacatctctcttgttttcacttggtgaggggctttttggtaacatgggagtgcctaatgttgcttttgttatgtcaagttgaaagattttgtgcaaaattaaataaatggtgttttgggtttcaaagctgcctccatgccgagtgttgtgtgggtgggagtgagactgggtagaatgttacttgagttgtgagaattc

SEQ ID NO: 255138 - DNA, 702 bp, Artificial Sequence
  derived and/or modified sequence
atggagctgccaactaagcctggtacttttgatctcgggttggccacctggagtccgtccttccagggggaaacacaccgcgcccaagcgcgtcgtcgcgatgtaggccgccaactgcccgagtataaggccgtcgtagttggggcatcaggtgttggcaaatccgctcttaccatccagctgaatcaccagtgttttgtggaagatcatgacccaaccattcaggatagctattggaaagaactgactctcgacagcggagattgcattttaaatgtgctcgatactgccggtcaggcaatccaccgcgccctccgcgaccagtgccttgctgtttgcgacggcgtgttaggcgtgttcgccttagatgacccaagctccctgattcagttgcagcagatttgggccacatggggacctcatcctgcccaaccgttagtcttggtgggaaacaagtgcgacctggtcacaacggccggagacgcgcacgccgccgcagctgcactcgcccatagctggggagcacacttcgtagaaacctcggcaaagacccggcaaggagtggaggaagcattctctctgctcgtgcacgagattcaacgcgttcaggaggcgatggcaaaggagcctatggcacgaagctgccgcgaaaagaccaggcaccagaaagccacgtgtcactgcgggtgttcagtcgcctag

SEQ ID NO: 255139 - DNA, 702 bp, Artificial Sequence
  derived and/or modified sequence
atggagctgcccaccaagccaggcacctttgacctgggcctggccacctggagccccagcttccagggcgagacccaccgggcccaggcccggaggagagatgtgggccggcagctgcctgagtacaaggctgtggtggtgggcgccagcggcgtgggcaagagcgccctgaccatccagctgaaccaccagtgctttgtggaggaccatgaccccaccatccaggacagctactggaaggagctgaccctggacagcggggactgcatcctgaatgtgctggacacagctggccaggccatccaccgggccctgcgggaccagtgcctggccgtgtgtgatggagtgctgggcgtgtttgccctggatgaccccagcagcctcatccagctgcagcagatctgggccacctggggcccccacccagcccagcccctggtgctggtgggcaacaagtgtgacctggtgaccacagctggagatgcccacgccgctgctgctgccctggcccacagctggggcgcccactttgtggagaccagcgccaagacccggcagggcgtggaggaggccttcagcctgctggtgcatgagatccagagggtgcaggaggccatggccaaggagcccatggcccggagctgccgggagaagaccaggcaccagaaggccacctgccactgcggctgcagcgtggcctag

SEQ ID NO: 255140 - DNA, 702 bp, Artificial Sequence
  derived and/or modified sequence
atggagctgcccaccaagcccggcaccttcgacctgggcctggccacttggtcacccagctttcagggcgaaacccatcgtgcccaggccagaaggagagacgtcggccgtcagctgcccgaatataaggctgttgtggttggcgcatctggagtgggaaaatctgctttgactatccagctgaaccaccagtgctttgtggaggaccatgaccctacaatccaggatagttattggaaagagcttacccttgattccggcgattgcatactcaatgtgctggatacagccgggcaggccattcatcgagccctgagggaccagtgcctggccgtatgcgacggggtgcttggcgtgttcgcattggatgacccgtctagccttattcaactgcaacaaatttgggccacatgggggccacatccagcacagcctctggtcctggtgggcaacaaatgcgacctcgtgacaacggccggcgatgcacatgctgctgcagctgccctggcccattcctggggagcccattttgtggaaacttctgctaagacccgtcagggggtggaagaggctttctcactcctcgtgcacgagatccagcgcgtgcaggaggctatggcaaaagaaccaatggcacgctcatgcagggaaaagacacggcatcagaaggccacctgtcattgcggctgttcggtcgcttag

SEQ ID NO: 255141 - DNA, 702 bp, Artificial Sequence
  derived and/or modified sequence
atggagctgccaaccaagccaggaacctttgaccttggactggccacctggagcccatccttccagggcgaaacgcatagggcacaggcacgcaggcgcgacgtggggagacaacttcctgagtacaaggccgtcgtggtcggcgcatcaggagtggggaaatcggctctgactattcaactcaaccaccagtgctttgtggaggaccacgatcctaccatccaggattcttactggaaggaattaaccctggattccggcgattgtatcctcaatgttctagacacggctggtcaagcaatccacagggccctccgagaccaatgtcttgcagtgtgcgacggcgtcttgggggtgtttgccttagacgatccgagctctttaatacaactccagcagatttgggccacgtggggccctcaccctgcccaacccctcgtattagtaggaaacaagtgtgaccttgttaccactgccggagatgctcacgccgcagctgcggctctcgctcattcctggggggctcactttgttgagacctccgctaagacccggcagggggtggaagaagctttctccctgcttgtacacgagatccagcgtgttcaagaagccatggccaaagagcccatggcccgatcttgccgagagaaaaccaggcatcaaaaagctacgtgccattgcggatgctcagtggcttag

SEQ ID NO: 255142 - DNA, 309 bp, Artificial Sequence
  derived and/or modified sequence
atgaggtatgggtttgtgaggaagaaacatagaggacttttcctgacaactgtggcggctctacctatctggaatcccatctcagagtttgtaaaatggtataaatcccataagctttcccaacactgtattaggatctgtgggcacctatgccagaagcatctggacatgtttctgtctgtgattggccagcgatggcccatcgatgtatttagtagcgtctttgaccaccaggttagcgctattgggtcggacattatatggtggtttctgaagctgttcttggtgagcttcttcttcttcttctag

SEQ ID NO: 255143 - DNA, 840 bp, Artificial Sequence
  derived and/or modified sequence
atgtgcgggaggttccttcggagactgctggctgaggaatccagaagatcgacccccgtgggtagactgctgctgcctgtgctgctcggcttccgtcttgtactgctggctgctagcgggccgggtgtttatggcgatgagcagtcggaatttgtctgtcacacccagcaacctggttgcaaagcagcttgtttcgacgcttttcaccccctgagcccattgcgcttttgggtgtttcaagtgatcctggttgcagttccatctgccctctatatgggcttcaccctctaccacgtcatatggcattgggagctcagtggcaagggcaaagaggaggaaactttaattcaaggaagagagggtaacacggatgtgcctggggcagggagtctgcggttattgtgggcctatgtagcccagctcggtgctagacttgtgctggagggtgccgccctcggacttcagtaccatttgtacgggtttcagatgccctccagcttcgcatgtagacgggagccatgtctgggaagcattacctgtaatctgtctcggcccagcgaaaagacaatctttctgaaaactatgttcggtgtatctgggttctgcctcctgttcacatttctggagcttgtgctgcttggactcggacgctggtggcgaacctggaagcataaatcctccagctctaaatacttcttaaccagcgaatctacccggcgacataagaaagctaccgactctttgccagtagtggagacaaaagaacagtttcaggaggccgtgcctgggaggagtctggcacaagaaaaacagcgaccggttggccccagagacgcttag

SEQ ID NO: 255144 - DNA, 1116 bp, Artificial Sequence
  derived and/or modified sequence
atgtgtggcaggttcctgcggcggctgctggcggaggagagccggcgctccacccccgtggggcgcctcttgcttcccgtgctcctgggattccgccttgtgctgctggctgccagtgggcctggagtctatggtgatgagcagagtgaattcgtgtgtcacacccagcagccgggctgcaaggctgcctgcttcgatgccttccaccccctctccccgctgcgtttctgggtcttccaggtcatcttggtggctgtacccagcgccctctatatgggtttcactctgtatcacgtgatctggcactgggaattatcaggaaaggggaaggaggaggagaccctgatccagggacgggagggcaacacagatgtcccaggggctggaagcctcaggctgctctgggcttatgtggctcagctgggggctcggcttgtcctggagggggcagccctggggttgcagtaccacctgtatgggttccagatgcccagctcctttgcatgtcgccgagaaccttgccttggtagtataacctgcaatctgtcccgcccctctgagaagaccattttcctaaagaccatgtttggagtcagcggtttctgtctcttgtttacttttttggagcttgtgcttctgggtttggggagatggtggaggacctggaagcacaaatcttcctcttctaaatacttcctaacttcagagagcaccagaagacacaagaaagcaaccgatagcctcccagtggtggaaaccaaagagcaatttcaagaagcagttccaggaagaagcttagcccaggaaaaacaaagaccagttggacccagagatgcctgagttggagatgaactttggccaactttcctcatcaccatacttaaaatcctgtccaaggaggagcttattcaccattttctatacatgtgacatatgtagcagcataaccgacaactgggactgcgctgccttgactccacctctacatacaatgactcagctaaccagactaataaaagccatgtttgcaccattgctcagggaggcattgctttggggaattattcccagtgtcctccttacttatcgcaagtaataaaatccccctgggaaatc

SEQ ID NO: 255145 - DNA, 840 bp, Artificial Sequence
  derived and/or modified sequence
atgtgtggccgcttcctgcggcggctgctggccgaggagagcagaagaagcacccctgtgggccgcctgctgctgcctgtgctgctgggcttccggctggtgctgctggccgccagcggccctggggtgtatggagatgagcagagcgagtttgtgtgccacacccagcagcccggctgcaaggccgcctgctttgatgccttccaccccctgagccccctgcgcttctgggtgttccaggtgatcctggtggccgtgcccagcgccctgtacatgggcttcaccctgtaccacgtgatctggcactgggagctgagcggcaagggcaaggaggaggagaccctcatccagggccgggagggcaacacagatgtgcctggggccggcagcctgcggctgctgtgggcctacgtggcccagctgggcgcccggctggtgctggagggcgccgccctgggcctgcagtaccacctgtatggcttccagatgcccagcagctttgcctgccggcgggagccctgcctgggcagcatcacctgcaacctgagccggcccagcgagaagaccatcttcctgaagaccatgtttggagtgtctggcttctgcctgctcttcaccttcctggagctggtgctgctgggcctgggccgctggtggaggacctggaagcacaagagcagcagcagcaagtacttcctgaccagcgagagcaccaggaggcacaagaaggccacagacagcctgcctgtggtggagaccaaggagcagttccaggaggccgtgcccggccgcagcctggcccaggagaagcagaggcctgtgggccccagagatgcctag

SEQ ID NO: 255146 - DNA, 840 bp, Artificial Sequence
  derived and/or modified sequence
atgtgcggccggttcctgcggcggctgctggccgaggagagccggcgatctaccccagtaggtaggctgcttcttcctgtgttattgggatttagactggtgctgctcgctgcaagcggtcccggcgtgtacggtgatgaacagtccgaatttgtgtgccacacccagcagcccggctgcaaggccgcttgcttcgacgcttttcacccccttagtcccctcaggttctgggtgttccaggttattctcgttgccgtgccgtccgctctctacatgggcttcacactgtaccacgtaatttggcactgggagctgtccggcaaagggaaagaggaggaaaccctcattcagggccgcgaagggaacacagacgtaccgggcgcgggatctctgagactgctgtgggcttacgtggcccagttaggtgccagattggtgctggagggtgcagctttggggctgcagtaccacctgtatgggttccaaatgccaagcagttttgcttgtcgccgggagccttgtctgggcagcattacgtgcaatctgagtcgaccctccgagaagacaatcttcctgaaaaccatgttcggagtgtcgggcttctgtctgctgtttacgtttctggagcttgtgttattgggcctcggcagatggtggcggacctggaagcataaatcaagttcttccaagtattttctgacgagtgaaagcactaggaggcacaagaaggccaccgatagtttgcccgtagtagagacaaaggagcagttccaggaggcagtgccaggccgatccctcgcccaggagaaacagaggccagttggcccacgggacgcttag

SEQ ID NO: 255147 - DNA, 840 bp, Artificial Sequence
  derived and/or modified sequence
atgtgcggccgattcctcagaaggctcctcgctgaggaatcacgacgtagcaccccggttggcaggctcctgctgcctgttctgttagggtttcggctggttctgctagctgcttcaggccctggcgtctatggggacgaacagtcagagttcgtctgccatacgcaacagcctggctgcaaagccgcatgttttgatgcattccatcccctgtcaccactccgtttttgggtctttcaggtgatcctggtagccgtaccttctgccctatatatggggttcacactgtatcacgtgatatggcactgggaactgtcgggaaagggaaaagaggaggagacattgattcaggggcgagaaggcaataccgatgtgcctggcgctggcagcctaaggctgctgtgggcatacgttgcccagctcggcgctcgcctggtgctggagggagcggcactgggacttcagtaccatctgtacggattccaaatgccttcgagctttgcgtgccgtcgcgaaccgtgtctgggatctatcacatgtaatctgagtaggccttctgaaaaaaccatctttctgaaaacaatgtttggcgtgagtggtttctgcttgctcttcacttttctggagctggttcttctggggctcgggaggtggtggcgcacctggaagcataagtcatcaagtagcaagtattttctaacgagcgagagcactaggcggcacaaaaaggcaacggattccctcccagtcgtggagacaaaggagcagtttcaggaagcggtgccaggcaggtctctggcccaggaaaagcagagacctgtcggcccacgggatgcatag

SEQ ID NO: 255148 - DNA, 840 bp, Artificial Sequence
  derived and/or modified sequence
atgtgcggcagattcctgagaagactgctggccgaggagagcagaagaagcacccccgtgggcagactgctgctgcccgtgctgctgggcttcagactggtgctgctggccgccagcggccccggcgtgtacggcgacgagcagagcgagttcgtgtgccacacccagcagcccggctgcaaggccgcctgcttcgacgccttccaccccctgagccccctgagattctgggtgttccaggtgatcctggtggccgtgcccagcgccctgtacatgggcttcaccctgtaccacgtgatctggcactgggagctgagcggcaagggcaaggaggaggagaccctgatccagggcagagagggcaacaccgacgtgcccggcgccggcagcctgagactgctgtgggcctacgtggcccagctgggcgccagactggtgctggagggcgccgccctgggcctgcagtaccacctgtacggcttccagatgcccagcagcttcgcctgcagaagagagccctgcctgggcagcatcacctgcaacctgagcagacccagcgagaagaccatcttcctgaagaccatgttcggcgtgagcggcttctgcctgctgttcaccttcctggagctggtgctgctgggcctgggcagatggtggagaacctggaagcacaagagcagcagcagcaagtacttcctgaccagcgagagcaccagaagacacaagaaggccaccgacagcctgcccgtggtggagaccaaggagcagttccaggaggccgtgcccggcagaagcctggcccaggagaagcagagacccgtgggccccagagacgcctag

SEQ ID NO: 255149 - protein, 1505 aa, Artificial Sequence
  derived and/or modified sequence
MLCVAGARLKRELDATATVLANRQDESEQSRKRLIEQSREFKKNTPEDLRKQVAPLLKSFQGEIDALSKRSKEAEAAFLNVYKRLIDVPDPVPALDLGQQLQLKVQRLHDIETENQKLRETLEEYNKEFAEVKNQEVTIKALKEKIREYEQTLKNQAETIALEKEQKLQNDFAEKERKLQETQMSTTSKLEEAEHKVQSLQTALEKTRTELFDLKTKYDEETTAKADEIEMIMTDLERANQRAEVAQREAETLREQLSSANHSLQLASQIQKAPDVEQAIEVLTRSSLEVELAAKEREIAQLVEDVQRLQASLTKLRENSASQISQLEQQLSAKNSTLKQLEEKLKGQADYEEVKKELNILKSMEFAPSEGAGTQDAAKPLEVLLLEKNRSLQSENAALRISNSDLSGSARRKGKDQPESRRPGSLPAPPPSQLPRNPGEQASNTNGTHQFSPAGLSQDFFSSSLASPSLPLASTGKFALNSLLQRQLMQSFYSKAMQEAGSTSMIFSTGPYSTNSISSQSPLQQSPDVNGMAPSPSQSESAGSVSEGEEMDTAEIARQVKEQLIKHNIGQRIFGHYVLGLSQGSVSEILARPKPWNKLTVRGKEPFHKMKQFLSDEQNILALRSIQGRQRENPGQSLNRLFQEVPKRRNGSEGNITTRIRASETGSDEAIKSILEQAKRELQVQKTAEPAQPSSASGSGNSDDAIRSILQQARREMEAQQAALDPALKQAPLSQSDITILTPKLLSTSPMPTVSSYPPLAISLKKPSAAPEAGASALPNPPALKKEAQDAPGLDPQGAADCAQGVLRQVKNEVGRSGAWKDHWWSAVQPERRNAASSEEAKAEETGGGKEKGSGGSGGGSQPRAERSQLQGPSSSEYWKEWPSAESPYSQSSELSLTGASRSETPQNSPLPSSPIVPMSKPTKPSVPPLTPEQYEVYMYQEVDTIELTRQVKEKLAKNGICQRIFGEKVLGLSQGSVSDMLSRPKPWSKLTQKGREPFIRMQLWLNGELGQGVLPVQGQQQGPVLHSVTSLQDPLQQGCVSSESTPKTSASCSPAPESPMSSSESVKSLTELVQQPCPPIEASKDSKPPEPSDPPASDSQPTTPLPLSGHSALSIQELVAMSPELDTYGITKRVKEVLTDNNLGQRLFGETILGLTQGSVSDLLARPKPWHKLSLKGREPFVRMQLWLNDPNNVEKLMDMKRMEKKAYMKRRHSSVSDSQPCEPPSVGTEYSQGASPQPQHQLKKPRVVLAPEEKEALKRAYQQKPYPSPKTIEDLATQLNLKTSTVINWFHNYRSRIRRELFIEEIQAGSQGQAGASDSPSARSGRAAPSSEGDSCDGVEATEGPGSADTEEPKSQGEAEREEVPRPAEQTEPPPSGTPGPDDARDDDHEGGPVEGPGPLPSPASATATAAPAAPEDAATSAAAAPGEGPAAPSSAPPPSNSSSSSAPRRPSSLQSLFGLPEAAGARDSRDNPLRKKKAANLNSIIHRLEKAASREEPIEWEF

SEQ ID NO: 255150 - DNA, 4518 bp, Artificial Sequence
  derived and/or modified sequence
atgctgtgcgtggccggcgccagactgaagagagagctggacgccaccgccaccgtgctggccaacagacaggacgagagcgagcagagcagaaagagactgatcgagcagagcagagagttcaagaagaacacccccgaggacctgagaaagcaggtggcccccctgctgaagagcttccagggcgagatcgacgccctgagcaagagaagcaaggaggccgaggccgccttcctgaacgtgtacaagagactgatcgacgtgcccgaccccgtgcccgccctggacctgggccagcagctgcagctgaaggtgcagagactgcacgacatcgagaccgagaaccagaagctgagagagaccctggaggagtacaacaaggagttcgccgaggtgaagaaccaggaggtgaccatcaaggccctgaaggagaagatcagagagtacgagcagaccctgaagaaccaggccgagaccatcgccctggagaaggagcagaagctgcagaacgacttcgccgagaaggagagaaagctgcaggagacccagatgagcaccaccagcaagctggaggaggccgagcacaaggtgcagagcctgcagaccgccctggagaagaccagaaccgagctgttcgacctgaagaccaagtacgacgaggagaccaccgccaaggccgacgagatcgagatgatcatgaccgacctggagagagccaaccagagagccgaggtggcccagagagaggccgagaccctgagagagcagctgagcagcgccaaccacagcctgcagctggccagccagatccagaaggcccccgacgtggagcaggccatcgaggtgctgaccagaagcagcctggaggtggagctggccgccaaggagagagagatcgcccagctggtggaggacgtgcagagactgcaggccagcctgaccaagctgagagagaacagcgccagccagatcagccagctggagcagcagctgagcgccaagaacagcaccctgaagcagctggaggagaagctgaagggccaggccgactacgaggaggtgaagaaggagctgaacatcctgaagagcatggagttcgcccccagcgagggcgccggcacccaggacgccgccaagcccctggaggtgctgctgctggagaagaacagaagcctgcagagcgagaacgccgccctgagaatcagcaacagcgacctgagcggcagcgccagaagaaagggcaaggaccagcccgagagcagaagacccggcagcctgcccgcccccccccccagccagctgcccagaaaccccggcgagcaggccagcaacaccaacggcacccaccagttcagccccgccggcctgagccaggacttcttcagcagcagcctggccagccccagcctgcccctggccagcaccggcaagttcgccctgaacagcctgctgcagagacagctgatgcagagcttctacagcaaggccatgcaggaggccggcagcaccagcatgatcttcagcaccggcccctacagcaccaacagcatcagcagccagagccccctgcagcagagccccgacgtgaacggcatggcccccagccccagccagagcgagagcgccggcagcgtgagcgagggcgaggagatggacaccgccgagatcgccagacaggtgaaggagcagctgatcaagcacaacatcggccagagaatcttcggccactacgtgctgggcctgagccagggcagcgtgagcgagatcctggccagacccaagccctggaacaagctgaccgtgagaggcaaggagcccttccacaagatgaagcagttcctgagcgacgagcagaacatcctggccctgagaagcatccagggcagacagagagagaaccccggccagagcctgaacagactgttccaggaggtgcccaagagaagaaacggcagcgagggcaacatcaccaccagaatcagagccagcgagaccggcagcgacgaggccatcaagagcatcctggagcaggccaagagagagctgcaggtgcagaagaccgccgagcccgcccagcccagcagcgccagcggcagcggcaacagcgacgacgccatcagaagcatcctgcagcaggccagaagagagatggaggcccagcaggccgccctggaccccgccctgaagcaggcccccctgagccagagcgacatcaccatcctgacccccaagctgctgagcaccagccccatgcccaccgtgagcagctacccccccctggccatcagcctgaagaagcccagcgccgcccccgaggccggcgccagcgccctgcccaacccccccgccctgaagaaggaggcccaggacgcccccggcctggacccccagggcgccgccgactgcgcccagggcgtgctgagacaggtgaagaacgaggtgggcagaagcggcgcctggaaggaccactggtggagcgccgtgcagcccgagagaagaaacgccgccagcagcgaggaggccaaggccgaggagaccggcggcggcaaggagaagggcagcggcggcagcggcggcggcagccagcccagagccgagagaagccagctgcagggccccagcagcagcgagtactggaaggagtggcccagcgccgagagcccctacagccagagcagcgagctgagcctgaccggcgccagcagaagcgagaccccccagaacagccccctgcccagcagccccatcgtgcccatgagcaagcccaccaagcccagcgtgccccccctgacccccgagcagtacgaggtgtacatgtaccaggaggtggacaccatcgagctgaccagacaggtgaaggagaagctggccaagaacggcatctgccagagaatcttcggcgagaaggtgctgggcctgagccagggcagcgtgagcgacatgctgagcagacccaagccctggagcaagctgacccagaagggcagagagcccttcatcagaatgcagctgtggctgaacggcgagctgggccagggcgtgctgcccgtgcagggccagcagcagggccccgtgctgcacagcgtgaccagcctgcaggaccccctgcagcagggctgcgtgagcagcgagagcacccccaagaccagcgccagctgcagccccgcccccgagagccccatgagcagcagcgagagcgtgaagagcctgaccgagctggtgcagcagccctgcccccccatcgaggccagcaaggacagcaagccccccgagcccagcgacccccccgccagcgacagccagcccaccacccccctgcccctgagcggccacagcgccctgagcatccaggagctggtggccatgagccccgagctggacacctacggcatcaccaagagagtgaaggaggtgctgaccgacaacaacctgggccagagactgttcggcgagaccatcctgggcctgacccagggcagcgtgagcgacctgctggccagacccaagccctggcacaagctgagcctgaagggcagagagcccttcgtgagaatgcagctgtggctgaacgaccccaacaacgtggagaagctgatggacatgaagagaatggagaagaaggcctacatgaagagaagacacagcagcgtgagcgacagccagccctgcgagccccccagcgtgggcaccgagtacagccagggcgccagcccccagccccagcaccagctgaagaagcccagagtggtgctggcccccgaggagaaggaggccctgaagagagcctaccagcagaagccctaccccagccccaagaccatcgaggacctggccacccagctgaacctgaagaccagcaccgtgatcaactggttccacaactacagaagcagaatcagaagagagctgttcatcgaggagatccaggccggcagccagggccaggccggcgccagcgacagccccagcgccagaagcggcagagccgcccccagcagcgagggcgacagctgcgacggcgtggaggccaccgagggccccggcagcgccgacaccgaggagcccaagagccagggcgaggccgagagagaggaggtgcccagacccgccgagcagaccgagcccccccccagcggcacccccggccccgacgacgccagagacgacgaccacgagggcggccccgtggagggccccggccccctgcccagccccgccagcgccaccgccaccgccgcccccgccgcccccgaggacgccgccaccagcgccgccgccgcccccggcgagggccccgccgcccccagcagcgcccccccccccagcaacagcagcagcagcagcgcccccagaagacccagcagcctgcagagcctgttcggcctgcccgaggccgccggcgccagagacagcagagacaaccccctgagaaagaagaaggccgccaacctgaacagcatcatccacagactggagaaggccgccagcagagaggagcccatcgagtgggagttctag

SEQ ID NO: 255151 - DNA, 4518 bp, Artificial Sequence
  derived and/or modified sequence
atgctctgtgtggccggggcaagactgaagcgcgagctcgatgcaacggccacagtactggccaataggcaggacgagtcagaacagagtcgcaagcgcctgatcgaacaatctagagagtttaagaagaatacgccagaggatctgcgcaagcaggtggctcctctgctcaagagcttccagggggagatagatgccctctccaagcggagtaaagaggccgaggctgccttcctgaatgtatacaaacgtcttatagatgtgcctgaccctgtgcctgcattagacctcggtcagcaattgcagttaaaagtccagaggctgcatgatatagaaaccgagaatcaaaagctccgggaaacactggaagagtataataaggaatttgcagaggtgaagaatcaggaggtcactatcaaagctctgaaagagaagattagagagtacgaacaaacactcaaaaaccaggctgaaacaatcgccctggagaaagagcaaaagctccagaatgattttgcagagaaagaacgtaagcttcaagagactcagatgtctacaacaagtaaactggaagaggccgagcataaagtccaatcacttcagaccgccctggaaaaaacaagaaccgagctgttcgacttgaagacaaagtacgatgaagaaaccacagctaaagcagatgagattgagatgattatgactgatctcgaacgggctaatcagcgggctgaagtggcccagcgagaggctgagactctccgcgagcagctctcaagtgccaatcactccctgcagcttgcctcacaaattcagaaggcccctgacgtcgagcaggccatcgaagtgctcactaggtctagtctcgaggttgagctcgcggccaaggagcgagagatcgcccagctggtcgaggacgtgcaaagacttcaggcgagcttgacaaaactgagggaaaactccgcaagtcagatttcccagcttgagcagcagttatccgctaagaactccacccttaagcagttagaggaaaagctcaagggtcaggccgactacgaggaagtcaaaaaggaactcaacatcctcaagtccatggaatttgcgccgagtgaaggggccggaacccaagatgctgctaagcccctggaggtgctactcttggagaagaatcgatcattacagtcagaaaacgctgcgcttcggatctctaacagtgatttgtccggtagtgccagaaggaaagggaaggatcagcctgagtcgcgccgaccagggagtctaccagcgccccctccctcccaactgcctcggaatcccggagaacaagcttctaataccaatgggacccatcaattctcacctgccggattatcacaggactttttctcttcttctcttgcaagtccttctttaccgctcgccagcacaggtaagttcgctctgaactctctccttcagcggcagctcatgcagtctttctatagtaaggctatgcaggaggccggcagcacctctatgatcttctccaccgggccctactcaacaaattcaatttcgagtcagtcacctctgcagcaatcccccgacgtaaacggtatggcacccagcccgagtcaaagcgagtctgcagggagtgtcagtgagggtgaggaaatggatactgccgagattgctaggcaggtgaaagagcagcttatcaagcacaatatcggccagagaatattcggacactacgttctcggcctcagccaaggtagtgttagcgaaatcttggcccggcctaagccctggaacaagttaacagttagagggaaggagccttttcataaaatgaaacaattcctgtccgatgagcagaacatcttggctcttagatccattcagggacgccagcgagaaaaccctggtcagagtctcaaccggctttttcaggaggtccccaagagaaggaacggatcagaaggcaacatcaccaccagaatccgcgcatccgaaaccggatctgatgaggccatcaagagtatcttggagcaggcaaagagagagctgcaagtgcaaaaaacagcggagccagcccagccaagctctgcatctggtagtgggaacagcgacgacgcaattagaagtatcctgcagcaggcacgccgtgagatggaggcgcagcaggctgccttggatccagccctcaaacaggcccctctctcacaatcagacatcactattttgacccctaagctgctctccactagtcccatgcccactgtcagttcatatccccccctggctatctcgcttaagaagccaagtgcggccccagaggcaggagcctctgccttgcccaacccacccgcactgaaaaaagaagcacaagacgcccctggcctggaccctcagggcgctgcagactgcgctcaaggcgtcctaagacaggtgaaaaacgaagtggggaggtctggggcttggaaggatcattggtggtctgcagttcaacctgagaggagaaatgccgcttcaagtgaggaggctaaggcagaagaaaccggaggggggaaagagaagggcagtggcggatcaggcggggggagtcaaccccgcgcagaaagaagtcagctgcaaggaccctcttcttctgaatattggaaggaatggccatccgccgaatcaccgtattctcagtcttctgagctgagcctcaccggcgcgtcacggagcgagacacctcagaacagcccccttccatccagccccatagtgccaatgtctaagcctacgaagccttcagtcccgccattaactcctgagcagtatgaggtctatatgtaccaggaggttgataccatagaacttactagacaggtgaaagagaaactggccaagaacggaatctgtcagcgtatcttcggcgaaaaggtacttggtctgagccaggggagtgtgtccgatatgctaagcagaccgaagccatggtccaaactcacccagaaaggtcgggaaccattcatccggatgcagttatggctgaacggtgagctcggtcagggggtgctccctgtccagggacagcaacaaggccctgttttacatagtgtgacttccctccaggatcccctccagcagggttgcgtgtcctctgaatctactcctaaaacaagtgcgagttgttcacccgcccctgagtcccctatgagctcgtcggagtctgtcaagtctctcactgagctagtgcaacagccttgcccacccatcgaggcgtcaaaggattctaaacctcccgagcccagtgatcctcccgcatccgactcacagccaaccactcctttacccctcagcggccacagcgcgctgtcgatccaggagcttgtggccatgtctcccgagctggatacttatggcattacaaagcgtgtgaaggaggtcctcaccgacaataacctgggtcagagactgtttggcgagacaatcctgggcctgacacagggttctgtcagtgacctcttggcacgccctaagccttggcataagctgtcactgaaggggcgtgagccattcgtgagaatgcagctctggcttaatgacccaaataatgtcgaaaaactgatggatatgaagaggatggaaaagaaggcgtacatgaagcggcgtcattccagcgtaagcgacagccagccttgcgaacccccatccgtgggcacagagtacagccagggggcatcaccccagccccagcaccagttgaagaagccacgggtggtactagctccagaggaaaaggaagccttaaagagggcatatcagcagaaaccttacccaagtcccaaaactattgaagatctcgcgacacagctgaacttaaagacaagcaccgtgattaactggtttcataattacaggtcgaggatcaggcgtgagctatttattgaagagattcaagcggggtctcaggggcaggccggggcgtcggactcaccaagtgctagatctgggagagccgctccctcctcagaaggagacagctgcgacggcgttgaagcaacagagggccccggctctgcagacaccgaagagcccaagagtcagggagaggcagaaagggaagaggttccgcggccggccgaacaaaccgaacctcctccgtctggcacccccggacccgatgatgcaagggacgacgaccacgaagggggccctgtggaaggccctgggccactaccaagtcctgcgagcgccacagctacagcagcccctgcagcccctgaagacgcagccaccagtgcggctgcggctccgggcgagggccccgctgctccctccagtgctccaccacccagcaactcctccagcagctctgctccacgacggccctcatcacttcagagcctgttcggacttccagaggctgctggcgcccgcgatagcagagacaacccactccgaaagaagaaagcagctaacctcaactccatcattcaccggcttgaaaaggccgcttcgcgcgaggagcctatagagtgggaattttag

SEQ ID NO: 255152 - DNA, 4518 bp, Artificial Sequence
  derived and/or modified sequence
atgctgtgtgtggccggggcccggctgaagcgggagctggatgccacagccaccgtgctggccaaccggcaggatgaaagtgagcagagcaggaagaggctgattgagcagagccgggagttcaagaagaacaccccagaggacctgaggaagcaggtggcccccctgctgaagagcttccagggcgagattgatgccctgagcaagaggagcaaggaggccgaggccgccttcctgaatgtgtacaagaggctgattgatgtgcctgaccctgtgcctgccctggacctgggccagcagctgcagctgaaggtgcagaggctgcatgacattgaaacagagaaccagaagctgcgggagaccctggaggagtacaacaaggagtttgctgaggtgaagaaccaggaggtgaccatcaaggccctgaaggagaagatccgggagtatgagcagaccctgaagaaccaggccgagaccatcgccctggagaaggagcagaagctgcagaatgactttgctgagaaggagaggaagctgcaggagacccagatgagcaccaccagcaagctggaggaggccgagcacaaggtgcagagcctgcagacagccctggagaagaccaggacagagctgtttgacctgaagaccaagtatgatgaggagaccacagccaaggcagatgaaattgagatgatcatgacagacctggagcgggccaaccagagagctgaggtggcccagcgggaggccgagaccctgcgggagcagctgagcagcgccaaccacagcctgcagctggccagccagatccagaaggccccagatgtggagcaggccatcgaggtgctgaccaggagcagcctggaggtggagctggccgccaaggagcgggagatcgcccagctggtggaggatgtgcagaggctgcaggccagcctgaccaagctgcgggagaacagcgccagccagatcagccagctggagcagcagctgagcgccaagaacagcaccctgaagcagctggaggagaagctgaagggccaggccgactatgaggaggtgaagaaggagctgaacatcctgaagtccatggagtttgcccccagcgagggcgccggcacccaggatgctgccaagcccctggaggtgctgctgctggagaagaacagaagcctgcagagtgaaaatgctgccctgcgcatcagcaacagcgacctgagcggcagcgcccggaggaagggcaaggaccagcctgagagcagaagacctggcagcctgcctgcccccccacccagccagctgcccaggaaccctggagagcaggccagcaacaccaacggcacccaccagttctccccagctggcctgagccaggacttcttcagcagcagcctggccagccccagcctgcccctggccagcacaggcaagtttgccctgaacagcctgctgcagaggcagctgatgcagagcttctacagcaaggccatgcaggaggccggcagcacctccatgatcttcagcacaggcccctacagcaccaacagcatcagcagccagagccccctgcagcagagcccagatgtgaatggcatggcccccagccccagccagagcgagagcgctggctctgtgtctgagggggaggagatggacacagctgagatcgcccggcaggtgaaggagcagctgatcaagcacaacatcggccagaggatcttcggccactacgtgctgggcctgagccagggctctgtgtctgagatcctggcccggcccaagccctggaacaagctgactgtgcggggcaaggagcccttccacaagatgaagcagttcctgagtgatgagcagaacatcctggccctgcggagcatccagggccggcagcgggagaaccctggccagagcctgaacagactcttccaggaggtgcccaagagaagaaatggcagcgagggcaacatcaccacccgcatccgggccagcgagactggaagtgatgaggccatcaagagcatcctggagcaggccaagcgggagctgcaggtgcagaagacagctgagcccgcccagcccagcagcgccagcggcagcggcaacagtgatgatgccatccgcagcatcctgcagcaggcccggcgggagatggaggcccagcaggccgccctggaccctgccctgaagcaggcccccctgagccagagcgacatcaccatcctgacccccaagctgctgagcaccagccccatgcccaccgtgagcagctacccacccctggccatcagcctgaagaagcccagcgctgcccctgaggccggggccagcgccctgcccaaccccccagccctgaagaaggaggcccaggatgcccctggcctggacccccagggcgctgctgactgtgcccagggcgtgctgcggcaggtgaagaatgaggtgggccgcagcggggcctggaaggaccactggtggagcgctgtgcagcctgagaggagaaatgctgccagcagcgaggaggccaaggccgaggagaccggcggcggcaaggagaagggcagcggcggcagcggcggcggcagccagcccagggctgagaggagccagctgcagggccccagcagcagcgagtactggaaggagtggcccagcgctgagagcccctacagccagagcagcgagctgagcctgaccggggccagccgctctgagaccccccagaacagccccctgcccagcagccccatcgtgcccatgagcaagcccaccaagcccagcgtgccccccctgaccccagagcagtatgaggtgtacatgtaccaggaggtggacaccatcgagctgacccggcaggtgaaggagaagctggccaagaatggcatctgccagaggatctttggagagaaggtgctgggcctgagccagggctctgtgtctgacatgctgagccggcccaagccctggagcaagctgacccagaagggccgggagcccttcatccgcatgcagctgtggctgaatggagagctgggccagggcgtgctgcctgtgcagggccagcagcagggccctgtgctgcacagcgtgaccagcctgcaggaccccctgcagcagggctgtgtgtcctctgagagcacccccaagaccagcgccagctgcagccctgcccctgagagccccatgagcagcagcgagagcgtgaagagcctgacagagctggtgcagcagccctgcccccccatcgaggccagcaaggacagcaagcccccagagcccagcgaccccccagccagtgacagccagcccaccacccccctgcccctgagcggccacagcgccctgagcatccaggagctggtggccatgagccctgagctggacacctacggcatcaccaagagggtgaaggaggtgctgacagacaacaacctgggccagaggctgtttggagagaccatcctgggcctgacccagggctctgtgtctgacctgctggcccggcccaagccctggcacaagctgagcctgaagggccgggagccctttgtgaggatgcagctgtggctgaatgaccccaacaacgtggagaagctgatggacatgaagaggatggagaagaaggcctacatgaagaggaggcacagctctgtgtctgacagccagccctgtgagcccccatctgtgggcacagagtacagccagggcgccagcccccagccccagcaccagctgaagaagccccgggtggtgctggcccctgaggagaaggaggccctgaagagggcctaccagcagaagccctaccccagccccaagaccatcgaggacctggccacccagctgaacctgaagaccagcaccgtcatcaactggttccacaactaccgcagccgcatccggcgggagctgttcatcgaggagatccaggccggcagccagggccaggccggggccagtgacagccccagcgcccggagcggccgggccgcccccagcagcgagggggacagctgtgatggagtggaggccacagagggccctggcagcgctgacacagaggagcccaagagccagggcgaggccgagcgggaggaggtgcccaggcctgctgagcagacagagcccccacccagcggcaccccaggcccagatgatgccagagatgatgaccatgaaggaggccctgtggagggccctggccccctgcccagccctgccagcgccacagccacagctgccccagctgccccagaagatgctgccaccagcgctgctgctgcccctggagagggccctgctgcccccagcagcgcccccccacccagcaacagcagcagcagcagcgccccccggcggcccagcagcctgcagagcctgtttggcctgcctgaggccgccggggcccgggacagccgggacaaccccctgaggaagaagaaggccgccaacctgaacagcatcatccaccggctggagaaggccgccagccgggaggagcccatcgagtgggagttctag

SEQ ID NO: 255153 - DNA, 4518 bp, Artificial Sequence
  derived and/or modified sequence
atgctgtgcgtggccggcgcccggctgaagcgggagctggacgccaccgccacagtgctagccaaccgccaggatgaatcagagcaaagccggaagaggttgatcgaacaaagccgcgagttcaaaaaaaataccccagaagatctgcgaaagcaggtagcaccgcttctcaagtcttttcagggcgaaatcgacgccttgtccaagcgcagcaaggaggcagaagcagccttcctcaacgtgtacaagcggctgattgatgtacccgaccctgtcccggccttggacttgggacagcagctccaacttaaagtccagcgactacatgacattgagacagagaaccagaaactgcgagaaaccctcgaagagtacaataaagaatttgctgaggtgaagaaccaggaagtcacaatcaaggccctgaaggaaaagatccgggagtacgagcaaacactaaaaaaccaggccgagaccattgcactcgagaaagagcagaagctccaaaatgactttgctgagaaggagcgcaaactccaggagacccagatgagcaccacatctaaactagaagaggccgagcataaagtgcagagcctgcagaccgctctggaaaaaacgcggactgaacttttcgatctcaaaacaaaatacgacgaggagaccaccgctaaggccgacgagatcgaaatgataatgaccgatctcgaaagagcaaatcaacgcgccgaggtagctcaaagagaagcggagacattgcgtgaacaactatcatccgccaatcactctctccagcttgcttcccagatccagaaagctcccgacgtcgaacaagccatcgaggtccttacccggtcaagccttgaagttgaactggctgccaaggagcgcgaaatcgcgcaactggttgaggacgtccagcggctgcaagctagcttgacaaagctacgggaaaactccgcatctcagatttcccagttggagcaacaactatctgctaaaaattctaccctgaagcagcttgaggagaagctgaaagggcaggccgactatgaagaagtaaagaaagagttgaatattctcaaatctatggagttcgcaccttctgagggcgcaggcactcaggatgctgcaaaacccttagaagtcctgctactggaaaagaacagatctctccagagcgagaatgccgccctgcggatctctaactccgacctgagcgggtctgcaagacgaaaagggaaggatcagcccgaatctaggcggcctggttctctcccagctcctccgccctcacagctgcctaggaatcctggtgagcaggcctctaatacaaacggaacacaccagttcagtcctgcagggttatcccaggactttttttctagcagcctggcctccccatcgctccccttagcctctacaggaaagttcgcgttaaattctttgctccagaggcaactgatgcagtccttttattctaaagccatgcaagaagctgggtcaaccagtatgatattctccaccggaccttacagtaccaactccataagttcccaaagtcccctgcagcagtctcctgatgtcaacggaatggccccatcaccttcccagtccgaaagcgccggttctgtgtctgaaggtgaggaaatggacaccgcagagattgcccgccaggtcaaggagcagttaatcaaacataatattggacagcgcatcttcggccattacgtgttaggtctgagccagggtagtgtgtctgagattctagcaaggccaaaaccctggaataagctcacagtgaggggcaaggaacccttccataagatgaaacagttcttatctgatgagcagaatattctggcactgcggtctatccagggcaggcaacgggagaaccctggccaaagcctgaaccggctgtttcaagaagtgcctaaacgtcgtaatggctctgaagggaacatcaccacccgaatccgagcctctgaaaccggctcggacgaggcaattaagtcaattctggagcaagccaagagagagctgcaggtacagaaaactgccgagcccgcccagccatcttccgcatccggctccggcaatagcgacgacgccattagaagtatcctgcaacaggcacgaagggagatggaggcacagcaggctgcacttgatcccgctcttaaacaggctcctctgtcccagtctgatattactatcttgacaccaaaactactgtctacctctcctatgccgacagtatcaagttatccaccgcttgctatcagtttgaagaagcctagtgccgcccctgaggccggagcgagcgctttgcccaaccccccggccctcaaaaaagaggcgcaggatgcacccggtctggaccctcagggtgcagccgattgcgctcagggcgtcctcagacaggttaagaacgaggtgggtcggtccggtgcctggaaagatcattggtggagcgctgtgcagcctgaacggcgcaatgctgctagctctgaggaagccaaggccgaagaaacaggcggaggcaaggagaaggggtctggtggtagcggcgggggttcacagcccagggctgaaagatcacagctgcagggccccagctctagtgaatactggaaggagtggccatccgcagagtcgccatatagccagtcgagtgagctgtctctcaccggcgctagcaggtccgaaacccctcagaacagccccctgccgagttcacctattgtacctatgtcaaaacccactaagccttccgtgcccccgctgacccctgagcagtatgaggtgtacatgtaccaggaggtggatacaatcgaactgacacggcaggtgaaagagaagcttgctaagaatggcatatgtcagagaatcttcggggaaaaagtgctgggactctcgcaggggtcagtttcagatatgctgtcaagaccaaaaccttggagcaagctcactcagaagggcagggagccttttattcgcatgcagctgtggctgaatggagaactgggtcagggcgttctgcctgtgcagggacagcaacagggacccgtgctacattccgttacaagcttgcaggatcctcttcaacagggttgcgtgtcaagtgagtcaactcccaagacatctgcttcttgttcacccgcacccgagtccccaatgagttctagcgagtccgtgaaaagtcttacagaactggtccagcagccttgcccgccaattgaagcgtccaaggatagcaaacctcccgagccatctgaccccccagctagtgatagccagcctaccacccctctccctctgagcggacactcagccctgtccatccaagaactggtggctatgagcccggagctggatacctacgggataacaaagcgagtgaaggaggtccttactgacaataatcttgggcagcgtctttttggggagaccatcctcggccttactcaagggagcgtgagcgacctgctggcacgccctaagccttggcataaactctccttgaagggtagagagccatttgtgcggatgcagttatggttgaatgaccctaacaatgttgaaaagctgatggatatgaaaaggatggaaaaaaaggcctatatgaaacgaagacatagcagtgtctcagatagccagccttgcgaaccgcctagcgtcggtactgagtatagtcagggcgcgtctccgcagccccagcaccagctgaagaagccccgcgtagtcctggccccagaagagaaagaggccctgaagagggcctaccagcagaagccttacccctctcccaaaaccattgaggacctggcaacacagctgaatttaaagaccagtacagtgattaactggtttcacaattaccggtctaggatccggagggagcttttcatcgaggaaattcaggccggcagccagggccaggctggagcgagtgactccccgagcgctcggtctggccgggccgcgccctcctctgagggggatagttgcgatggcgtcgaggccaccgagggcccgggcagcgcggacaccgaggagccaaagtcccagggagaggctgaaagggaggaagttccccgacccgccgaacagaccgaacccccccccagtgggactcccggaccagacgatgccagggatgacgaccacgaaggaggccccgtcgagggccctggtcccttgccaagccccgcctcagcgaccgccaccgccgccccggcagcacctgaagacgctgccacctctgcagctgccgccccaggagaaggtccagcagcacctagctccgctccgcctccttcaaacagctcctctagctcagctccaagacggccaagttctctgcagtctctgtttggactgccagaagccgcgggagcccgagactcgcgcgataacccattacgaaagaagaaagccgccaacctgaacagcataatccacagactcgagaaggccgcttcccgagaggaaccgatcgagtgggagttctag

SEQ ID NO: 255154 - DNA, 4518 bp, Artificial Sequence
  derived and/or modified sequence
atgctttgtgttgctggtgcccgtttgaagcgcgaactggacgcaactgctactgttctcgccaatcgacaagatgagagcgagcagagcagaaaacgtctcattgaacagtctagagagtttaagaaaaataccccagaggatctgagaaaacaggtagcaccccttttgaagagtttccagggagagatcgacgccctgtccaagcgttcaaaggaggctgaagccgcattccttaacgtctataaacggctgatcgatgtccccgatccagtgcctgcactggaccttggacaacagctgcagctaaaggttcagcgacttcacgatattgagaccgagaatcaaaagttgagagaaacactggaagaatacaataaggaattcgcagaagttaagaaccaggaggtaactatcaaagctttgaaggagaagattagggagtatgaacagactctgaaaaaccaagctgaaaccatcgcattagaaaaagagcagaagctgcagaacgattttgccgaaaaggagcgcaagcttcaagaaacccaaatgagcacaacatctaagctagaggaggctgagcataaagtccagagtttgcagacggctctagaaaaaaccagaacagagctattcgacctaaagaccaagtatgatgaagagactaccgcaaaagcagacgagattgagatgatcatgacagaccttgaacgcgcaaatcagagggccgaggtcgcacaacgagaggctgaaacattaagggaacaactgtctagtgcaaatcactccttgcaacttgcatcccagatccagaaggcccctgatgtcgagcaagctatcgaggttctgacccgctcttcacttgaagtggagcttgcggcaaaggagcgggagatcgcacagcttgtggaagatgtacaacgactgcaagctagcctaaccaagctacgagagaactccgcaagccaaatctcccagctggaacagcaactgagtgcaaagaatagcactctaaaacagctggaagagaagctcaaaggccaagcagattatgaggaggtgaaaaaggaacttaacatcttaaagtccatggaattcgcccctagcgaaggagcaggtactcaggacgcagcaaaaccgctcgaagttcttcttttggaaaagaatagatctctgcagtctgagaacgccgcactccggataagcaatagtgacctcagtggaagcgcgaggagaaagggaaaggatcagcctgaatctcgacggccaggttcactccctgcgccaccgccttcacagctgcctcggaatccgggtgaacaggcatctaacaccaatggaacccatcagtttagtccagccggattgtcccaggacttcttttcgagtagcttagcctctccttccctccctctggcctcaacgggcaaattcgccttgaattccctcctgcaacgccagctcatgcagagcttctacagcaaagctatgcaggaagccggatccacctcaatgattttctccacaggaccttactctaccaactccattagttctcagtcgccgctgcagcaatcaccagatgtcaacggaatggcgccatcccctagccagagcgagagcgccggttctgtatcagagggtgaggaaatggacactgcagagatcgcccgtcaagtgaaagagcagttaataaaacacaatattggccagcgcatctttggacactacgtcctaggtttgtctcagggctccgttagcgaaatcctggctcggcctaagccttggaataagctgactgtcaggggcaaagaaccctttcataagatgaaacagttcctcagtgacgagcagaatatcctcgcattgcggagtatacaggggagacaacgagagaaccccggacagtccctgaatcggttgttccaagaagtacctaagcggagaaacggctctgaggggaatatcactacgagaattcgggctagtgagacaggttctgatgaggctattaagtccatcctggaacaggccaagcgggagttacaggttcagaagacagcagagcccgcacagccaagcagcgcctcaggttctggcaatagtgacgatgcgattagaagcattctccaacaagcacgcagagaaatggaggcgcagcaggcagcactggaccctgcactcaagcaagcccctttatctcaaagcgacataacaatccttactccaaagctactgagcacatcgcccatgcccaccgtgtcttcctatccccctctggctatcagcctgaagaaaccaagtgccgctcccgaagctggcgctagcgccctgcctaaccctccggcactgaagaaggaagcccaagatgctcctggcctagacccacagggagcagcagattgcgcgcagggggtgttacgacaagtgaagaatgaagtgggccgatcaggggcttggaaagaccactggtggtccgccgtgcagccggagaggcgcaacgctgcatcatccgaagaggctaaggcggaggaaaccgggggtggaaaagaaaaggggagtgggggaagtgggggaggctcccagccacgcgctgagagaagccagttacagggtccctcctcctccgagtattggaaggagtggccaagtgcagaaagtccatattcccaatctagtgagctcagtctgacgggggcttctcgcagcgaaacgcctcagaatagtcccctgcccagcagccccattgtacctatgagtaaacccaccaagccttccgttcccccactcactccagagcagtacgaggtgtacatgtatcaggaggtggacactatcgaacttactcgccaggtgaaggagaagctggcaaaaaatggcatctgccagcgcatattcggggagaaagtcctcggattaagtcagggctccgtgtccgacatgctgtcccgtcctaaaccatggagcaagttgacgcaaaagggcagggagccttttattcgaatgcaactttggctgaatggtgagctggggcagggcgtgttgcccgtgcaggggcaacagcaaggacccgttctgcatagtgttaccagtctgcaggacccactgcaacaaggctgcgtgtcaagcgaatccacacctaaaacctccgcaagctgttcccccgcacctgagtctccgatgtcttcctcagagtccgtgaaaagcctcacagagctggttcaacagccatgcccgcctatagaagcgtccaaggattctaaaccgcctgagccgagtgatcccccagccagcgacagccagcccaccacgcccctccctctttcaggtcattccgccctctccatccaggaacttgtcgccatgagccccgagctggacacatacggaattacaaagcgggtgaaggaagtcctcactgacaataacttgggacagaggctttttggcgaaacgatcctcggcctgacccaggggtctgtatcggatttgcttgcccgaccgaagccctggcataaactgtccttgaaaggaagggaacctttcgtgagaatgcagctgtggctgaatgatcccaataacgtggaaaaattgatggatatgaagcggatggaaaagaaagcctacatgaagcggaggcattcttcagtatctgattcccagccctgcgagcctccttccgtgggcacagagtattcacaaggcgcttccccgcagccacaacaccagttgaagaagccaagggtcgtcttggctccagaggagaaggaagcgttgaaacgagcttaccagcagaaaccctatcccagccccaagacaatcgaggacctcgctacccagctaaacttgaaaacatcaaccgtgatcaattggttccataactaccgctctcgaatccggcgtgagctgttcatcgaggagatacaggctggctcacaggggcaggccggtgccagcgacagtccctccgcgcgttcgggacgagctgccccttcctctgaaggggattcctgtgatggtgtggaggcaacagagggcccaggcagcgccgacaccgaggagcctaagtctcagggagaggctgagagggaggaagtgcccagacctgcagagcagaccgagccaccgcctagcggaacccctggcccagacgacgcaagagatgatgatcatgaaggaggaccagtagaagggccaggtccactgcccagtccagcctccgccaccgcaaccgccgcaccagccgcacccgaggatgcagccactagcgctgccgcagcacctggcgagggcccagccgcacccagtagcgcccctcctccctcaaactccagcagctcgtccgcgcctagaaggccctcttcattgcaatccctctttggactgcccgaggctgcaggggcaagggattccagagacaatccactgcggaaaaagaaggctgccaatctgaactctattatccacaggctggagaaggccgcatcccgtgaagagccaatcgaatgggagttttaa

SEQ ID NO: 255155 - protein, 59 aa, Artificial Sequence
  derived and/or modified sequence
MWPPDPDPDPDPEPAGGSRPGPAVPGLRALLPARAFLCSLKGPGGFVCTWCSCPHQPLW

SEQ ID NO: 255156 - protein, 182 aa, Artificial Sequence
  derived and/or modified sequence
MWPPDPDPDPDPEPAGGSRPGPAVPGLRALLPARAFLCSLKGRLLLAESGLSFITFICYVASSASAFLTAPLLEFLLALYFLFADAMQLNDKWQGLCWPMMDFLRCVTAALIYFAISITAIAKYSDGASKAAGVFGFFATIVFATDFYLIFNDVAKFLKQGDSADETTAHKTEEENSDSDSD

SEQ ID NO: 255157 - DNA, 549 bp, Artificial Sequence
  derived and/or modified sequence
atgtggccccccgatcccgatcccgatcctgaccccgagcccgccggtggttcccgacctggtcccgcagttcccggcctgcgggctctgctgcctgcacgggccttcctctgctctttgaaagggcgcttgctactggcagaatcgggacttagctttattacatttatatgctatgtcgcatcaagtgccagtgcgtttcttacagccccactgcttgagttcctcctggctttgtatttcttattcgcagacgccatgcaactcaacgacaaatggcagggcctgtgttggcccatgatggatttcctgagatgtgtgacagccgctttaatttacttcgccatttcaatcactgcaattgccaaatactcggatggcgcttccaaagccgccggcgtgtttgggttttttgctaccatagtgttcgcaaccgacttttacttgatattcaatgacgtagcaaaattccttaaacagggagactccgctgatgaaaccaccgcccataagaccgaagaggaaaactcagatagtgactccgactag

SEQ ID NO: 255158 - DNA, 549 bp, Artificial Sequence
  derived and/or modified sequence
atgtggccacctgatcccgatcccgaccctgaccccgaacctgcggggggttcccgaccaggtcctgccgtgcccggactgcgcgcactactgcccgccagggccttcctttgcagcctcaaagggaggctcctgctggcagagtcaggactgtcattcattacttttatttgttacgttgcatccagtgcctcggcctttctcaccgcccctctgcttgaatttttattagccctgtacttcctatttgccgacgctatgcagctgaatgataaatggcaaggcttatgctggcctatgatggactttctgaggtgtgttaccgccgcattaatctactttgcaattagtataaccgcgattgccaaatactcagacggggcatccaaggccgcaggcgtgtttggtttttttgccactatcgtctttgccactgacttctacctgatcttcaatgacgtggccaaatttctgaagcagggagattcagccgatgagacaacggcccataaaactgaggaagagaacagtgacagcgactctgattag

SEQ ID NO: 255159 - DNA, 549 bp, Artificial Sequence
  derived and/or modified sequence
atgtggcctccggatcctgatccagaccccgatccagaacccgcaggtggttctcgccctggacccgccgttcccgggctgagggctttactgccagctcgggcgttcttatgttctttgaagggcaggctgttgttagccgaatcaggtttgagctttattaccttcatctgctacgtggcgtcatctgcttccgcctttctcactgcccccttactggagtttttgctggccctgtacttcctgttcgccgatgcgatgcaactcaatgataagtggcaaggactctgctggcctatgatggacttcctgaggtgcgtcaccgctgcgctgatttatttcgcaatcagtatcaccgccatcgctaaatatagtgatggcgcctcaaaagccgcaggagtctttggctttttcgctacgattgtgttcgcgaccgacttttatctgatctttaatgacgtagccaagtttctcaagcagggtgattcggctgatgaaacgactgcgcacaagaccgaggaagagaactctgattccgattctgattag

SEQ ID NO: 255160 - DNA, 549 bp, Artificial Sequence
  derived and/or modified sequence
atgtggcccccagaccctgaccctgaccctgaccctgagcctgctgggggcagccggcccggccctgctgtgcccggcctgcgggccctgctgcctgcccgggccttcctgtgcagcctgaagggccgcctgctgctggccgagagcggcctgtccttcatcaccttcatctgctacgtggccagcagcgccagcgccttcctgacagcccccctgctggagttcctgctggccctgtacttcctgtttgctgatgccatgcagctgaatgacaagtggcagggcctgtgctggcccatgatggacttcctgcgctgtgtgacagctgccctgatctactttgccatcagcatcacagccatcgccaagtacagtgatggagccagcaaggccgccggcgtgtttggcttctttgccaccatcgtgtttgccacagacttctacctgatcttcaatgatgtggccaagttcctgaagcagggcgacagcgcagatgagaccacagcccacaagacagaggaggagaacagcgacagcgacagcgactag

SEQ ID NO: 255161 - DNA, 549 bp, Artificial Sequence
  derived and/or modified sequence
atgtggccccccgaccccgaccccgaccccgaccccgagcccgccggcggcagtcggccagggcccgccgtccctggactcagagcacttctccccgccagagcttttctgtgttcccttaaggggcggctcctcctagctgaatcagggttgtcatttataacgtttatatgttacgtggcctcgtccgcctccgctttcttaacagcacctttgctcgagtttttgttggccctctattttctgtttgcagatgctatgcagttgaacgacaagtggcagggcctgtgttggccaatgatggacttcttgagatgtgttacagcggcactgatctattttgctatctccattactgcgatcgccaagtactccgatggagcgtccaaagctgccggggtttttggatttttcgcgacaattgtctttgcaacggatttctatctgatctttaacgatgtggccaaatttctgaaacaaggtgactccgcagacgagactaccgctcacaagaccgaagaggagaatagcgactctgacagcgactag

SEQ ID NO: 255162 - DNA, 549 bp, Artificial Sequence
  derived and/or modified sequence
atgtggccccccgaccccgaccccgaccccgaccccgagcccgccggcggatccagaccaggaccagcagtgccagggttgagagcactcctgccagcaagagcatttctttgttccctcaagggcagactgctcctggcggagtccgggctgtcattcattaccttcatatgctacgtagcctcctcagcctcagctttcttgactgctcctttgctggagttcctcctcgccctttacttcctctttgccgacgccatgcagctgaacgataaatggcagggactgtgttggcctatgatggacttcctccgatgtgtaaccgcagcattgatatatttcgccatctcgattacagcaatcgcaaagtactcagacggggcatccaaagccgctggagtgttcggctttttcgcaactattgttttcgctaccgacttctaccttatctttaatgatgtcgctaagttccttaagcagggagacagcgccgacgaaaccaccgctcataaaaccgaggaagagaattcagattccgacagcgactag

SEQ ID NO: 255163 - DNA, 549 bp, Artificial Sequence
  derived and/or modified sequence
atgtggccccccgaccccgaccccgaccccgaccccgagcccgccggaggcagtaggccgggaccagccgttccagggcttcgggcccttctccccgctagggccttcctctgttcgctcaaggggcgcctgctacttgcagagtctgggttgtctttcatcacttttatctgttacgtggccagttctgcctcagcgtttttgactgcccctctgcttgagttcttactcgctctgtacttcctgttcgcagacgcaatgcaacttaacgacaagtggcagggcctgtgctggcccatgatggactttctgcgatgtgtcacagcggctctgatctattttgctatatctataaccgccattgccaaatattccgatggcgcgtccaaggctgcaggggtgttcggcttcttcgccacaattgtattcgccactgacttttatctcatcttcaatgacgtggcaaaatttttgaagcagggagacagcgccgacgaaaccacagcccataagacagaagaagaaaattccgactctgattccgattag

SEQ ID NO: 255164 - DNA, 549 bp, Artificial Sequence
  derived and/or modified sequence
atgtggcctcctgaccccgatcccgaccccgatcctgaacctgctggcggatccagacctggccctgccgtgcccggactgcgcgcactgttgcccgcacgcgctttcctgtgttctctgaaaggtagactgctgttggctgaatcaggcctctcctttatcacattcatttgttacgtggcgagcagtgcctctgctttcctaaccgcaccgctcctagagttcctgctggcactgtactttctcttcgccgacgctatgcaactgaatgacaagtggcagggcctctgctggcctatgatggacttcctccgatgcgtgacagctgctctaatctactttgctatttccataaccgccattgccaaatatagtgacggcgcatcaaaagctgctggtgtgttcgggttttttgccactattgtattcgctactgatttctatctgatttttaacgatgttgccaagtttctcaagcagggggattctgccgacgagacgactgcacacaaaacggaggaagagaatagtgattccgactccgattag

SEQ ID NO: 255165 - DNA, 549 bp, Artificial Sequence
  derived and/or modified sequence
atgtggcccccagaccccgaccccgacccagatcctgaacccgctgggggtagccgaccaggccctgccgttcctggcctgcgggctctcttgccggctagggcattcctctgtagcttgaaaggacgactgctcttggcagaatcagggttaagctttatcacctttatttgttacgttgcatcttctgcctcagccttcctgacagctcctctgctcgagttcctactcgctctgtacttcctgtttgccgatgcaatgcaactcaacgacaagtggcagggcctttgttggccaatgatggactttcttaggtgtgtcaccgccgctttgatctactttgccatctccattacagcgatcgccaaatattctgacggagctagcaaagccgctggagtattcgggttcttcgccaccattgtgttcgcgacagacttttatctgatcttcaacgatgtggcaaagttcctcaagcaaggcgactctgccgatgaaaccacggctcacaaaacagaagaggagaatagtgatagcgatagcgactag

SEQ ID NO: 255166 - DNA, 549 bp, Artificial Sequence
  derived and/or modified sequence
atgtggccccctgacccagatccagatccggatcctgagccagctggtggatcccgccctggaccagccgtgcccggtctgagggcccttctgcccgctcgcgcatttctgtgcagcctgaagggacggctcctgcttgctgagagcggactgagctttatcaccttcatttgttacgtcgcgtcaagtgccagcgcatttctgaccgctccgctgctggagttcctgttggctctctatttcttatttgcagatgcgatgcaattaaacgataagtggcaggggctgtgttggcccatgatggatttcctgcgctgtgtaaccgccgcattaatctacttcgccatatctattacagccattgctaagtacagcgatggtgcctccaaagccgcaggtgtttttggttttttcgctaccatagtgtttgccacagacttctaccttatttttaacgatgtggccaagttccttaagcagggagactcagctgatgaaacaaccgcccataagaccgaggaggagaactctgactcagactctgactag

SEQ ID NO: 255167 - DNA, 2123 bp, Artificial Sequence
  derived and/or modified sequence
aagaaaactccggcccccaagaaaaagagagggcatgggttgcggagccgacatcacggccggggtctttgctgtttagacgcctgggttcccggatcccagacacgcgcacgggcaggaagttagaccggagacagcgagtatagacagcccttctggataggggcagacgggtgggagctccgaaggggtgccggggcggtgatcgggaggtctccagcggcccgaaccagggtgaagaagaagcccgggtttccgcttccctccgggcgcgagaagaggggagccaggccgagccccggccctaccgccgccgccgccatgtggcccccagaccccgaccccgacccggaccccgagcctgccggcggctcccgtcccggccccgcggtccccgggctccgcgccctgctgccggcgcgggctttcctctgctctctcaaaggccgcctcctgctggccgagtcgggtctctcattcatcacttttatctgctatgtggcgtcctcagcatctgccttcctcacagcgcctctgctggagttcctgctggccttgtacttcctctttgctgatgccatgcagctgaatgacaagtggcagggcttgtgctggcccatgatggacttcctgcgctgtgtcaccgcggccctcatctactttgctatctccatcacggccatcgccaagtactcggatggggcttccaaagccgctggggtgtttggcttctttgctaccatcgtgtttgcaactgatttctacctgatctttaacgacgtggccaaattcctcaaacaaggggactctgcagatgagaccacagcccacaagacagaagaagagaattccgactcggactctgactgaaggcctggcgggtgccttggcaacctgagccacacaggcctccacccctgcgcctcacaggggtcgctggcgttggagcggaggcctggacttctgagttgcagagggggctgcggacacagcaggccccctacagcctcaggttctgcctgagcccagcctaccaggcttgcccctcagctcagcactgttgaccacgctgcgtatgagggcatcttgggtatcccactccttctccccatttctgtcccacaggccttcagccctttaacgtctctgccaaaaaccagcacaaggagacaaagcagagccttgtctgtatctgggcagcaggtgttccatgctgctaggtggcgggggtcgggggtcttctgtttcactaacaggaacaaagacagaaaccatgacagggctgccccgccaggccccggtgggtttgtctgcacttggtgctcctgcccacaccagccactttggtgacaatgacccttccaagaatctttggttcaaggagcaccagttccctcttcattcttgaagcagggagaaattgacctttgccttgtcgcccaggaagtggggctcggcacccataactaacacctcccacccttggaaaccatgtcttctgggggtgagatgaccattctgggtctaagactgtttcaaagaagagctcatagactgactggtccagaagacagagggtacaacagtggcatcacagtgacagtgtcatggggagctgggcgggcccagccaaaccctccttcttcctagagcccagccagcaggcaggagttcctggaccctcaggacagtgaacttccagacctcagggcaggtctatgggccactgcaggagatgagaccagccttctgtgttcacctaacgatttatactgtgtatctgtctttgatggaattttgtaactttttatatttttttatgcaaaagcagcttcttaacagatggcattttctgtgactctaggcctcacaaaagagccagagttctggacccatgtttggagcatttgtagccttattctcttgcgtgtgaatctcttaccctgaaaaaaagccataatgaattaagccagactgaccacttgcttggagtgtgtgcttgaaaaaaccagagcaatactgttgggtattgtatcaggcttcagtacaaactggtaacaccaatgtggatcctgacagctttcagttttagcaaaaatacacgtgaaatctgactaccattt

SEQ ID NO: 255168 - DNA, 2330 bp, Artificial Sequence
  derived and/or modified sequence
gtgtgtgtgtgtgtgtgtgtgagagagagagatgtgttggggtggggggactgcaggtcaggaagtcctgcagatgtgcgtgcctgtgtgtgtttgcgcgcgcgcgcgcgtgtgtgtgtgtctgtgtgtgtgcctggagctgcgcttgcaggtctgagagtcctctgagaatgggttgggggaggcgggtgcaggaccgaggcctggaacagccaacaaagaggccctggaggagggtggggctggccggggacaggaggggtggccaagaaagtcgcaagaaaactccggcccccaagaaaaagagagggcatgggttgcggagccgacatcacggccggggtctttgctgtttagacgcctgggttcccggatcccagacacgcgcacgggcaggaagttagaccggagacagcgagtatagacagcccttctggataggggcagacggcccgggtttccgcttccctccgggcgcgagaagaggggagccaggccgagccccggccctaccgccgccgccgccatgtggcccccagaccccgaccccgacccggaccccgagcctgccggcggctcccgtcccggccccgcggtccccgggctccgcgccctgctgccggcgcgggctttcctctgctctctcaaaggccgcctcctgctggccgagtcgggtctctcattcatcacttttatctgctatgtggcgtcctcagcatctgccttcctcacagcgcctctgctggagttcctgctggccttgtacttcctctttgctgatgccatgcagctgaatgacaagtggcagggcttgtgctggcccatgatggacttcctgcgctgtgtcaccgcggccctcatctactttgctatctccatcacggccatcgccaagtactcggatggggcttccaaagccgctggggtgtttggcttctttgctaccatcgtgtttgcaactgatttctacctgatctttaacgacgtggccaaattcctcaaacaaggggactctgcagatgagaccacagcccacaagacagaagaagagaattccgactcggactctgactgaaggcctggcgggtgccttggcaacctgagccacacaggcctccacccctgcgcctcacaggggtcgctggcgttggagcggaggcctggacttctgagttgcagagggggctgcggacacagcaggccccctacagcctcaggttctgcctgagcccagcctaccaggcttgcccctcagctcagcactgttgaccacgctgcgtatgagggcatcttgggtatcccactccttctccccatttctgtcccacaggccttcagccctttaacgtctctgccaaaaaccagcacaaggagacaaagcagagccttgtctgtatctgggcagcaggtgttccatgctgctaggtggcgggggtcgggggtcttctgtttcactaacaggaacaaagacagaaaccatgacagggctgccccgccaggccccggtgggtttgtctgcacttggtgctcctgcccacaccagccactttggtgacaatgacccttccaagaatctttggttcaaggagcaccagttccctcttcattcttgaagcagggagaaattgacctttgccttgtcgcccaggaagtggggctcggcacccataactaacacctcccacccttggaaaccatgtcttctgggggtgagatgaccattctgggtctaagactgtttcaaagaagagctcatagactgactggtccagaagacagagggtacaacagtggcatcacagtgacagtgtcatggggagctgggcgggcccagccaaaccctccttcttcctagagcccagccagcaggcaggagttcctggaccctcaggacagtgaacttccagacctcagggcaggtctatgggccactgcaggagatgagaccagccttctgtgttcacctaacgatttatactgtgtatctgtctttgatggaattttgtaactttttatatttttttatgcaaaagcagcttcttaacagatggcattttctgtgactctaggcctcacaaaagagccagagttctggacccatgtttggagcatttgtagccttattctcttgcgtgtgaatctcttaccctgaaaaaaagccataatgaattaagccagactgaccacttgcttggagtgtgtgcttgaaaaaaccagagcaatactgttgggtattgtatcaggcttcagtacaaactggtaacaccaatgtggatcctgacagctttcagttttagcaaaaatacacgtgaaatctgactaccatttaa

SEQ ID NO: 255169 - DNA, 1934 bp, Artificial Sequence
  derived and/or modified sequence
ggcggggcgtggcggcgggggatgcgcccctgcgcgagccagtgtcgcctgccctccttccgcacagcccgggtttccgcttccctccgggcgcgagaagaggggagccaggccgagccccggccctaccgccgccgccgccatgtggcccccagaccccgaccccgacccggaccccgagcctgccggcggctcccgtcccggccccgcggtccccgggctccgcgccctgctgccggcgcgggctttcctctgctctctcaaaggccgcctcctgctggccgagtcgggtctctcattcatcacttttatctgctatgtggcgtcctcagcatctgccttcctcacagcgcctctgctggagttcctgctggccttgtacttcctctttgctgatgccatgcagctgaatgacaagtggcagggcttgtgctggcccatgatggacttcctgcgctgtgtcaccgcggccctcatctactttgctatctccatcacggccatcgccaagtactcggatggggcttccaaagccgctggggtgtttggcttctttgctaccatcgtgtttgcaactgatttctacctgatctttaacgacgtggccaaattcctcaaacaaggggactctgcagatgagaccacagcccacaagacagaagaagagaattccgactcggactctgactgaaggcctggcgggtgccttggcaacctgagccacacaggcctccacccctgcgcctcacaggggtcgctggcgttggagcggaggcctggacttctgagttgcagagggggctgcggacacagcaggccccctacagcctcaggttctgcctgagcccagcctaccaggcttgcccctcagctcagcactgttgaccacgctgcgtatgagggcatcttgggtatcccactccttctccccatttctgtcccacaggccttcagccctttaacgtctctgccaaaaaccagcacaaggagacaaagcagagccttgtctgtatctgggcagcaggtgttccatgctgctaggtggcgggggtcgggggtcttctgtttcactaacaggaacaaagacagaaaccatgacagggctgccccgccaggccccggtgggtttgtctgcacttggtgctcctgcccacaccagccactttggtgacaatgacccttccaagaatctttggttcaaggagcaccagttccctcttcattcttgaagcagggagaaattgacctttgccttgtcgcccaggaagtggggctcggcacccataactaacacctcccacccttggaaaccatgtcttctgggggtgagatgaccattctgggtctaagactgtttcaaagaagagctcatagactgactggtccagaagacagagggtacaacagtggcatcacagtgacagtgtcatggggagctgggcgggcccagccaaaccctccttcttcctagagcccagccagcaggcaggagttcctggaccctcaggacagtgaacttccagacctcagggcaggtctatgggccactgcaggagatgagaccagccttctgtgttcacctaacgatttatactgtgtatctgtctttgatggaattttgtaactttttatatttttttatgcaaaagcagcttcttaacagatggcattttctgtgactctaggcctcacaaaagagccagagttctggacccatgtttggagcatttgtagccttattctcttgcgtgtgaatctcttaccctgaaaaaaagccataatgaattaagccagactgaccacttgcttggagtgtgtgcttgaaaaaaccagagcaatactgttgggtattgtatcaggcttcagtacaaactggtaacaccaatgtggatcctgacagctttcagttttagcaaaaatacacgtgaaatctg

SEQ ID NO: 255170 - DNA, 549 bp, Artificial Sequence
  derived and/or modified sequence
atgtggccccccgaccccgaccccgaccccgaccccgagcccgccggcggcagcagacccggccccgccgtgcccggcctgagagccctgctgcccgccagagccttcctgtgcagcctgaagggcagactgctgctggccgagagcggcctgagcttcatcaccttcatctgctacgtggccagcagcgccagcgccttcctgaccgcccccctgctggagttcctgctggccctgtacttcctgttcgccgacgccatgcagctgaacgacaagtggcagggcctgtgctggcccatgatggacttcctgagatgcgtgaccgccgccctgatctacttcgccatcagcatcaccgccatcgccaagtacagcgacggcgccagcaaggccgccggcgtgttcggcttcttcgccaccatcgtgttcgccaccgacttctacctgatcttcaacgacgtggccaagttcctgaagcagggcgacagcgccgacgagaccaccgcccacaagaccgaggaggagaacagcgacagcgacagcgactag

SEQ ID NO: 255171 - protein, 305 aa, Artificial Sequence
  derived and/or modified sequence
MSLWVDKYRPCSLGRLDYHKEQAAQLRNLVQCGDFPHLLVYGPSGAGKKTRIMCILRELYGVGVEKLRIEHQTITTPSKKKIEISTIASNYHLEVNPSDAGNSDRVVIQEMLKTVAQSQQLETNSQRDFKVVLLTEVDKLTKDAQHALRRTMEKYMSTCRLILCCNSTSKVIPPIRSRCLAVRVPAPSIEDICHVLSTVCKKEGLNLPSQLAHRLAEKSCRNLRKALLMCEACRVQQYPFTADQEIPETDWEVYLRETANAIVSQQTPQRLLEVRGRLYELLTHCIPPEIIMKACKEESRSCDIF

SEQ ID NO: 255172 - DNA, 918 bp, Artificial Sequence
  derived and/or modified sequence
atgagtctgtgggtggacaagtatcgaccgtgttccctgggcagactcgattaccataaagagcaggcagcccagctgagaaacttagtacagtgcggcgatttcccccacctcctcgtgtacggtccatcgggcgcgggcaagaagactcgaattatgtgcatccttcgcgaactctacggggtcggagtggaaaaacttagaattgagcaccagacaataactaccccatccaagaaaaaaattgaaatctctactattgccagcaattaccacttagaggttaacccttctgacgccggcaattctgacagggtcgtgatccaggagatgctcaaaacagttgcccagtctcagcaattggagacaaacagccagcgggattttaaagtggtgctcctgacagaagtcgataaactcaccaaagacgcacaacacgcactccgacggacaatggagaaatatatgtctacgtgtaggctcatcctgtgctgcaactcgacgtcaaaagtaattccccccatacgcagcagatgtctcgctgtacgagtccctgcaccctccatcgaggacatttgtcacgtcttgtccaccgtctgcaagaaagagggcctaaaccttccctctcagttggcacacaggctggcggaaaaaagctgccggaacctgagaaaggccttattgatgtgtgaggcttgccgtgtgcagcaatatccattcacagcagatcaggaaatccctgagactgattgggaggtgtatctgcgtgagactgcaaatgccatcgtatcccagcagacacctcaaaggctattagaagttagaggcagactctacgagctgttgacacactgtatcccgccggaaataatcatgaaggcctgcaaagaggaatctcggtcttgtgatatcttttag

SEQ ID NO: 255173 - DNA, 918 bp, Artificial Sequence
  derived and/or modified sequence
atgagcctgtgggtggacaagtaccggccctgcagcctgggccgcctggactaccacaaggagcaggccgcccagctgaggaacctggtgcagtgtggggacttcccccacctgctggtgtatggccccagcggggccggcaagaagacccgcatcatgtgcatcctgcgggagctgtatggagtgggcgtggagaagctgagaattgagcaccagaccatcaccacccccagcaagaagaagattgagatcagcaccatcgccagcaactaccacctggaggtgaaccccagtgatgctggcaacagcgacagagtggtgatccaggagatgctgaagacagtggcccagagccagcagctggagaccaacagccagagggacttcaaggtggtgctgctgacagaggtggacaagctgaccaaggatgcccagcacgccctgcggaggaccatggagaagtacatgagcacctgccgcctcatcctgtgctgcaacagcaccagcaaggtgattcctcccatccgcagccgctgcctggccgtgcgggtgcctgcccccagcattgaggacatctgccacgtgctgagcacagtgtgcaagaaggagggcctgaacctgcccagccagctggcccaccggctggccgagaagagctgcaggaacctgaggaaggccctgctgatgtgtgaggcctgccgggtgcagcagtaccccttcaccgctgaccaggagatccctgagacagactgggaggtgtacctgcgggagacagccaatgccatcgtgtcccagcagaccccccagaggctgctggaggtgcggggccgcctgtatgagctgctgacccactgcatccccccagagatcatcatgaaggcctgcaaggaggagagccgcagctgtgacatcttctag

SEQ ID NO: 255174 - DNA, 918 bp, Artificial Sequence
  derived and/or modified sequence
atgagcctgtgggtggacaagtaccggccctgcagcctgggccggctggactaccacaaagagcaagcggctcagcttagaaatctggtccagtgcggtgattttcctcatctgttggtgtacgggccgagtggagcaggtaagaagactcggataatgtgcattctgagagagctgtatggcgttggcgtcgagaagctccggattgagcaccagactatcacaaccccttccaagaagaaaattgagatctctacaatagcgagcaactaccaccttgaggtaaacccctccgacgctgggaatagcgaccgggtcgtcattcaagagatgcttaaaactgttgcgcagtcccagcagttagagacaaactctcagagggactttaaggtcgtgctgctgactgaagtggataaattgaccaaggatgcccagcatgctcttaggcgcacaatggagaaatatatgtctacctgcagactcatcctctgttgcaattcaaccagcaaagtaatcccacctattcgaagccgatgtctcgctgtgcgggtgccggccccaagcatcgaggacatctgccacgttctgtcaacagtttgtaaaaaagaggggcttaacctgccatctcagctggctcacaggcttgctgaaaagtcctgcaggaatttgagaaaagctctgttgatgtgcgaggcttgtcgagtgcagcagtacccatttactgccgaccaggagattcccgagacggactgggaagtctacctgcgcgagactgctaacgccattgtgagccagcagacaccgcaacggctgctagaggttcgggggcgactttacgaactactgacgcattgcatacctccagagattattatgaaagcatgtaaggaggagagccggtcttgtgacattttctag

SEQ ID NO: 255175 - DNA, 918 bp, Artificial Sequence
  derived and/or modified sequence
atgtccctttgggtggacaagtatagaccctgtagtttgggacggcttgattatcataaggagcaggccgcacagttacgcaacttggtgcagtgcggagacttcccccatctgctagtgtacggccctagcggggcagggaagaaaacaagaataatgtgcattctgcgagagttgtatggcgtcggcgtggagaaactgcgcatcgagcaccagaccatcaccactcccagtaaaaagaaaattgaaatctcaaccattgcctccaattatcatctggaagtcaaccccagcgatgccggtaacagcgaccgagtagtgatccaggaaatgctcaaaacagtagcccagagtcaacaactggagacgaactctcaacgggacttcaaagtggtgctcctgaccgaggttgataagctgacgaaggacgcccaacatgccctgcgcagaactatggagaagtacatgtccacctgccgcctgattctgtgttgtaatagcacgagtaaagtgatccctccaatccgctcacggtgtctggctgtccgggttccggctccaagcatagaagatatttgccacgtgctgagcactgtgtgtaagaaagaaggcctgaaccttcccagccagctcgctcatcggttggccgaaaagagctgcagaaatcttcgtaaggctttgctgatgtgtgaggcatgcagggttcaacagtaccccttcacagcggatcaggaaatccctgagacggattgggaggtgtatctgagggaaactgccaacgcaattgtttcccagcaaacaccccaaaggctccttgaagtcaggggacgcctgtacgaactgctcacccattgtatcccgccagagattatcatgaaagcctgcaaggaggagagcaggagctgcgacatattttag

SEQ ID NO: 255176 - DNA, 1461 bp, Artificial Sequence
  derived and/or modified sequence
agtgacgtcacgagatttggagctcgcgggaaaacttgtctctgcgttgtggggaggacgcgcgctcgcgcgggattttcaagcgtaggcccccgggaactcgagctgccatgagcctctgggtggacaagtatcggccctgctccttgggacggctggactatcacaaggagcaggcggcccagctgcggaacctggtgcagtgtggtgactttcctcatctgttagtgtacggaccatcaggtgctggaaaaaagacaagaattatgtgtattctacgtgaactttatggtgttggagtggaaaaattgagaattgaacatcagaccatcacaactccatctaaaaaaaaaattgaaattagcaccattgcaagtaactaccaccttgaagttaatcctagtgatgctggaaatagtgaccgagtagtcattcaggagatgttgaaaacagtggcacaatcacaacaacttgaaacaaactctcaaagggattttaaagtggtattattgacagaagttgacaaactcaccaaagatgctcagcatgccttgcgaagaaccatggaaaaatatatgtctacctgcagattgatcttgtgctgcaattctacatctaaagtgatcccacctattcgtagtaggtgcttggcggttcgtgtgcctgctcccagcattgaagatatttgccacgtgttatctactgtgtgtaagaaggaaggtctgaatcttccttcacaactggctcatagacttgcagagaagtcttgtagaaatctcagaaaagccctgcttatgtgtgaagcctgcagagtgcaacaatatccttttactgcagatcaagaaatccctgagacagattgggaggtgtatctgagggagactgcaaatgctattgtcagtcagcaaactccacaaaggctccttgaagttcgtggaaggctgtatgagcttctaactcattgtattcctcctgagataataatgaaggcatgtaaggaggaatcaagaagctgtgacatattctgaggacctccaaagaacaacttgctactgactggacttctctcatcttttagcatgtgaagttttgcaaatataatccactttgctctgaatgtcctgacacctgcttcagagctcaagattcagactccagcctgaatgttatttcctgagaaaatccctccctgacccactgtgctggttaggtccacctgctaatcacatccacaaaaccctctgcttctccttcaaaacactcatctcctctgtaatgatcagatgaactcatgtctttctcagaggacaataaatttgatgaatggggaccatggaagtttatttccatctgtatccctacatctaactcatctgctggtacctatttgtcatgtatttaataagtacaactacctatgccaccctgcaataaaatgatattgttactttctcttcttta

SEQ ID NO: 255177 - DNA, 918 bp, Artificial Sequence
  derived and/or modified sequence
atgagcctgtgggtggacaagtacagaccctgcagcctgggcagactggactaccacaaggagcaggccgcccagctgagaaacctggtgcagtgcggcgacttcccccacctgctggtgtacggccccagcggcgccggcaagaagaccagaatcatgtgcatcctgagagagctgtacggcgtgggcgtggagaagctgagaatcgagcaccagaccatcaccacccccagcaagaagaagatcgagatcagcaccatcgccagcaactaccacctggaggtgaaccccagcgacgccggcaacagcgacagagtggtgatccaggagatgctgaagaccgtggcccagagccagcagctggagaccaacagccagagagacttcaaggtggtgctgctgaccgaggtggacaagctgaccaaggacgcccagcacgccctgagaagaaccatggagaagtacatgagcacctgcagactgatcctgtgctgcaacagcaccagcaaggtgatcccccccatcagaagcagatgcctggccgtgagagtgcccgcccccagcatcgaggacatctgccacgtgctgagcaccgtgtgcaagaaggagggcctgaacctgcccagccagctggcccacagactggccgagaagagctgcagaaacctgagaaaggccctgctgatgtgcgaggcctgcagagtgcagcagtaccccttcaccgccgaccaggagatccccgagaccgactgggaggtgtacctgagagagaccgccaacgccatcgtgagccagcagaccccccagagactgctggaggtgagaggcagactgtacgagctgctgacccactgcatcccccccgagatcatcatgaaggcctgcaaggaggagagcagaagctgcgacatcttctag

SEQ ID NO: 255178 - protein, 363 aa, Artificial Sequence
  derived and/or modified sequence
MQAFLKGTSISTKPPLTKDRGVAASAGSSGENKKAKPVPWVEKYRPKCVDEVAFQEEVVAVLKKSLEGADLPNLLFYGPPGTGKTSTILAAARELFGPELFRLRVLELNASDERGIQVVREKVKNFAQLTVSGSRSDGKPCPPFKIVILDEADSMTSAAQAALRRTMEKESKTTRFCLICNYVSRIIEPLTSRCSKFRFKPLSDKIQQQRLLDIAKKENVKISDEGIAYLVKVSEGDLRKAITFLQSATRLTGGKEITEKVITDIAGVIPAEKIDGVFAACQSGSFDKLEAVVKDLIDEGHAATQLVNQLHDVVVENNLSDKQKSIITEKLAEVDKCLADGADEHLQLISLCATVMQQLSQNC

SEQ ID NO: 255179 - protein, 43 aa, Artificial Sequence
  derived and/or modified sequence
MQAFLKGTSISTKPPLTKDRGVAASAGSSGENKKAKPVPWVEK

SEQ ID NO: 255180 - protein, 214 aa, Artificial Sequence
  derived and/or modified sequence
MQAFLKGTSISTKPPLTKDRGVAASAGSSGENKKAKPVPWVEKYRPKCVDEVAFQEEVVAVLKKSLEGADLPNLLFYGPPGTGKTSTILAAARELFGPELFRLRVLELNASDERGIQVVREKVKNFAQLTVSGSRSDGKPCPPFKIVILDEADSMTSAAQAALRRTMEKESKTTRFCLICNYVSRIIEPLTSRCSKFRFKPLSDKIQQQRLLDI

SEQ ID NO: 255181 - protein, 123 aa, Artificial Sequence
  derived and/or modified sequence
MQAFLKGTSISTKPPLTKDRGVAASAGSSGENKKAKPVPWVEKYRPKCVDEVAFQEEVVAVLKKSLEGADLPNLLFYGPPGTGKTSTILAAARELFGPELFRLRVLELNASDERGIQVVREKV

SEQ ID NO: 255182 - protein, 167 aa, Artificial Sequence
  derived and/or modified sequence
MQAFLKGTSISTKPPLTKDRGVAASAGSSGENKKAKPVPWVEKYRPKCVDEVAFQEEVVAVLKKSLEGADLPNLLFYGPPGTGKTSTILAAARELFGPELFRLRVLELNASDERGIQVVREKVKNFAQLTVSGSRSDGKPCPPFKIVILDEADSMTSAAQAALRRTM

SEQ ID NO: 255183 - protein, 95 aa, Artificial Sequence
  derived and/or modified sequence
MQAFLKGTSISTKPPLTKDRGVAASAGSSGENKKAKPVPWVEKYRPKCVDEVAFQEEVVAVLKKSLEGADLPNLLFYGPPGTGKTSTILAAAREL

SEQ ID NO: 255184 - DNA, 1092 bp, Artificial Sequence
  derived and/or modified sequence
atgcaggcattccttaagggaacttccatctccactaaacctccgttgacgaaagatcggggagttgcagcctcagctgggtcctcgggagagaataaaaaggctaagcctgtcccttgggtggagaaatacaggcccaagtgcgtcgatgaggtggcgttccaggaagaagtggtagctgtgctgaaaaaaagcttggagggtgcggatctgccgaacctactcttctacgggccacctggtaccggcaagacctcgaccattctggctgctgcccgtgagttgtttggaccagagctgttccgcctccgtgtgttagaactgaatgcatcagatgagagggggatacaagtggtgcgcgaaaaggttaagaactttgcccaactaactgtgtctgggtcgaggtcagacggtaaaccctgccccccatttaagatagtgatacttgacgaagccgacagcatgacttcggccgcacaggccgccctgcggcggaccatggagaaggagagcaagacaactcggttctgcctgatttgcaattatgtctcacggatcattgaaccactcacctccaggtgttccaaatttcggtttaagcctctttcagataagattcaacagcaacgactcctggatatcgcaaaaaaagagaacgtgaaaatcagcgatgagggcattgcttaccttgttaaagtgtccgagggggatcttcgcaaggcaatcacattcttacagtccgccacgcggttaacgggcgggaaagagatcaccgagaaagtaatcaccgatatcgccggcgtgattccagccgagaagatcgatggggttttcgccgcttgtcagtcagggtctttcgacaaacttgaggctgtcgtgaaagacttgattgatgaaggccatgctgccactcagcttgtgaaccaactgcacgatgtggttgtggagaacaatctgtctgacaagcagaaaagcattattacagagaaattggccgaggtggacaagtgtctggccgacggggccgatgagcacctgcagctgattagcttgtgcgccacagttatgcagcagctcagtcagaactgctag

SEQ ID NO: 255185 - DNA, 1092 bp, Artificial Sequence
  derived and/or modified sequence
atgcaagcatttcttaagggtacttcgatctccacgaagccaccgttaactaaagatagaggggtggccgcaagcgccggcagcagcggggaaaataaaaaagcaaagccagttccatgggttgagaagtatcggcctaagtgtgtcgatgaggtagccttccaagaggaggtggttgccgtcctgaagaagagtctggaaggtgctgatctgcctaacctgcttttttatggccctccgggcacaggaaagacctcaactatcctggccgctgcccgtgagctcttcggacccgagcttttcaggctgagagtgcttgaactgaatgctagcgacgaaagaggaatacaggtcgtgcgcgagaaagtaaagaattttgcccagcttactgtcagcggcagcagaagtgacggcaaaccctgtcctccgtttaagattgtgatcctggacgaggccgattccatgacatctgccgcacaagccgccctccgacgtaccatggaaaaggaaagcaaaactacacggttttgcttgatttgtaattacgtttcgagaatcatcgaaccactcacatcccggtgttcaaagtttcggttcaagcccctcagcgataagatccagcagcaaagactgcttgacatagcaaaaaaagagaacgtcaaaatctcagacgagggaatcgcttacctggtaaaagtcagtgagggggatctgcgtaaggccataacgtttcttcagtccgcaactagactgactgggggcaaagagattaccgaaaaagtgattaccgatatcgccggtgtgatccctgccgagaagattgatggggtctttgccgcctgtcagagcggttccttcgacaaactggaggcagtagtgaaggaccttattgatgaagggcacgcagcaacccaactcgttaaccaactgcacgacgttgtggtagagaacaatctctcggacaaacagaaatcaattatcaccgaaaagctggccgaggtggacaaatgcttggctgacggtgccgacgagcaccttcaactgatctctctctgtgctacagtcatgcagcaactctcacagaattgttag

SEQ ID NO: 255186 - DNA, 132 bp, Artificial Sequence
  derived and/or modified sequence
atgcaggcgttccttaaggggacctcaattagtactaagcccccgctgaccaaggataggggcgtcgccgctagcgccgggtccagcggcgagaataagaaggctaagcccgtaccctgggtggagaaatag

SEQ ID NO: 255187 - DNA, 645 bp, Artificial Sequence
  derived and/or modified sequence
atgcaagcctttttaaaggggacttctatctctaccaaacccccgctgactaaagacaggggtgtggcagctagcgccggaagtagcggcgagaataaaaaggccaagcctgtaccctgggtggagaagtacaggcctaagtgtgtggatgaggttgcatttcaggaggaagttgtagctgtgttgaaaaaaagcttagagggcgcagacctgccaaacctccttttctacggcccccctggaactggtaaaacttctaccattttggccgctgctagggagctatttgggcccgaattgttccggctgagagttctcgaactgaatgcgtccgacgagcgaggcatacaggtggttagggaaaaagtcaagaacttcgcacagttaactgtgagcggatctaggagtgatggcaagccatgtccgcctttcaagattgtaatactggacgaggctgacagcatgaccagcgccgctcaggccgccctgcgtaggacgatggagaaagagagcaaaaccacgcgcttttgcctcatttgcaactatgtttccagaatcatagaaccattgacatctcgatgcagtaaattcaggttcaagccactgagcgataaaattcagcagcagagacttcttgacatttag

SEQ ID NO: 255188 - DNA, 372 bp, Artificial Sequence
  derived and/or modified sequence
atgcaggccttccttaagggtactagtatttctacaaagcctccccttacaaaggatcggggggtggcagctagcgccgggagctccggcgaaaacaagaaggctaaacccgtcccttgggtggaaaagtacagaccaaagtgtgtcgacgaggtggcatttcaggaggaagtggtggctgtgctgaagaaatctctagagggagcagatctgcctaatctgctcttttacgggccacctggaactgggaagacgtctacaattctggctgcagccagagagctgttcggaccagagttgttcagacttcgggtgctcgagctgaacgcgtccgacgagcgcgggattcaggtggttcgcgaaaaggtctag

SEQ ID NO: 255189 - DNA, 504 bp, Artificial Sequence
  derived and/or modified sequence
atgcaggcatttttgaaaggcactagcattagtaccaaaccgccactcaccaaagatcgcggggtggccgcgtctgctgggtcaagcggtgagaataagaaggccaagcccgttccctgggtcgagaagtacagacccaagtgtgtggacgaagtggcattccaagaggaggttgtcgcggtcctcaagaagtccctggagggcgccgacctgcccaatctgctattttacgggcctcccgggactggtaaaacatctacgatccttgcagcagctagggagctgttcggtcccgagctcttccgcctgagggtgttggagttgaatgcgagcgacgagagaggcatccaggtggttcgggagaaggtcaagaactttgctcagctgactgtcagtggatccagatctgatgggaaaccatgcccacccttcaagatcgtaattctggacgaggccgacagcatgacatcagcagcccaagccgcacttcggcgaaccatgtag

SEQ ID NO: 255190 - DNA, 288 bp, Artificial Sequence
  derived and/or modified sequence
atgcaagccttcctcaaaggcacgtctatctccacaaaacctcctctcactaaggatagaggagtcgccgcatcggctggatcttcgggggaaaacaagaaggctaagccagttccttgggtggagaagtatagacctaagtgcgtcgatgaagtcgccttccaggaagaagtggtcgccgtgctgaaaaaaagtctcgagggcgcagatcttccgaacctcctgttttatggacctcccggcaccggtaaaacatcgacgattcttgctgcggcccgggagctgtag

SEQ ID NO: 255191 - DNA, 1092 bp, Artificial Sequence
  derived and/or modified sequence
atgcaggccttcctgaagggcaccagcatcagcaccaagccacccctgaccaaggacagaggagtggccgccagcgctggcagcagtggagagaacaagaaggccaagcctgtgccctgggtggagaagtaccggcccaagtgtgtggatgaggtggccttccaggaggaggtggtggccgtgctgaagaagagcctggagggcgctgacctgcccaacctgctcttctacggccccccaggcaccgggaagaccagcaccatcctggccgccgcccgggagctgtttggacctgagctgttccggctgcgggtgctggagctgaatgccagtgatgagcggggcatccaggtggtgcgggagaaggtgaagaactttgcccagctgactgtgtctggcagcagaagtgatggcaagccctgcccccccttcaagatcgtcatcctggatgaggccgacagcatgaccagcgctgcccaggccgccctgcggaggaccatggagaaggagagcaagaccacccgcttctgcctgatctgcaactacgtgagccgcatcatcgagcccctgaccagccgctgcagcaagttccgcttcaagcccctgagtgacaagatccagcagcagaggctgctggacatcgccaagaaggaaaatgtgaagatcagtgatgagggcatcgcctacctggtgaaggtgtctgagggggacctgaggaaggccatcaccttcctgcagagcgccacccggctgaccggcggcaaggagatcacagagaaggtgatcacagacattgctggggtcatcccagctgagaagattgatggagtgtttgctgcctgccagagcggcagctttgacaagctggaggccgtggtgaaggacctgattgatgagggccacgccgccacccagctggtgaaccagctgcatgatgtggtggtggagaacaacctgagtgacaagcagaagagcatcatcacagagaagctggccgaggtggacaagtgcctggctgatggagcagatgagcacctgcagctgatcagcctgtgtgccaccgtgatgcagcagctgagccagaactgctag

SEQ ID NO: 255192 - DNA, 132 bp, Artificial Sequence
  derived and/or modified sequence
atgcaggccttcctgaagggcaccagcatcagcaccaagccacccctgaccaaggacagaggagtggccgccagcgctggcagcagtggagagaacaagaaggccaagcctgtgccctgggtggagaagtag

SEQ ID NO: 255193 - DNA, 645 bp, Artificial Sequence
  derived and/or modified sequence
atgcaggccttcctgaagggcaccagcatcagcaccaagccacccctgaccaaggacagaggagtggccgccagcgctggcagcagtggagagaacaagaaggccaagcctgtgccctgggtggagaagtaccggcccaagtgtgtggatgaggtggccttccaggaggaggtggtggccgtgctgaagaagagcctggagggcgctgacctgcccaacctgctcttctacggccccccaggcaccgggaagaccagcaccatcctggccgccgcccgggagctgtttggacctgagctgttccggctgcgggtgctggagctgaatgccagtgatgagcggggcatccaggtggtgcgggagaaggtgaagaactttgcccagctgactgtgtctggcagcagaagtgatggcaagccctgcccccccttcaagatcgtcatcctggatgaggccgacagcatgaccagcgctgcccaggccgccctgcggaggaccatggagaaggagagcaagaccacccgcttctgcctgatctgcaactacgtgagccgcatcatcgagcccctgaccagccgctgcagcaagttccgcttcaagcccctgagtgacaagatccagcagcagaggctgctggacatctag

SEQ ID NO: 255194 - DNA, 372 bp, Artificial Sequence
  derived and/or modified sequence
atgcaggccttcctgaagggcaccagcatcagcaccaagccacccctgaccaaggacagaggagtggccgccagcgctggcagcagtggagagaacaagaaggccaagcctgtgccctgggtggagaagtaccggcccaagtgtgtggatgaggtggccttccaggaggaggtggtggccgtgctgaagaagagcctggagggcgctgacctgcccaacctgctcttctacggccccccaggcaccgggaagaccagcaccatcctggccgccgcccgggagctgtttggacctgagctgttccggctgcgggtgctggagctgaatgccagtgatgagcggggcatccaggtggtgcgggagaaggtgtag

SEQ ID NO: 255195 - DNA, 504 bp, Artificial Sequence
  derived and/or modified sequence
atgcaggccttcctgaagggcaccagcatcagcaccaagccacccctgaccaaggacagaggagtggccgccagcgctggcagcagtggagagaacaagaaggccaagcctgtgccctgggtggagaagtaccggcccaagtgtgtggatgaggtggccttccaggaggaggtggtggccgtgctgaagaagagcctggagggcgctgacctgcccaacctgctcttctacggccccccaggcaccgggaagaccagcaccatcctggccgccgcccgggagctgtttggacctgagctgttccggctgcgggtgctggagctgaatgccagtgatgagcggggcatccaggtggtgcgggagaaggtgaagaactttgcccagctgactgtgtctggcagcagaagtgatggcaagccctgcccccccttcaagatcgtcatcctggatgaggccgacagcatgaccagcgctgcccaggccgccctgcggaggaccatgtag

SEQ ID NO: 255196 - DNA, 288 bp, Artificial Sequence
  derived and/or modified sequence
atgcaggccttcctgaagggcaccagcatcagcaccaagccacccctgaccaaggacagaggagtggccgccagcgctggcagcagtggagagaacaagaaggccaagcctgtgccctgggtggagaagtaccggcccaagtgtgtggatgaggtggccttccaggaggaggtggtggccgtgctgaagaagagcctggagggcgctgacctgcccaacctgctcttctacggccccccaggcaccgggaagaccagcaccatcctggccgccgcccgggagctgtag

SEQ ID NO: 255197 - DNA, 1092 bp, Artificial Sequence
  derived and/or modified sequence
atgcaggccttcctgaagggcaccagcatcagcaccaagccccccctcaccaaagatagaggtgtggctgcctccgctgggtcatcaggcgagaataagaaagctaaacccgtgccatgggtggagaaatacagaccgaagtgcgtcgacgaggtggcatttcaggaggaggtcgtcgccgtgttaaagaagagtctggagggcgccgacctaccgaatttgcttttctacggtccgccggggacaggtaagacatcgaccattctggccgcggcccgagagttgtttggtcctgagctgtttagactgcgggtactggaacttaatgcatccgacgaacgcggcattcaggttgtgagggaaaaggtgaagaatttcgcacaattgacagtgtccgggtcccggtcagatggtaagccttgtccaccatttaagattgtgattctcgacgaagctgacagtatgacatccgcggcccaggctgcccttaggagaaccatggaaaaggagagtaagactacacggttctgtctgatctgtaactatgtgtcacgaattatcgaacctttaacttcccgttgttccaagtttcgcttcaaacccctgagcgataagattcagcagcagagactgttggatatcgctaaaaaggaaaacgtgaagattagtgatgaagggatcgcttaccttgtgaaagtcagtgagggcgacctgcgcaaagctatcacttttctgcagtcggccactcgcttgaccggagggaaggagatcaccgagaaggtaattaccgatatcgcgggagtgatacctgccgagaagatcgacggagtgttcgctgcctgccagtcaggttcctttgacaagctcgaagctgtggtcaaagacttaattgacgagggccacgccgctacccagttggtcaaccagctgcatgacgttgtggttgagaataacctttcagacaaacagaaatccataatcactgaaaagctcgcagaagtagacaaatgcttggcggatggcgccgatgaacatctgcagctgattagcctttgcgcaacagtgatgcagcagctgtcacaaaactgctag

SEQ ID NO: 255198 - DNA, 1092 bp, Artificial Sequence
  derived and/or modified sequence
atgcaggccttcctgaagggcaccagcatcagcaccaagccccccctgactaaagacaggggtgtggccgctagtgctgggtcttcaggcgaaaacaagaaagcaaagcccgtgccgtgggttgagaaatacaggcctaagtgcgttgacgaggtagccttccaggaagaggtcgtggccgtgttgaagaagtccttagagggcgcagatctacctaacctgctcttttacgggcctcccggaaccgggaaaacgagtactatcctggccgcagcacgcgaattgtttgggcccgaattgttcaggcttcgggttctggagttgaacgcctcagacgagaggggcatccaggtggtcagggagaaagtgaagaatttcgcccagctaaccgttagtggctcgcgaagcgacggtaagccttgtccgccattcaaaatcgtgattctcgatgaggccgactctatgacttctgctgctcaggcagccctgaggcgcactatggaaaaagaatcaaaaaccacacgcttctgtctgatctgcaattatgtgtcccggataatagaaccactcacttcaaggtgctccaagttccggtttaagcctctgtctgacaagattcagcagcaaagactcctcgatattgccaaaaaagaaaacgtgaagatcagtgacgagggtattgcatacctggtgaaggtatccgaaggggacttacggaaggcaattacctttctgcagtccgcgacccgccttacagggggtaaggagatcaccgagaaggttattaccgacatagccggagtcatcccagcggaaaagattgacggcgtctttgccgcctgccagagcggcagttttgacaaacttgaagccgttgtgaaggatctgatcgatgaggggcacgctgcgacccagctggttaatcagctccacgatgtggtggtagagaataatctgtcggacaagcaaaaaagtatcattaccgagaagctggcagaggtcgacaagtgccttgccgacggtgcggacgaacatctccagctcatatctctttgcgcgaccgtcatgcaacaactcagccagaactgttag

SEQ ID NO: 255199 - DNA, 132 bp, Artificial Sequence
  derived and/or modified sequence
atgcaggccttcctgaagggcaccagcatcagcaccaagccccccctgaccaaagatagaggggttgccgcctccgcgggcagtagtggcgaaaataagaaagctaagcccgtaccttgggtggagaaatag

SEQ ID NO: 255200 - DNA, 645 bp, Artificial Sequence
  derived and/or modified sequence
atgcaggccttcctgaagggcaccagcatcagcaccaagccccccctcacgaaagatcggggtgtagctgccagtgctggctcgtctggcgagaacaaaaaagccaaaccggtgccctgggtcgaaaagtacagaccaaagtgcgtagatgaagtggcttttcaggaagaggtggtggccgtcctcaaaaaatccctggagggtgccgatcttccaaaccttctgttctatggccccccaggaaccgggaaaaccagcacaattctcgctgctgctcgcgagttattcggaccagagctattccgtcttagagttttggaactcaacgcgagtgatgaacggggaattcaagttgttagggagaaagtgaaaaattttgcccaactcaccgtaagtggaagcaggtctgacggaaagccgtgtcctcccttcaagatcgtgatcctggatgaggccgattctatgacttccgcggcccaggcagctcttagaaggaccatggagaaagagtcaaagaccacaaggttctgcctaatctgtaactatgtgtctagaatcatcgaacctttaaccagcagatgcagcaaattccgtttcaagccattgagtgacaaaattcagcaacagcgcctactggatatctag

SEQ ID NO: 255201 - DNA, 372 bp, Artificial Sequence
  derived and/or modified sequence
atgcaggccttcctgaagggcaccagcatcagcaccaagccccccctgaccaaagacaggggagttgccgcatctgctgggagttcaggtgagaataaaaaagcaaaacctgtcccatgggtggaaaagtaccgtcctaagtgtgtggatgaagtggcctttcaggaagaggtcgtggccgtccttaagaagagtctggagggggcggatctgcccaacctgttattctatggcccccctggaactggaaaaacttccaccattttagcagctgcaagggagctctttggccccgagctattccggttgcgcgtgttagagttgaacgcttctgatgagcggggcatacaagttgtgcgggagaaggtctag

SEQ ID NO: 255202 - DNA, 504 bp, Artificial Sequence
  derived and/or modified sequence
atgcaggccttcctgaagggcaccagcatcagcaccaagccccccttaaccaaggatcgcggggtggcagcttccgccggttccagcggagaaaataagaaggccaagccagttccctgggtagaaaaatacagacccaaatgtgtggacgaagtcgcctttcaagaagaggtcgtggccgtgctgaaaaagtccttggagggggcagacctgcctaacctcctcttttacgggccgcccgggacaggaaagacaagcaccattttggccgccgcccgggaactgtttggacctgaattgtttcgcctcagggtgctggaactcaatgcctcagatgagagaggaatacaggtggttcgcgagaaggtgaagaactttgcccagctgacggtgtcaggttcccgctccgatggtaaaccctgcccccccttcaagatcgtgatcctcgacgaagccgattcaatgactagcgccgcccaggctgctctgcgacgcactatgtag

SEQ ID NO: 255203 - DNA, 288 bp, Artificial Sequence
  derived and/or modified sequence
atgcaggccttcctgaagggcaccagcatcagcaccaagccccccctgaccaaagaccgtggggtggccgcttcagccggatcgagtggtgagaacaagaaagctaagccggtgccctgggttgaaaaataccgcccaaagtgtgtcgatgaagtggcctttcaagaggaggtggtggcagtcctcaagaaatccctagagggagccgacctgcccaacctcctgttttatggacccccggggacaggaaaaaccagtacaatcctcgcggctgcccgtgaactgtag

SEQ ID NO: 255204 - DNA, 1092 bp, Artificial Sequence
  derived and/or modified sequence
atgcaagctttcctgaaggggacctccatctccacaaaaccccctctgacaaaagatagaggggtcgccgcatctgcaggcagctctggggagaacaagaaagctaagccagtgccctgggtggaaaaataccgaccaaaatgcgtagatgaggtggcttttcaagaggaggtagttgcagtcctgaagaagagcctcgagggggcagatttgcctaatctgctgttctatgggcctcctggaactggcaagacttccacaatcttagccgcagctagggaacttttcggccctgagctgttcagactcagagttctggagctgaacgcgtctgatgagcgaggcattcaggtggtgagggaaaaggtgaagaatttcgctcagctgacggttagtggtagccgtagcgacggaaagccatgtcctccttttaagatcgtaatcctggatgaggctgactctatgacaagtgctgcccaggccgctctcaggcgcacaatggagaaggaaagcaaaactacacgcttttgcctgatatgcaactacgtgtccagaatcattgagccactgacatcacggtgtagcaaatttcgattcaaacctctttcggataaaattcagcagcagcgtctgctggacattgccaagaaggaaaatgtaaaaataagtgatgaggggatcgcctaccttgtgaaggtttccgagggcgacttgagaaaggcaattaccttcctccagtctgcaaccagattgacgggaggtaaggagatcaccgaaaaggtcatcaccgacatcgcaggcgtgattcccgctgagaaaattgacggcgtgttcgcagcgtgccagtccgggagcttcgacaaattggaagcagttgtcaaggatcttattgatgagggacacgctgccacccagctggtgaatcagctacacgacgtcgtggtggaaaacaacctgagcgacaagcagaagtcaatcatcactgaaaagcttgctgaagtggataagtgcctggccgatggagccgatgaacatcttcagctcatcagtttgtgcgccactgtgatgcagcagctgagccagaattgctag

SEQ ID NO: 255205 - DNA, 1092 bp, Artificial Sequence
  derived and/or modified sequence
atgcaggcatttctgaaggggacatctatctctactaagcccccactgacgaaggacaggggggtagctgcaagtgctggctcctctggagagaacaagaaggcaaaaccggtcccttgggtggaaaagtaccgtcccaaatgtgtagatgaggtagcctttcaggaagaagtggtcgctgtgctgaagaaaagtctcgagggcgcagatctacccaatctgctcttctatggtccaccgggtactggcaagacatcaactatcttggccgcagccagggaactttttggccctgagttgttccgcttgcgagtgttagagctcaacgcaagtgacgaacggggaattcaggtagttcgagagaaggtgaagaatttcgctcaactaaccgtgagtggttcccgcagcgacgggaagccctgccctccatttaaaattgtgatcctggatgaggccgactccatgacatcggctgcccaggctgccctgcgcaggacaatggagaaggagagtaagactacaagattttgtctgatctgcaattatgtctcaaggatcatcgagcctctcacctctcgttgttcgaagtttagattcaaacctttgagcgacaagattcagcagcagcggctacttgacatagccaaaaaagagaatgtaaagatctctgatgaggggatagcctatttagtcaaagtgtcggaaggtgacttgaggaaggccatcaccttcttacaatccgccacacgcttaactggtggtaaagagataaccgaaaaagtcattaccgatatcgccggtgttatccccgcagagaagatagacggcgtgtttgctgcgtgccagtcgggttctttcgataaactcgaagctgtggttaaagatctgattgatgaaggtcatgccgcaacacagctggtgaatcagcttcacgacgtggtggttgagaacaacttatctgataaacaaaaatctattatcacggaaaaacttgccgaggtcgataagtgcctagccgatggggctgatgaacacctgcagcttatcagcctgtgcgcaacagtgatgcagcaactcagccagaactgctag

SEQ ID NO: 255206 - DNA, 132 bp, Artificial Sequence
  derived and/or modified sequence
atgcaggcctttttgaagggaacctcgatttccacaaagccccctctaacgaaagaccggggagtggccgcatcggcaggctccagtggcgaaaataagaaggccaagccagtgccctgggtggaaaagtag

SEQ ID NO: 255207 - DNA, 645 bp, Artificial Sequence
  derived and/or modified sequence
atgcaggccttcctcaaagggacctccataagtacaaaacccccactgactaaggatcggggtgtcgccgcaagtgccggatcttctggagagaacaagaaggctaagccggtcccctgggtagagaaatatcgcccaaagtgtgtagatgaagtggctttccaggaagaagtagttgccgtgctgaagaagagtttagagggggctgacttaccaaatttgctcttctacgggccaccaggaactggcaaaactagcaccattttggcagcggcacgagagttgttcgggcctgagctttttcgtctgcgggtcctagagttaaatgcttctgacgagagggggatccaggttgtgagagaaaaagtaaaaaattttgcccaattgaccgtgtccggctcgcgatccgatgggaaaccatgtccaccttttaaaattgtgatcttagatgaggctgattccatgaccagcgccgctcaggcggctctgcgcagaactatggaaaaggaaagcaaaaccacgcgattctgtctgatctgcaattatgtcagccgtatcattgaaccactaactagcagatgtagcaagtttagatttaaacctctgtccgataaaatacaacagcagaggctcctcgacatctag

SEQ ID NO: 255208 - DNA, 372 bp, Artificial Sequence
  derived and/or modified sequence
atgcaggctttcttaaagggaacgtctatctcgactaagccccctttgacaaaagataggggcgtggccgctagcgccggatccagtggcgagaataaaaaagccaagccggtcccttgggttgagaaataccgcccaaagtgtgtggatgaggtggcgttccaagaggaagtggttgccgtcctgaagaaaagtctagagggcgctgatcttccaaacctccttttctatggccctcccggaactggtaaaacttctactattttagcagcagccagagaactattcggtcctgagctcttccggctccgcgttcttgaactgaacgcatctgacgaacgaggcattcaggtcgtgagagaaaaagtgtag

SEQ ID NO: 255209 - DNA, 504 bp, Artificial Sequence
  derived and/or modified sequence
atgcaggcctttctcaaggggacctctataagcacaaagccccctctgacaaaagatagaggggtcgccgctagcgccggatcgtccggagagaacaaaaaagccaaacccgtgccttgggtcgaaaagtaccgtcccaagtgtgtggatgaagtcgccttccaggaggaggtagttgcggtgctgaaaaagtcactggaaggcgctgacctgcctaaccttcttttctacggcccacctggcacagggaagacatctacaattttagctgcagccagagagctcttcggcccagagctcttccgcctacgggtgctggaactcaacgcctctgacgaaaggggcattcaagtcgttcgtgaaaaggtcaaaaacttcgcccagctgaccgtgtctggaagccggtccgatggtaaaccttgcccgccttttaaaattgtcattctggacgaggcagattcgatgacctccgccgctcaggctgccctgaggcggaccatgtag

SEQ ID NO: 255210 - DNA, 288 bp, Artificial Sequence
  derived and/or modified sequence
atgcaggcctttcttaaggggacaagtattagcaccaaacccccactgactaaagatagaggggtcgccgcatcagcgggaagctcaggggagaacaaaaaagccaaacccgtcccttgggtagagaagtatcgacccaaatgcgtggatgaagtcgcgtttcaagaagaggttgtcgccgtcctgaagaaaagtctggagggcgcagatctgccgaacctcctcttctacggtccccctggcaccggcaagacctccactattcttgccgctgctagagagctttag

SEQ ID NO: 255211 - DNA, 1384 bp, Artificial Sequence
  derived and/or modified sequence
accggcgtattcccgccctgcttttcgcccgccgttccgtggcgggaactgaggcgactgtggggacatcagtgatcgtaagtctcctgggcccgttattctcagattaggtgacggagctaagacttcgagaccatctcgtcctttttgtatcgcggaaacctgaggaacgagccggcggcggtgacctgcacgagaagccaggctaactgggtgaagtaccatgcaagcatttcttaaaggtacatccatcagtactaaacccccgctgaccaaggatcgaggagtagctgccagtgcgggaagtagcggagagaacaagaaagccaaacccgttccctgggtggaaaaatatcgcccaaaatgtgtggatgaagttgctttccaggaagaagtggttgcagtgctgaaaaaatctttagaaggagcagatcttcctaatctcttgttttacggaccacctggaactggaaaaacatccactattttggcagcagctagagaactctttgggcctgaacttttccgattaagagttcttgagttaaatgcatctgatgaacgtggaatacaagtagttcgagagaaagtgaaaaattttgctcaattaactgtgtcaggaagtcgctcagatgggaagccgtgtccgccttttaagattgtgattctggatgaagcagattctatgacctcagctgctcaggcagctttaagacgtaccatggagaaggagtcgaaaaccacccgattctgtcttatctgtaactatgtcagtcgaataattgaacccctgacctctagatgttcaaaattccgcttcaagcctctgtcagataaaattcaacagcagcgattactagacattgccaagaaggaaaatgtcaaaattagtgatgagggaatagcttatcttgttaaagtgtcagaaggagacttaagaaaagccattacatttcttcaaagcgctactcgattaacaggtggaaaggagatcacagagaaagtgattacagacattgccggggtaataccagctgagaaaattgatggagtatttgctgcctgtcagagtggctcttttgacaaactagaagctgtggtcaaggatttaatagatgagggtcatgcagcaactcagctcgtcaatcaactccatgatgtggttgtagaaaataacttatctgataaacagaagtctattatcacagaaaaacttgccgaagttgacaaatgcctagcagatggtgctgatgaacatttgcaactcatcagcctttgtgcaactgtgatgcagcagttatctcagaattgttaacgtgaatatatctggatggggggttttgtaaataatgaagttgtaataaaaataaaatgaccaaaagca

SEQ ID NO: 255212 - DNA, 1448 bp, Artificial Sequence
  derived and/or modified sequence
cgcgctcacgtctgaagtgggagcaatgcaccgggacagggacacctcctaggccatgcctgttccagtccagttctgcctgaaagtccggctggctcatcacctgcctaaataaaaccgtatacgggcaaactccctccgcaagcagcgcgccccagcaccggaagtgacgcgttacgtgcccgcgtattcctaccggcgtattcccgccctgcttttcgcccgccgttccgtggcgggaactgaggcgactgtggggacatcagtgatcggtgaagtaccatgcaagcatttcttaaaggtacatccatcagtactaaacccccgctgaccaaggatcgaggagtagctgccagtgcgggaagtagcggagagaacaagaaagccaaacccgttccctgggtggaaaaatatcgcccaaaatgtgtggatgaagttgctttccaggaagaagtggttgcagtgctgaaaaaatctttagaaggagcagatcttcctaatctcttgttttacggaccacctggaactggaaaaacatccactattttggcagcagctagagaactctttgggcctgaacttttccgattaagagttcttgagttaaatgcatctgatgaacgtggaatacaagtagttcgagagaaagtgaaaaattttgctcaattaactgtgtcaggaagtcgctcagatgggaagccgtgtccgccttttaagattgtgattctggatgaagcagattctatgacctcagctgctcaggcagctttaagacgtaccatggagaaggagtcgaaaaccacccgattctgtcttatctgtaactatgtcagtcgaataattgaacccctgacctctagatgttcaaaattccgcttcaagcctctgtcagataaaattcaacagcagcgattactagacattgccaagaaggaaaatgtcaaaattagtgatgagggaatagcttatcttgttaaagtgtcagaaggagacttaagaaaagccattacatttcttcaaagcgctactcgattaacaggtggaaaggagatcacagagaaagtgattacagacattgccggggtaataccagctgagaaaattgatggagtatttgctgcctgtcagagtggctcttttgacaaactagaagctgtggtcaaggatttaatagatgagggtcatgcagcaactcagctcgtcaatcaactccatgatgtggttgtagaaaataacttatctgataaacagaagtctattatcacagaaaaacttgccgaagttgacaaatgcctagcagatggtgctgatgaacatttgcaactcatcagcctttgtgcaactgtgatgcagcagttatctcagaattgttaacgtgaatatatctggatggggggttttgtaaataatgaagttgtaataaaaataaaatgaccaaaagcaccttt

SEQ ID NO: 255213 - DNA, 560 bp, Artificial Sequence
  derived and/or modified sequence
agatttctaagtggggctcaggaattataatagatgtccacagctgcatggtcttctctctccacaacacgcagacactattagaagtaaaagccacgtgtcctcaagagggcaaggcaaagcatcttcagatgtctctgcccttaaagcacacgcgttctgctctgcgacgaagcaggacaaggaggacagggacctgcacctccggaggcccgcacctacgaagatagcgggctcgggaccttcggtggaccggcagggttccagaggcccgcgcgccgccgccccgccctcattgctgagcctgccagattaggtgacggagctaagacttcgagaccatctcgtcctttttgtatcgcggaaacctgaggaacgagccggcggcggtgacctgcacgagaagccaggctaactgggtgaagtaccatgcaagcatttcttaaaggtacatccatcagtactaaacccccgctgaccaaggatcgaggagtagctgccagtgcgggaagtagcggagagaacaagaaagccaaacccgttccctgggtggaaaaata

SEQ ID NO: 255214 - DNA, 701 bp, Artificial Sequence
  derived and/or modified sequence
gccgttccgtggcgggaactgaggcgactgtggggacatcagtgatcggtgaagtaccatgcaagcatttcttaaaggtacatccatcagtactaaacccccgctgaccaaggatcgaggagtagctgccagtgcgggaagtagcggagagaacaagaaagccaaacccgttccctgggtggaaaaatatcgcccaaaatgtgtggatgaagttgctttccaggaagaagtggttgcagtgctgaaaaaatctttagaaggagcagatcttcctaatctcttgttttacggaccacctggaactggaaaaacatccactattttggcagcagctagagaactctttgggcctgaacttttccgattaagagttcttgagttaaatgcatctgatgaacgtggaatacaagtagttcgagagaaagtgaaaaattttgctcaattaactgtgtcaggaagtcgctcagatgggaagccgtgtccgccttttaagattgtgattctggatgaagcagattctatgacctcagctgctcaggcagctttaagacgtaccatggagaaggagtcgaaaaccacccgattctgtcttatctgtaactatgtcagtcgaataattgaacccctgacctctagatgttcaaaattccgcttcaagcctctgtcagataaaattcaacagcagcgattactagacattg

SEQ ID NO: 255215 - DNA, 485 bp, Artificial Sequence
  derived and/or modified sequence
tttgtatcgcggaaacctgaggaacgagccggcggcggtgacctgcacgagaagccaggctaactgagtcccccaccttcccttccccacagaaagtctctgaagggtgaagtaccatgcaagcatttcttaaaggtacatccatcagtactaaacccccgctgaccaaggatcgaggagtagctgccagtgcgggaagtagcggagagaacaagaaagccaaacccgttccctgggtggaaaaatatcgcccaaaatgtgtggatgaagttgctttccaggaagaagtggttgcagtgctgaaaaaatctttagaaggagcagatcttcctaatctcttgttttacggaccacctggaactggaaaaacatccactattttggcagcagctagagaactctttgggcctgaacttttccgattaagagttcttgagttaaatgcatctgatgaacgtggaatacaagtagttcgagagaaagtg

SEQ ID NO: 255216 - DNA, 785 bp, Artificial Sequence
  derived and/or modified sequence
cgcgctcacgtctgaagtgggagcaatgcaccgggacagggacacctcctaggccatgcctgttccagtccagttctgcctgaaagtccggctggctcatcacctgcctaaataaaaccgtatacgggcaaactccctccgcaagcagcgcgccccagcaccggaagtgacgcgttacgtgcccgcgtattcctaccggcgtattcccgccctgcttttcgcccgccgttccgtggcgggaactgaggcgactgtggggacatcagtgatcggtgaagtaccatgcaagcatttcttaaaggtacatccatcagtactaaacccccgctgaccaaggatcgaggagtagctgccagtgcgggaagtagcggagagaacaagaaagccaaacccgttccctgggtggaaaaatatcgcccaaaatgtgtggatgaagttgctttccaggaagaagtggttgcagtgctgaaaaaatctttagaaggagcagatcttcctaatctcttgttttacggaccacctggaactggaaaaacatccactattttggcagcagctagagaactctttgggcctgaacttttccgattaagagttcttgagttaaatgcatctgatgaacgtggaatacaagtagttcgagagaaagtgaaaaattttgctcaattaactgtgtcaggaagtcgctcagatgggaagccgtgtccgccttttaagattgtgattctggatgaagcagattctatgacctcagctgctcaggcagctttaagacgtaccatgga

SEQ ID NO: 255217 - DNA, 453 bp, Artificial Sequence
  derived and/or modified sequence
tcctttattatgtaacatctttgcacaaggctaagtttattttcgggctgtactttctcataatggttccccaccaccacccccgctttcctatggtgctgattcgcaataaaagtttcaataaaagctttttttttctgtcttgcacctgaccagggtgaagtaccatgcaagcatttcttaaaggtacatccatcagtactaaacccccgctgaccaaggatcgaggagtagctgccagtgcgggaagtagcggagagaacaagaaagccaaacccgttccctgggtggaaaaatatcgcccaaaatgtgtggatgaagttgctttccaggaagaagtggttgcagtgctgaaaaaatctttagaaggagcagatcttcctaatctcttgttttacggaccacctggaactggaaaaacatccactattttggcagcagctagagaactct

SEQ ID NO: 255218 - DNA, 1092 bp, Artificial Sequence
  derived and/or modified sequence
atgcaggccttcctgaagggcaccagcatcagcaccaagccccccctgaccaaggacagaggcgtggccgccagcgccggcagcagcggcgagaacaagaaggccaagcccgtgccctgggtggagaagtacagacccaagtgcgtggacgaggtggccttccaggaggaggtggtggccgtgctgaagaagagcctggagggcgccgacctgcccaacctgctgttctacggcccccccggcaccggcaagaccagcaccatcctggccgccgccagagagctgttcggccccgagctgttcagactgagagtgctggagctgaacgccagcgacgagagaggcatccaggtggtgagagagaaggtgaagaacttcgcccagctgaccgtgagcggcagcagaagcgacggcaagccctgcccccccttcaagatcgtgatcctggacgaggccgacagcatgaccagcgccgcccaggccgccctgagaagaaccatggagaaggagagcaagaccaccagattctgcctgatctgcaactacgtgagcagaatcatcgagcccctgaccagcagatgcagcaagttcagattcaagcccctgagcgacaagatccagcagcagagactgctggacatcgccaagaaggagaacgtgaagatcagcgacgagggcatcgcctacctggtgaaggtgagcgagggcgacctgagaaaggccatcaccttcctgcagagcgccaccagactgaccggcggcaaggagatcaccgagaaggtgatcaccgacatcgccggcgtgatccccgccgagaagatcgacggcgtgttcgccgcctgccagagcggcagcttcgacaagctggaggccgtggtgaaggacctgatcgacgagggccacgccgccacccagctggtgaaccagctgcacgacgtggtggtggagaacaacctgagcgacaagcagaagagcatcatcaccgagaagctggccgaggtggacaagtgcctggccgacggcgccgacgagcacctgcagctgatcagcctgtgcgccaccgtgatgcagcagctgagccagaactgctag

SEQ ID NO: 255219 - DNA, 132 bp, Artificial Sequence
  derived and/or modified sequence
atgcaggccttcctgaagggcaccagcatcagcaccaagccccccctgaccaaggacagaggcgtggccgccagcgccggcagcagcggcgagaacaagaaggccaagcccgtgccctgggtggagaagtag

SEQ ID NO: 255220 - DNA, 645 bp, Artificial Sequence
  derived and/or modified sequence
atgcaggccttcctgaagggcaccagcatcagcaccaagccccccctgaccaaggacagaggcgtggccgccagcgccggcagcagcggcgagaacaagaaggccaagcccgtgccctgggtggagaagtacagacccaagtgcgtggacgaggtggccttccaggaggaggtggtggccgtgctgaagaagagcctggagggcgccgacctgcccaacctgctgttctacggcccccccggcaccggcaagaccagcaccatcctggccgccgccagagagctgttcggccccgagctgttcagactgagagtgctggagctgaacgccagcgacgagagaggcatccaggtggtgagagagaaggtgaagaacttcgcccagctgaccgtgagcggcagcagaagcgacggcaagccctgcccccccttcaagatcgtgatcctggacgaggccgacagcatgaccagcgccgcccaggccgccctgagaagaaccatggagaaggagagcaagaccaccagattctgcctgatctgcaactacgtgagcagaatcatcgagcccctgaccagcagatgcagcaagttcagattcaagcccctgagcgacaagatccagcagcagagactgctggacatctag

SEQ ID NO: 255221 - DNA, 372 bp, Artificial Sequence
  derived and/or modified sequence
atgcaggccttcctgaagggcaccagcatcagcaccaagccccccctgaccaaggacagaggcgtggccgccagcgccggcagcagcggcgagaacaagaaggccaagcccgtgccctgggtggagaagtacagacccaagtgcgtggacgaggtggccttccaggaggaggtggtggccgtgctgaagaagagcctggagggcgccgacctgcccaacctgctgttctacggcccccccggcaccggcaagaccagcaccatcctggccgccgccagagagctgttcggccccgagctgttcagactgagagtgctggagctgaacgccagcgacgagagaggcatccaggtggtgagagagaaggtgtag

SEQ ID NO: 255222 - DNA, 504 bp, Artificial Sequence
  derived and/or modified sequence
atgcaggccttcctgaagggcaccagcatcagcaccaagccccccctgaccaaggacagaggcgtggccgccagcgccggcagcagcggcgagaacaagaaggccaagcccgtgccctgggtggagaagtacagacccaagtgcgtggacgaggtggccttccaggaggaggtggtggccgtgctgaagaagagcctggagggcgccgacctgcccaacctgctgttctacggcccccccggcaccggcaagaccagcaccatcctggccgccgccagagagctgttcggccccgagctgttcagactgagagtgctggagctgaacgccagcgacgagagaggcatccaggtggtgagagagaaggtgaagaacttcgcccagctgaccgtgagcggcagcagaagcgacggcaagccctgcccccccttcaagatcgtgatcctggacgaggccgacagcatgaccagcgccgcccaggccgccctgagaagaaccatgtag

SEQ ID NO: 255223 - DNA, 288 bp, Artificial Sequence
  derived and/or modified sequence
atgcaggccttcctgaagggcaccagcatcagcaccaagccccccctgaccaaggacagaggcgtggccgccagcgccggcagcagcggcgagaacaagaaggccaagcccgtgccctgggtggagaagtacagacccaagtgcgtggacgaggtggccttccaggaggaggtggtggccgtgctgaagaagagcctggagggcgccgacctgcccaacctgctgttctacggcccccccggcaccggcaagaccagcaccatcctggccgccgccagagagctgtag

SEQ ID NO: 255224 - protein, 319 aa, Artificial Sequence
  derived and/or modified sequence
MVEKYRPQTLNDLISHQDILSTIQKFINEDRLPHLLLYGPPGTGKTSTILACAKQLYKDKEFGSMVLELNASDDRGIDIIRGPILSFASTRTIFKKGFKLVILDEADAMTQDAQNALRRVIEKFTENTRFCLICNYLSKIIPALQSRCTRFRFGPLTPELMVPRLEHVVEEEKVDISEDGMKALVTLSSGDMRRALNILQSTNMAFGKVTEETVYTCTGHPLKSDIANILDWMLNQDFTTAYRNITELKTLKGLALHDILTEIHLFVHRVDFPSSVRIHLLTKMADIEYRLSVGTNEKIQLSSLIAAFQVTRDLIVAEA

SEQ ID NO: 255225 - protein, 104 aa, Artificial Sequence
  derived and/or modified sequence
MVEKYRPQTLNDLISHQDILSTIQKFINEDRLPHLLLYGPPGTGKTSTILACAKQLYKDKEFGSMVLELNASDDRGIDIIRGPILSFASTRTIFKKGFKLVILD

SEQ ID NO: 255226 - protein, 63 aa, Artificial Sequence
  derived and/or modified sequence
MVEKYRPQTLNDLISHQDILSTIQKFINEDRLPHLLLYGPPGTGKTSTILACAKQLYKDKEFG

SEQ ID NO: 255227 - DNA, 960 bp, Artificial Sequence
  derived and/or modified sequence
atggtggagaagtatcgccctcagaccctgaatgacttaatctcccaccaggatattctgagcaccatccaaaagtttattaacgaggatagattaccacaccttctgctctatgggccccctggaacagggaagaccagcactattctggcctgtgcaaagcagctgtataaggacaaggagttcgggagtatggtgctcgagttgaatgcttcagatgaccgaggcatcgacatcattcgaggtccaatcttgagttttgcttctactcggacaatctttaaaaagggctttaagttggttattttggacgaggccgacgccatgactcaggatgcgcagaatgccttgcgccgggtgatcgagaagtttactgaaaacacgcgattttgcctcatatgtaattacctgagcaaaatcattcctgccctgcaaagcagatgcaccagattcagattcggacctctgacacccgagctcatggtcccaagacttgagcacgtcgttgaggaggagaaggtggacatttctgaggacggcatgaaagccctggttacattgtcttccggagatatgcggcgtgctttgaatatacttcagtctaccaacatggcgtttggcaaggtgaccgaggaaactgtctatacctgcaccggccatcccctgaagtccgatatcgcaaacattctggattggatgctgaatcaggactttaccacggcttatcggaacattaccgaactgaagacactcaaaggcttagccctgcatgatattttgactgagatccatctgtttgtgcaccgcgtagacttccccagctccgtgcgtatccatttgttgacaaagatggcggacatagaatacaggttaagcgttggtaccaacgaaaagatccagctgagctctctgatcgccgctttccaagtgactcgagatctgatcgtcgccgaggcgtag

SEQ ID NO: 255228 - DNA, 315 bp, Artificial Sequence
  derived and/or modified sequence
atggtggagaaatataggccgcaaacccttaacgatctgatttcccaccaggacattctctccacaatccagaagttcataaatgaagaccggctgccgcatctactgctctacggccccccaggcaccggaaaaacatccacaattctcgcctgcgctaaacagctttataaagacaaggagtttggctccatggtgctggaattgaatgccagcgatgaccggggaatcgatatcatccgtgggccaatcctgagctttgcttctacgcgcacaattttcaagaagggatttaagctggtaatactggattag

SEQ ID NO: 255229 - DNA, 192 bp, Artificial Sequence
  derived and/or modified sequence
atggtcgagaaatatcggcctcagacccttaacgatctaatttcccaccaagacattcttagcactattcagaaattcattaacgaggatagactgccacatctactgctgtatggtcctccggggacaggcaagacaagtacaattctcgcgtgcgccaaacagctgtacaaagacaaggaattcggttag

SEQ ID NO: 255230 - DNA, 960 bp, Artificial Sequence
  derived and/or modified sequence
atggtggagaagtaccggccccagaccctgaatgacctgatcagccaccaggacatcctgagcaccatccagaagttcatcaatgaagatcggctgccccacctgctgctgtatggccccccaggcaccgggaagaccagcaccatcctggcctgtgccaagcagctgtacaaggacaaggagtttggctccatggtgctggagctgaatgccagtgatgaccggggcatcgacatcatccggggccccatcctgagctttgccagcaccaggaccatcttcaagaagggcttcaagctggtgatcctggatgaagcagatgccatgacccaggatgcccagaatgccctgcggcgggtgattgagaagttcacagagaacacccgcttctgcctgatctgcaactacctgagcaagatcatcccagccctgcagagccgctgcacccgcttccgcttcggccccctgaccccagagctgatggtgccccggctggagcacgtggtggaggaggagaaggtggacatcagtgaagatggcatgaaggccctggtgaccctgagcagcggggacatgagaagagccctgaacatcctgcagagcaccaacatggccttcggcaaggtgacagaggagaccgtgtacacctgcaccggccaccccctgaagagtgacatcgccaacatcctggactggatgctgaaccaggacttcaccacagcctacagaaacatcacagagctgaagaccctgaagggcctggccctgcatgacatcctgacagagatccacctgtttgtgcaccgggtggacttccccagctctgtgcgcatccacctgctgaccaagatggctgacatcgagtaccgcctgtctgtgggcaccaatgagaagatccagctgagcagcctgattgctgccttccaggtgacccgggacctgattgtggccgaggcctag

SEQ ID NO: 255231 - DNA, 315 bp, Artificial Sequence
  derived and/or modified sequence
atggtggagaagtaccggccccagaccctgaatgacctgatcagccaccaggacatcctgagcaccatccagaagttcatcaatgaagatcggctgccccacctgctgctgtatggccccccaggcaccgggaagaccagcaccatcctggcctgtgccaagcagctgtacaaggacaaggagtttggctccatggtgctggagctgaatgccagtgatgaccggggcatcgacatcatccggggccccatcctgagctttgccagcaccaggaccatcttcaagaagggcttcaagctggtgatcctggactag

SEQ ID NO: 255232 - DNA, 192 bp, Artificial Sequence
  derived and/or modified sequence
atggtggagaagtaccggccccagaccctgaatgacctgatcagccaccaggacatcctgagcaccatccagaagttcatcaatgaagatcggctgccccacctgctgctgtatggccccccaggcaccgggaagaccagcaccatcctggcctgtgccaagcagctgtacaaggacaaggagtttggatag

SEQ ID NO: 255233 - DNA, 960 bp, Artificial Sequence
  derived and/or modified sequence
atggtggagaagtaccggccccagaccctgaacgacctgatcagccatcaggatatcctatccacaatccaaaagttcattaacgaggatcgtctaccacacctgttgctgtatggcccacccggaaccgggaaaaccagtactatactcgcttgcgctaagcaattatataaggataaagagttcggcagcatggtgcttgagctgaatgcaagcgacgacagagggatcgatatcattaggggcccaatcctgtctttcgcctctacccggacgatttttaagaaaggatttaagctcgttatcctcgacgaggctgacgcgatgacccaggacgctcagaatgcgcttcggagggtgattgagaaattcacagagaacactagattttgtctgatctgtaactacttatccaaaataatccctgctctgcagagtcgctgtactcgcttccgctttggccccttgacgccagaactcatggttccaaggctggagcacgtcgttgaagaggagaaagtcgacatcagtgaggacgggatgaaagccctggtgactctgtcttctggcgatatgagaagagctctgaacatcttgcagtctacaaatatggctttcgggaaggtgaccgaggagacggtatacacttgtaccgggcatccactgaaaagcgatatcgccaacattctggactggatgctaaatcaggatttcactacggcataccgcaacattactgaactcaagaccctaaaaggactggccctgcacgatattttaacagagattcacctgttcgtgcatcgcgtggacttccctagctccgtgcgtatccatcttctcacaaagatggcagatatagaatatcgcctctccgttggtaccaacgaaaagattcagctatcgagtctgatcgccgcattccaggtcactcgtgacttgatcgtggcggaagcatag

SEQ ID NO: 255234 - DNA, 315 bp, Artificial Sequence
  derived and/or modified sequence
atggtggagaagtaccggccccagaccctgaacgacctgatcagccaccaggacatcttgagcaccatccagaaatttataaatgaagacagactgccccatttgttgctctatggtcccccgggtacaggcaagacgagtactattctcgcgtgtgcaaaacagctatataaggacaaggaatttggatcaatggttttagagctgaatgcttcggatgacaggggaatagatatcatacgtggccctattctgagttttgcctctactcgaacgatatttaagaagggcttcaagctggttattctggattag

SEQ ID NO: 255235 - DNA, 192 bp, Artificial Sequence
  derived and/or modified sequence
atggtggagaagtaccggccccagaccctgaacgacctgatcagccatcaagacatcttgagtactatccagaaattcattaacgaagaccgactgcctcatttactgttgtatggacctccgggtacaggaaagacaagcaccatcctggcctgtgccaagcagttatacaaggataaagagttcgggtag

SEQ ID NO: 255236 - DNA, 960 bp, Artificial Sequence
  derived and/or modified sequence
atggttgagaagtataggccccagacactaaatgacttaataagccatcaagatatcctgtccaccatccagaaattcattaacgaggatcgattaccacacctgctgctttacggcccaccgggtactgggaagacatcaactatcctggcttgcgccaaacagctatacaaagacaaggagtttggctctatggtgctggagcttaacgcatccgacgatagagggatcgatatcattcgaggacctatcttaagctttgctagcacaagaacgatttttaagaagggctttaaacttgtcatactggatgaggcagacgccatgacacaggatgcccaaaacgctctgagaagagtaatcgagaagttcactgaaaacactcggttctgccttatctgtaactacctcagtaaaatcattcctgctttgcagagcagatgcacccggtttagatttgggccactcactccagaactgatggtgccaagactcgaacacgtcgtggaagaggagaaagtcgatatctctgaggatgggatgaaagcactcgtgactctttcatcaggggatatgaggagagccctgaacatcctgcagtcaactaacatggcttttgggaaagtcacagaagagactgtatacacctgcaccggacatcccttgaaaagtgatattgcaaatatccttgattggatgttaaatcaggactttactacagcttacagaaacatcaccgaactcaagaccttgaaaggactggccttgcacgacatactcactgaaattcacttgttcgtgcatcgggttgattttccttcttcggtgcgcatccaccttttgacaaagatggcagacatcgagtataggctctctgtcggtactaacgagaagatacagctgtcctcgttaatcgcagcattccaggtgacacgcgacctcattgtcgccgaagcatag

SEQ ID NO: 255237 - DNA, 315 bp, Artificial Sequence
  derived and/or modified sequence
atggtggagaaatacaggccccaaactcttaatgacctcattagccatcaggacatcctgtcaaccatccaaaagtttatcaacgaggatagattgccacatctgctgctatacggtcctcctggcaccggcaagacctcaacaatcctggcttgcgcaaaacagctgtataaagacaaggaatttggctccatggtactggaactcaacgcgtccgatgacagggggatcgatatcattcgtgggccaattctctcctttgcttcaacacgcacaatttttaaaaaaggcttcaaacttgtaatcctggattag

SEQ ID NO: 255238 - DNA, 192 bp, Artificial Sequence
  derived and/or modified sequence
atggtggaaaagtacaggccccagacattgaatgacctaatcagccatcaggacattctgagtacaatccagaaattcatcaacgaggaccggctgcctcaccttttattgtatggccctccgggtaccggtaagacctcgactatattggcttgcgcaaaacaactgtacaaggataaggagtttggttag

SEQ ID NO: 255239 - DNA, 2442 bp, Artificial Sequence
  derived and/or modified sequence
gaactgtaagtgccagggtctcagggtcaggtcgcggctggtcactgtgcaggcgcttgggtgacgcgacgatctcagcggatctggtcaccttcgtctccccgccatggagacctcagcactcaagcagcaggagcagcccgcggcgaccaagatcaggaacctgccctgagacagggtctcgctctgtcgcccatgctggagcgcagtggtgtgatcacagctcagtgtaacctcaaacattggggttcaagccattctcctgcctcagcctccgaagaactgggacttttagaggcgagctaccaagcccatcctgtaaccattttaaaatgtacaattcagtggcattaagtacattcagaatgcagtgtactgttgtggagtcttcccgctatctagttccaaaatttcatcaccccaaatggaaatcctttacccattgacagttactccccattctccccttcctctagcccctggcaaccactaatctgctttctatctatggatttgcctattctggacatttcatggttgaaaaataccggccacagaccctgaatgatctcatttctcatcaggacattctgagtaccattcagaagtttatcaatgaagaccgactgccacacttgcttctctacggtcccccagggacaggcaagacatctaccatcctagcctgtgcgaaacagctatataaagacaaagaatttggctccatggtcttggagctgaatgcttcagatgaccgaggaatagacatcattcgaggaccgatcctgagctttgctagcacaaggacaatatttaagaaaggctttaagctagtgatcttggatgaagcagacgccatgactcaggacgcccagaatgccttgagaagagtaattgagaaattcacagaaaataccagattctgcctcatctgtaactatctgtcaaagatcatccctgccttgcagtcccgctgcacgaggtttcggttcggtcccctgactcctgaactcatggttccccgcctggaacatgtcgtggaagaagagaaagttgatataagtgaagatggaatgaaagcactagtcactctttccagtggagacatgcgtagggctctgaacattttgcagagcaccaatatggcctttgggaaggtgacagaggagactgtctacacctgcaccgggcacccgctcaagtcagacattgccaacatcctggactggatgttgaatcaagatttcaccacagcctacagaaatattacagagttgaaaactctgaaggggttggcactgcatgatatcctgacagagatacacttgtttgtgcatagagttgactttccatcttcagttcgaatacatttattgaccaaaatggcagacattgagtacaggctttctgttggcaccaacgagaagatccagctgagctccctcattgctgcatttcaagtcaccagagacctgattgttgcagaggcctagatgctctgagggccattcacaattctcagggctcagcagtgatgggagaacagaggacagttccaggataaactgctgcctggggctgtgggatgaatcagtcaccccgaatcttggaaaaacccccttccaggagaggatgggcaggcatttaaaaagtaccatttttgtggttgtttggagcagggatgtacaaaataattttaatgtattaactcatactgcctgtcttttataggggaaaaaaataaccttttttattttaaagttataaggtttttaccttttagttgcttggatgacagggaattagcctaccccattttggtctggaacagaagactttcaaatttaatatggtccaagtgtcttcctactcaaggtaaacattatctccaaaattacatttatgattctaatatttggcattgtgtctgtatctaatttaaacagatgttaatggacgtctggccgaaactattatacttttataagatgagctgaatcctcttactttaaaaactggtctttttatttaccctctgtggtagaagagtcaccagcaggttccaaattgatgtgtatgataggaaaaaaaccttaattttaaatataatatagagccttaaactatgccactgggtggcagaggctgtataaaacgcacttgttttcatgcaggagcggggcaagtaaggttgagcctgactgtaaacctagaactgcggaaggactgggacttttgtacaaatttcacatttattttacagcaatcatgctgcatttgtgttagtgttctttataataaaaaacaaagcagcctcctggctggctgtgttacaagtgactcttccttagacagctagaaagatgctgactttgtcaaacttgcatttatatgaaaaccttctgtctctaatatcacagaataaactttctttagatgctg

SEQ ID NO: 255240 - DNA, 559 bp, Artificial Sequence
  derived and/or modified sequence
agagttgcttttgcgcgcgaactgtaagtgccagggtctcagggtcaggtcgcggctggtcactgtgcaggcgcttgggtgacgcgacgatctcagcggatctggtcaccttcgtctccccgccatggagacctcagcactcaagcagcaggagcagcccgcggcgaccaagatcaggaacctgccctgcccctggcaaccactaatctgctttctatctatggatttgcctattctggacatttcatggttgaaaaataccggccacagaccctgaatgatctcatttctcatcaggacattctgagtaccattcagaagtttatcaatgaagaccgactgccacacttgcttctctacggtcccccagggacaggcaagacatctaccatcctagcctgtgcgaaacagctatataaagacaaagaatttggctccatggtcttggagctgaatgcttcagatgaccgaggaatagacatcattcgaggaccgatcctgagctttgctagcacaaggacaatatttaagaaaggctttaagctagtgatcttggatg

SEQ ID NO: 255241 - DNA, 574 bp, Artificial Sequence
  derived and/or modified sequence
aagtgccagggtctcagggtcaggtcgcggctggtcactgtgcaggcgcttgggtgacgcgacgatctcagcggatctggtcaccttcgtctccccgccatggagacctcagcactcaagcagcaggagcagcccgcggcgaccaagatcaggaacctgccctgagacagggtctcgctctgtcgcccatgctggagcgcagtggtgtgatcacagctcagtgtaacctcaaacattggggttcaagccattctcctgcctcagcctccgaagaactgggacttttagaggcgagctaccaagcccatcctgtaaccattttaaaatcccctggcaaccactaatctgctttctatctatggatttgcctattctggacatttcatggttgaaaaataccggccacagaccctgaatgatctcatttctcatcaggacattctgagtaccattcagaagtttatcaatgaagaccgactgccacacttgcttctctacggtcccccagggacaggcaagacatctaccatcctagcctgtgcgaaacagctatataaagacaaagaatttggct

SEQ ID NO: 255242 - DNA, 960 bp, Artificial Sequence
  derived and/or modified sequence
atggtggagaagtacagaccccagaccctgaacgacctgatcagccaccaggacatcctgagcaccatccagaagttcatcaacgaggacagactgccccacctgctgctgtacggcccccccggcaccggcaagaccagcaccatcctggcctgcgccaagcagctgtacaaggacaaggagttcggcagcatggtgctggagctgaacgccagcgacgacagaggcatcgacatcatcagaggccccatcctgagcttcgccagcaccagaaccatcttcaagaagggcttcaagctggtgatcctggacgaggccgacgccatgacccaggacgcccagaacgccctgagaagagtgatcgagaagttcaccgagaacaccagattctgcctgatctgcaactacctgagcaagatcatccccgccctgcagagcagatgcaccagattcagattcggccccctgacccccgagctgatggtgcccagactggagcacgtggtggaggaggagaaggtggacatcagcgaggacggcatgaaggccctggtgaccctgagcagcggcgacatgagaagagccctgaacatcctgcagagcaccaacatggccttcggcaaggtgaccgaggagaccgtgtacacctgcaccggccaccccctgaagagcgacatcgccaacatcctggactggatgctgaaccaggacttcaccaccgcctacagaaacatcaccgagctgaagaccctgaagggcctggccctgcacgacatcctgaccgagatccacctgttcgtgcacagagtggacttccccagcagcgtgagaatccacctgctgaccaagatggccgacatcgagtacagactgagcgtgggcaccaacgagaagatccagctgagcagcctgatcgccgccttccaggtgaccagagacctgatcgtggccgaggcctag

SEQ ID NO: 255243 - DNA, 315 bp, Artificial Sequence
  derived and/or modified sequence
atggtggagaagtacagaccccagaccctgaacgacctgatcagccaccaggacatcctgagcaccatccagaagttcatcaacgaggacagactgccccacctgctgctgtacggcccccccggcaccggcaagaccagcaccatcctggcctgcgccaagcagctgtacaaggacaaggagttcggcagcatggtgctggagctgaacgccagcgacgacagaggcatcgacatcatcagaggccccatcctgagcttcgccagcaccagaaccatcttcaagaagggcttcaagctggtgatcctggactag

SEQ ID NO: 255244 - DNA, 192 bp, Artificial Sequence
  derived and/or modified sequence
atggtggagaagtacagaccccagaccctgaacgacctgatcagccaccaggacatcctgagcaccatccagaagttcatcaacgaggacagactgccccacctgctgctgtacggcccccccggcaccggcaagaccagcaccatcctggcctgcgccaagcagctgtacaaggacaaggagttcggctag

SEQ ID NO: 255245 - protein, 99 aa, Artificial Sequence
  derived and/or modified sequence
MDNVQPKIKHRPFCFSVKGHVKMLRLDIINSLVTTVFMLIVSVLALIPETTTLTVGGGVFALVTAVCCLADGALIYRKLLFNPSGPYQKKPVHEKKEVL

SEQ ID NO: 255246 - DNA, 300 bp, Artificial Sequence
  derived and/or modified sequence
atggataatgtgcagcctaaaatcaagcatcgcccattttgctttagcgtgaagggccacgtcaagatgttaaggctcgatatcatcaattcgctggtgaccaccgtctttatgctcatcgtctccgtactggccttgattcctgagaccaccactctgacagtgggcggaggggtgtttgccctagtaacggcagtatgctgcctagcagacggagctcttatatacaggaaactccttttcaacccctccggcccataccagaagaaaccagtccatgaaaagaaagaggtattatag

SEQ ID NO: 255247 - DNA, 300 bp, Artificial Sequence
  derived and/or modified sequence
atggataacgttcagccaaaaataaaacatcgtcctttctgtttttcagtcaagggacacgtgaaaatgctgagactggatattattaactcacttgttacaacggtttttatgctgatcgtgagtgtgctggctttaatccccgaaacgaccaccttaacagttggaggcggtgtttttgcgcttgtcacagccgtttgttgtctagctgacggggcactgatctaccgaaaattattatttaacccttcaggcccgtaccaaaagaagcctgtgcacgaaaagaaggaagtgttatag

SEQ ID NO: 255248 - DNA, 300 bp, Artificial Sequence
  derived and/or modified sequence
atggacaacgtgcagcccaagatcaagcacagacccttctgcttcagcgtgaagggccacgtgaagatgctgagactggacatcatcaacagcctggtgaccaccgtgttcatgctgatcgtgagcgtgctggccctgatccccgagaccaccaccctgaccgtgggcggcggcgtgttcgccctggtgaccgccgtgtgctgcctggccgacggcgccctgatctacagaaagctgctgttcaaccccagcggcccctaccagaagaagcccgtgcacgagaagaaggaggtgctgtag

SEQ ID NO: 255249 - DNA, 300 bp, Artificial Sequence
  derived and/or modified sequence
atggacaacgtacagcctaagattaagcaccgacctttctgtttctctgtcaagggacacgtaaaaatgctcaggctggacattatcaactctcttgttactaccgtgtttatgctgatcgtttccgtgctcgccctcatcccagagacaactaccctgactgtgggtggaggagtcttcgcactggtcacagccgtgtgctgtttggctgatggagccctgatttatcgaaaactgctatttaacccgtcaggtccataccagaaaaagccggttcacgaaaagaaagaggtcttatag

SEQ ID NO: 255250 - DNA, 508 bp, Artificial Sequence
  derived and/or modified sequence
gcaagagagcgggaagccgagctgggcgagaagtaggggagggcggtgctccgccgcggtggcggttgctatcgcttcgcagaacctactcaggcagccagctgagaagagttgagggaaagtgctgctgctgggtctgcagacgcgatggataacgtgcagccgaaaataaaacatcgccccttctgcttcagtgtgaaaggccacgtgaagatgctgcggctggatattatcaactcactggtaacaacagtattcatgctcatcgtatctgtgttggcactgataccagaaaccacaacattgacagttggtggaggggtgtttgcacttgtgacagcagtatgctgtcttgccgacggggcccttatttaccggaagcttctgttcaatcccagcggtccttaccagaaaaagcctgtgcatgaaaaaaaagaagttttgtaattttatattactttttagtttgatactaagtattaaacatatttctgtattcttccacata

SEQ ID NO: 255251 - DNA, 300 bp, Artificial Sequence
  derived and/or modified sequence
atggacaacgtgcagcccaagatcaagcaccggcccttctgcttctctgtgaagggccacgtgaagatgctgcggctggacatcatcaacagcctggtgaccaccgtcttcatgctgattgtgtctgtgctggccctgatccctgagaccaccaccctgactgtgggcggcggcgtgtttgccctggtgacagctgtgtgctgcctggctgatggagccctgatctacaggaagctgctcttcaaccccagcggcccctaccagaagaagcctgtgcatgagaagaaggaggtgctgtag

SEQ ID NO: 255252 - DNA, 300 bp, Artificial Sequence
  derived and/or modified sequence
atggacaacgtgcagcccaagatcaagcaccggcccttctgcttcagcgtcaaaggccacgtcaaaatgttgcggctggatattattaactctttggtaaccactgttttcatgctgatcgtgtcagtcttggcgctcatacccgaaacaacgaccctgacggtgggtggaggagttttcgcgctggtgacagcggtgtgctgtctggccgacggggccctgatctataggaagctgctgttcaaccctagcggcccatatcagaaaaaacccgtgcatgagaagaaagaagtactctag

SEQ ID NO: 255253 - RNA, 300 nt, Artificial Sequence
  derived and/or modified sequence
auggauaacguucagccaaaaauaaaacaucguccuuucuguuuuucagucaagggacacgugaaaaugcugagacuggauauuauuaacucacuuguuacaacgguuuuuaugcugaucgugagugugcuggcuuuaauccccgaaacgaccaccuuaacaguuggaggcgguguuuuugcgcuugucacagccguuuguugucuagcugacggggcacugaucuaccgaaaauuauuauuuaacccuucaggcccguaccaaaagaagccugugcacgaaaagaaggaaguguuauag

SEQ ID NO: 255254 - protein, 120 aa, Artificial Sequence
  derived and/or modified sequence
MDNVQPKIKHRPFCFSVKGHVKMLRLALTVTSMTFFIIAQAPEPYIVITGFEVTVILFFILLYVLRLDRLMKWLFWPLLVFALVTAVCCLADGALIYRKLLFNPSGPYQKKPVHEKKEVL

SEQ ID NO: 255255 - DNA, 363 bp, Artificial Sequence
  derived and/or modified sequence
atggacaacgtgcagcctaagataaagcaccgaccattttgtttctccgtgaagggacacgtcaaaatgctgcggcttgctctcactgtcaccagcatgacattttttattattgcacaggctcctgaaccgtacatcgtgataactggcttcgaggtaacggtgattttatttttcattctactgtacgttttgaggctagatagattgatgaagtggctcttctggcctttgcttgtctttgccctcgtgacggcagtgtgctgtctggcagatggcgctctcatctataggaaactactgttcaatccatccggaccatatcagaaaaagcccgtacacgagaagaaagaggtgctctag

SEQ ID NO: 255256 - DNA, 363 bp, Artificial Sequence
  derived and/or modified sequence
atggataacgtacagcctaagatcaaacatcgcccattttgtttttctgtgaagggccacgtgaaaatgcttaggcttgccctgacagtaacgagcatgaccttttttataatcgcccaggccccagaaccctacattgtaatcaccggcttcgaggtaactgtcatcctcttttttattttactatacgttttaagactcgatagactcatgaaatggcttttctggcctctattagtctttgcactcgttactgctgtttgctgccttgccgatggagcattgatttaccgtaaattactcttcaatccgtccggaccttaccagaaaaaaccggtccatgagaagaaggaggtcctctag

SEQ ID NO: 255257 - DNA, 363 bp, Artificial Sequence
  derived and/or modified sequence
atggataacgtacagcctaagatcaaacatcgcccattttgtttttctgtgaagggccacgtgaaaatgcttaggcttgccctgacagtaacgagcatgaccttttttataatcgcccaggccccagaaccctacattgtaatcaccggcttcgaggtaactgtcatcctcttttttattttactatacgttttaagactcgatagactcatgaaatggcttttctggcctctattagtctttgcactcgttactgctgtttgctgccttgccgatggagcattgatttaccgtaaattactgtttaacccatcaggcccataccagaagaaacccgttcatgagaagaaagaagtactctag

SEQ ID NO: 255258 - DNA, 363 bp, Artificial Sequence
  derived and/or modified sequence
atggacaacgtgcagcccaagatcaagcacagacccttctgcttcagcgtgaagggccacgtgaagatgctgagactggccctgaccgtgaccagcatgaccttcttcatcatcgcccaggcccccgagccctacatcgtgatcaccggcttcgaggtgaccgtgatcctgttcttcatcctgctgtacgtgctgagactggacagactgatgaagtggctgttctggcccctgctggtgttcgccctggtgaccgccgtgtgctgcctggccgacggcgccctgatctacagaaagctgctgttcaaccccagcggcccctaccagaagaagcccgtgcacgagaagaaggaggtgctgtag

SEQ ID NO: 255259 - DNA, 363 bp, Artificial Sequence
  derived and/or modified sequence
atggacaacgtgcagcccaagattaaacaccgtccgttttgcttttccgtcaaaggacacgttaaaatgttacgactagcccttacagtcacctcaatgactttcttcatcattgcacaggccccagagccttatattgtcattaccggattcgaggtgacggtcatcctgttcttcattctactgtacgtgcttcgccttgatagactaatgaaatggctgttctggcctctgctggtcttcgctttagttacggcagtgtgttgcctggctgatggtgcccttatatacagaaagctgctattcaatccctccggcccttatcagaagaagcctgtgcacgagaagaaggaggtgctatag

SEQ ID NO: 255260 - DNA, 571 bp, Artificial Sequence
  derived and/or modified sequence
gcaagagagcgggaagccgagctgggcgagaagtaggggagggcggtgctccgccgcggtggcggttgctatcgcttcgcagaacctactcaggcagccagctgagaagagttgagggaaagtgctgctgctgggtctgcagacgcgatggataacgtgcagccgaaaataaaacatcgccccttctgcttcagtgtgaaaggccacgtgaagatgctgcggctggcactaactgtgacatctatgaccttttttatcatcgcacaagcccctgaaccatatattgttatcactggatttgaagtcaccgttatcttatttttcatacttttatatgtactcagacttgatcgattaatgaagtggttattttggcctttgcttgtgtttgcacttgtgacagcagtatgctgtcttgccgacggggcccttatttaccggaagcttctgttcaatcccagcggtccttaccagaaaaagcctgtgcatgaaaaaaaagaagttttgtaattttatattactttttagtttgatactaagtattaaacatatttctgtattcttccacata

SEQ ID NO: 255261 - DNA, 363 bp, Artificial Sequence
  derived and/or modified sequence
atggacaacgtgcagcccaagatcaagcaccggcccttctgcttctctgtgaagggccacgtgaagatgctgcggctggccctgactgtgacctccatgaccttcttcatcatcgcccaggcccctgagccctacatcgtcatcactggatttgaggtgaccgtcatcctcttcttcatcctgctgtatgtgctgcggctggaccggctgatgaagtggctgttctggcccctgctggtgtttgccctggtgacagctgtgtgctgcctggctgatggagccctgatctacaggaagctgctcttcaaccccagcggcccctaccagaagaagcctgtgcatgagaagaaggaggtgctgtag

SEQ ID NO: 255262 - DNA, 363 bp, Artificial Sequence
  derived and/or modified sequence
atggacaacgtgcagcccaagatcaagcaccggcccttctgcttcagcgtaaagggtcatgttaagatgctcagattggccttgacagtaacaagcatgactttttttattatagcccaggctcccgaaccatacattgtgattactggattcgaggtgaccgtgatccttttttttattctgctgtacgttttgcgtcttgatcggctgatgaaatggctgttttggcccctgctagttttcgccctcgtcacagctgtatgctgcctcgccgatggggcactgatttaccggaaactgctgttcaatcctagtgggccctatcagaagaagcccgtgcacgagaaaaaggaggtactttag

SEQ ID NO: 255263 - RNA, 363 nt, Artificial Sequence
  derived and/or modified sequence
auggauaacguacagccuaagaucaaacaucgcccauuuuguuuuucugugaagggccacgugaaaaugcuuaggcuugcccugacaguaacgagcaugaccuuuuuuauaaucgcccaggccccagaacccuacauuguaaucaccggcuucgagguaacugucauccucuuuuuuauuuuacuauacguuuuaagacucgauagacucaugaaauggcuuuucuggccucuauuagucuuugcacucguuacugcuguuugcugccuugccgauggagcauugauuuaccguaaauuacucuucaauccguccggaccuuaccagaaaaaaccgguccaugagaagaaggagguccucuag

SEQ ID NO: 255264 - RNA, 363 nt, Artificial Sequence
  derived and/or modified sequence
auggauaacguacagccuaagaucaaacaucgcccauuuuguuuuucugugaagggccacgugaaaaugcuuaggcuugcccugacaguaacgagcaugaccuuuuuuauaaucgcccaggccccagaacccuacauuguaaucaccggcuucgagguaacugucauccucuuuuuuauuuuacuauacguuuuaagacucgauagacucaugaaauggcuuuucuggccucuauuagucuuugcacucguuacugcuguuugcugccuugccgauggagcauugauuuaccguaaauuacuguuuaacccaucaggcccauaccagaagaaacccguucaugagaagaaagaaguacucuag

SEQ ID NO: 255265 - protein, 604 aa, Artificial Sequence
  derived and/or modified sequence
MENQAHNTMGTSPCEAELQELMEQIDIMVSNKKMDWERKMRALETRLDLRDQELANAQTCLDQKGQEVGLLRQKLDSLEKCNLAMTQNYEGQLQSLKAQFSKLTNNFEKLRLHQMKQNKVPRKELPHLKEEIPFELSNLNQKLEEFRAKSREWDKQEILYQTHLISLDAQQKLLSEKCNQFQKQAQSYQTQLNGKKQCLEDSSSEIPRLICDPDPNCEINERDEFIIEKLKSAVNEIALSRNKLQDENQKLLQELKMYQRQCQAMEAGLSEVKSELQSRDDLLRIIEMERLQLHRELLKIGECQNAQGNKTRLESSYLPSIKEPERKIKELFSVMQDQPNHEKELNKIRSQLQQVEEYHNSEQERMRNEISDLTEELHQKEITIATVTKKAALLEKQLKMELEIKEKMLAKQKVSDMKYKAVRTENTHLKGMMGDLDPGEYMSMDFTNREQSRHTSINKLQYENERLRNDLAKLHVNGKSTWTNQNTYEETGRYAYQSQIKVEQNEERLSHDCEPNRSTMPPLPPSTFQAKEMTSPLVSDDDVFPLSPPDMSFPASLAAQHFLLEEEKRAKELEKLLNTHIDELQRHTEFTLNKYSKLKQNRHI

SEQ ID NO: 255266 - DNA, 1815 bp, Artificial Sequence
  derived and/or modified sequence
atggagaaccaggcccacaacaccatgggcaccagcccctgcgaggccgagctgcaggagctgatggagcagatcgacatcatggtgagcaacaagaagatggactgggagagaaagatgagagccctggagaccagactggacctgagagaccaggagctggccaacgcccagacctgcctggaccagaagggccaggaggtgggcctgctgagacagaagctggacagcctggagaagtgcaacctggccatgacccagaactacgagggccagctgcagagcctgaaggcccagttcagcaagctgaccaacaacttcgagaagctgagactgcaccagatgaagcagaacaaggtgcccagaaaggagctgccccacctgaaggaggagatccccttcgagctgagcaacctgaaccagaagctggaggagttcagagccaagagcagagagtgggacaagcaggagatcctgtaccagacccacctgatcagcctggacgcccagcagaagctgctgagcgagaagtgcaaccagttccagaagcaggcccagagctaccagacccagctgaacggcaagaagcagtgcctggaggacagcagcagcgagatccccagactgatctgcgaccccgaccccaactgcgagatcaacgagagagacgagttcatcatcgagaagctgaagagcgccgtgaacgagatcgccctgagcagaaacaagctgcaggacgagaaccagaagctgctgcaggagctgaagatgtaccagagacagtgccaggccatggaggccggcctgagcgaggtgaagagcgagctgcagagcagagacgacctgctgagaatcatcgagatggagagactgcagctgcacagagagctgctgaagatcggcgagtgccagaacgcccagggcaacaagaccagactggagagcagctacctgcccagcatcaaggagcccgagagaaagatcaaggagctgttcagcgtgatgcaggaccagcccaaccacgagaaggagctgaacaagatcagaagccagctgcagcaggtggaggagtaccacaacagcgagcaggagagaatgagaaacgagatcagcgacctgaccgaggagctgcaccagaaggagatcaccatcgccaccgtgaccaagaaggccgccctgctggagaagcagctgaagatggagctggagatcaaggagaagatgctggccaagcagaaggtgagcgacatgaagtacaaggccgtgagaaccgagaacacccacctgaagggcatgatgggcgacctggaccccggcgagtacatgagcatggacttcaccaacagagagcagagcagacacaccagcatcaacaagctgcagtacgagaacgagagactgagaaacgacctggccaagctgcacgtgaacggcaagagcacctggaccaaccagaacacctacgaggagaccggcagatacgcctaccagagccagatcaaggtggagcagaacgaggagagactgagccacgactgcgagcccaacagaagcaccatgccccccctgccccccagcaccttccaggccaaggagatgaccagccccctggtgagcgacgacgacgtgttccccctgagcccccccgacatgagcttccccgccagcctggccgcccagcacttcctgctggaggaggagaagagagccaaggagctggagaagctgctgaacacccacatcgacgagctgcagagacacaccgagttcaccctgaacaagtacagcaagctgaagcagaacagacacatctag

SEQ ID NO: 255267 - DNA, 2664 bp, Artificial Sequence
  derived and/or modified sequence
atacgcggtcctgcgccctcgcctcagacctctcgggcgagcgcggcgcagcgcagattaaaaatcaagaaatataaaccagatgtagcagtttcttgacatggagaaccaagcccataatacgatgggaacttctccttgtgaggctgagcttcaggaattaatggaacaaattgacatcatggtaagcaacaagaaaatggattgggaaagaaagatgcgggctttggagacacgattagatcttcgggatcaagaattggcaaatgcacaaacttgtttggatcagaaaggtcaagaggtagggttacttcgacagaaattggacagtctggaaaaatgtaatttagcaatgactcagaattatgaaggacaactacaaagcctaaaggctcaattttccaaactaacaaataactttgaaaaactgagattacatcagatgaaacaaaacaaagttccacgaaaagaattaccacaccttaaagaagaaataccctttgaactgagcaatttgaaccagaaattagaggaatttagagcaaagtcaagagaatgggacaagcaagagatattatatcagactcatctgatttctttagatgctcaacaaaaattattatctgagaagtgtaatcagtttcagaaacaggcacaaagttaccaaactcaactaaatggtaaaaaacagtgcttagaagacagcagctctgaaattcctcgtttgatatgtgacccagatcccaattgtgaaatcaatgaaagagatgagttcattattgaaaaactgaaatcagctgtaaatgagatagcactaagcaggaataaattacaagatgaaaatcagaagctcttgcaagaactgaaaatgtaccaaagacagtgccaggccatggaagcaggtctctcagaggtaaaaagtgagttacagtcacgtgatgatctcttgagaattatagaaatggaacgattgcaattacacagagaattattaaaaataggagagtgccaaaatgctcaaggaaataaaacaagacttgaatcatcttatttgccttctattaaagaaccagaaaggaaaataaaagagctgttttcagtgatgcaagatcaaccaaatcatgaaaaagaattgaacaagataagaagccaactccaacaggtggaagagtaccataactctgagcaggaaagaatgaggaatgaaatctctgacctaacagaagagcttcatcagaaggagatcactatagcaactgtcacaaagaaagctgcccttctggaaaaacagttaaaaatggaattagaaataaaagaaaaaatgttagcaaaacaaaaggtctcagatatgaaatataaagctgtcagaactgaaaacacacatctaaaaggaatgatgggagatttagaccccggagaatacatgagtatggacttcactaacagggaacagtcaaggcatacatctattaataaactgcaatatgagaatgaaaggctccgaaatgatcttgcaaaacttcatgtcaatggaaaatcaacctggactaatcaaaacacctatgaagaaacaggaagatatgcctatcaaagccaaataaaagtggaacaaaatgaagagagacttagtcatgactgtgagccaaacagaagtacaatgcctcccttgccaccttcgacatttcaagccaaagaaatgacaagtcctttggttagtgatgatgatgtattcccactgtctcccccagatatgtccttcccagcatctttggctgcacagcatttccttctggaagaagagaaacgagcaaaagaacttgaaaaacttctaaatacacatattgatgaactgcaaagacacacagaatttactcttaataaatactccaagctaaaacaaaatagacacatatgagcttttaaacttttttatttgcttcccccccccacccccgccaagaaaaaaagctctggcaaaatatttacaaagctgattaatgaaaccaagaaattctgttctgtttccttgagtaaataatttccgtaaggcagctagaaaatagtaagtattttgttctataaagctgttcacatttctgcattaacatgctaaattgtcctgctgtagagttactataaaataaacatgactattccaaaagagatttttttccagtctaaggaatattttggaatcaaatatgcagttttttttccccacttgaatcatgtatactgaaaacccatttcctcagcaactacacaaaataagagaaagggaagtgctatattccagatacaaatgactcaaaggcagctcagttgtactggttttgaaaactcaaggattttataaataaaaatatttaagtatttccagttatgtaaacactctaaaattctataattttttggaaaaaaaaagctatagctttattgtttttacattcacctttataatgtctgtctgtttcaacacaatgaaggtatatggaatgtgcaatttacaaacctaaaatatatgtgccaaaaattaacgcttttttgttagtactaattacttcatggacacaaacaagataaaggaaatataaagcattactgttgctacattttcctttgtaatcacttctgtttttaatacaataaaggaatgtaaaattc

SEQ ID NO: 255268 - DNA, 2730 bp, Artificial Sequence
  derived and/or modified sequence
ttgagtttcgttccagcttctcctcttagaagctattctcttctccctgaagggaggcaacactgtccgttcgcctgactggcagtgttttaaggacccatcgcgcttgacgggaaagtcagattaaaaatcaagaaatataaaccagatgtagcagtttcttgacatggagaaccaagcccataatacgatgggaacttctccttgtgaggctgagcttcaggaattaatggaacaaattgacatcatggtaagcaacaagaaaatggattgggaaagaaagatgcgggctttggagacacgattagatcttcgggatcaagaattggcaaatgcacaaacttgtttggatcagaaaggtcaagaggtagggttacttcgacagaaattggacagtctggaaaaatgtaatttagcaatgactcagaattatgaaggacaactacaaagcctaaaggctcaattttccaaactaacaaataactttgaaaaactgagattacatcagatgaaacaaaacaaagttccacgaaaagaattaccacaccttaaagaagaaataccctttgaactgagcaatttgaaccagaaattagaggaatttagagcaaagtcaagagaatgggacaagcaagagatattatatcagactcatctgatttctttagatgctcaacaaaaattattatctgagaagtgtaatcagtttcagaaacaggcacaaagttaccaaactcaactaaatggtaaaaaacagtgcttagaagacagcagctctgaaattcctcgtttgatatgtgacccagatcccaattgtgaaatcaatgaaagagatgagttcattattgaaaaactgaaatcagctgtaaatgagatagcactaagcaggaataaattacaagatgaaaatcagaagctcttgcaagaactgaaaatgtaccaaagacagtgccaggccatggaagcaggtctctcagaggtaaaaagtgagttacagtcacgtgatgatctcttgagaattatagaaatggaacgattgcaattacacagagaattattaaaaataggagagtgccaaaatgctcaaggaaataaaacaagacttgaatcatcttatttgccttctattaaagaaccagaaaggaaaataaaagagctgttttcagtgatgcaagatcaaccaaatcatgaaaaagaattgaacaagataagaagccaactccaacaggtggaagagtaccataactctgagcaggaaagaatgaggaatgaaatctctgacctaacagaagagcttcatcagaaggagatcactatagcaactgtcacaaagaaagctgcccttctggaaaaacagttaaaaatggaattagaaataaaagaaaaaatgttagcaaaacaaaaggtctcagatatgaaatataaagctgtcagaactgaaaacacacatctaaaaggaatgatgggagatttagaccccggagaatacatgagtatggacttcactaacagggaacagtcaaggcatacatctattaataaactgcaatatgagaatgaaaggctccgaaatgatcttgcaaaacttcatgtcaatggaaaatcaacctggactaatcaaaacacctatgaagaaacaggaagatatgcctatcaaagccaaataaaagtggaacaaaatgaagagagacttagtcatgactgtgagccaaacagaagtacaatgcctcccttgccaccttcgacatttcaagccaaagaaatgacaagtcctttggttagtgatgatgatgtattcccactgtctcccccagatatgtccttcccagcatctttggctgcacagcatttccttctggaagaagagaaacgagcaaaagaacttgaaaaacttctaaatacacatattgatgaactgcaaagacacacagaatttactcttaataaatactccaagctaaaacaaaatagacacatatgagcttttaaacttttttatttgcttcccccccccacccccgccaagaaaaaaagctctggcaaaatatttacaaagctgattaatgaaaccaagaaattctgttctgtttccttgagtaaataatttccgtaaggcagctagaaaatagtaagtattttgttctataaagctgttcacatttctgcattaacatgctaaattgtcctgctgtagagttactataaaataaacatgactattccaaaagagatttttttccagtctaaggaatattttggaatcaaatatgcagttttttttccccacttgaatcatgtatactgaaaacccatttcctcagcaactacacaaaataagagaaagggaagtgctatattccagatacaaatgactcaaaggcagctcagttgtactggttttgaaaactcaaggattttataaataaaaatatttaagtatttccagttatgtaaacactctaaaattctataattttttggaaaaaaaaagctatagctttattgtttttacattcacctttataatgtctgtctgtttcaacacaatgaaggtatatggaatgtgcaatttacaaacctaaaatatatgtgccaaaaattaacgcttttttgttagtactaattacttcatggacacaaacaagataaaggaaatataaagcattactgttgctacattttcctttgtaatcacttctgtttttaatacaataaaggaatgtaaaattc

SEQ ID NO: 255269 - DNA, 1815 bp, Artificial Sequence
  derived and/or modified sequence
atggagaaccaagctcacaatacgatgggtacctccccttgtgaagctgagctgcaggaactgatggaacagatcgatattatggtgtcaaacaagaaaatggactgggagaggaagatgagagccctggagacgcgactcgacctacgcgaccaggagcttgctaatgcacagacctgtctggaccagaaaggccaggaggtcggcctgctgaggcagaaactggactcactcgagaaatgtaacctcgccatgacacagaactatgagggccagctgcaaagcctgaaagcacaattttccaaactgaccaataacttcgaaaagttacgtctgcaccaaatgaagcagaataaggtgccccgaaaggagcttccgcacctcaaggaagaaataccatttgaactgagtaacctgaaccaaaagttggaagagtttcgtgccaaatcgcgtgagtgggacaaacaggagatcttgtatcagacacatctcatttccttagacgcgcagcagaaactcttgagcgaaaagtgtaatcagttccagaaacaggcgcaaagttaccaaacccagttaaacgggaaaaaacagtgcctggaggattcgtcaagcgagataccaagactgatctgtgaccccgatccaaactgcgagatcaacgagcgggatgagtttataatcgagaaattgaagtccgctgtgaatgagatcgcactttcccgaaataagctgcaagatgaaaatcagaaactgcttcaggaattgaagatgtatcaacgtcagtgtcaggccatggaggctggcctctctgaggttaagtccgaactgcaatcacgggacgatctcctgcgcattatcgaaatggagcggttacagctacaccgggaactgttgaaaataggcgagtgccaaaacgcgcagggcaacaaaactcggctggagtcctcatatcttccatcgatcaaagagcctgaacggaagattaaggaactcttttcagtgatgcaggatcagccaaatcacgagaaagagctgaataaaattcgatcccagctgcagcaggtggaagagtaccataattcggaacaggaacgcatgcgaaatgagataagcgacctcactgaagaactgcaccagaaagagatcaccattgctaccgttacaaaaaaggcggcactcctggaaaagcaactgaagatggaattggaaattaaagaaaagatgttagccaaacagaaggtcagtgacatgaagtataaggccgtgcgtactgaaaatacgcatctgaagggcatgatgggggatttagaccccggagagtatatgagtatggacttcaccaaccgggaacagtccagacataccagtatcaacaagcttcaatacgaaaacgagcgcctgaggaacgatctcgctaaattacatgtgaacggcaagagcacttggacgaatcagaacacctacgaggagacagggaggtatgcttaccagtctcagattaaggtggaacagaacgaggagcgcttgtcccacgactgcgagccgaatcggagtacaatgccgcctctgccaccatcaacgtttcaagccaaggagatgacttctcccttagtgagcgatgatgatgtgtttcctttgagtccgccggatatgtcctttccagctagcctggccgcccagcatttcttactcgaagaagagaagagggctaaggagctcgaaaagttgttgaatactcacatcgatgagctgcaacggcacaccgaattcacgctcaataaatactcaaagctgaagcagaaccgacacatatag

SEQ ID NO: 255270 - DNA, 1815 bp, Artificial Sequence
  derived and/or modified sequence
atggagaatcaggcccataataccatgggaacgagcccctgtgaggccgaattgcaggaactgatggagcaaatcgacataatggtctcaaataagaaaatggactgggagagaaaaatgcgcgctctagagactcgcttggatctccgagatcaggagctcgctaatgcacagacctgtctggatcagaaagggcaggaagtgggactactgcggcaaaaacttgacagcctcgagaagtgtaacttggccatgactcagaactacgagggacaattgcagagtctgaaggcacagttcagcaaacttacgaacaatttcgagaagctgaggcttcaccagatgaagcagaacaaggtaccccgcaaggagcttccacatctgaaggaagaaattcccttcgaattaagcaacctcaaccaaaagcttgaagagttccgtgcaaagagccgcgagtgggacaagcaggaaatcctgtatcagacgcacctgataagcctggatgcacagcagaagttgttgtctgagaaatgtaaccagttccagaagcaggctcagagctatcaaactcagctcaacggcaaaaagcaatgtctcgaagactccagcagcgagattcccagactgatttgtgatccagacccaaactgtgagataaatgagcgcgacgaattcattatcgaaaaattaaaaagcgcagtaaatgagatcgccttgtccaggaacaaattacaggacgaaaatcaaaagctgctgcaggagctcaaaatgtaccagagacaatgccaggcgatggaggccggcctttccgaagtcaagagcgagttgcagagtagggatgacctcctgagaatcatcgaaatggagaggctccagttgcatagagaacttctgaaaattggtgagtgccagaatgcccaggggaataagactcgcttggagtcctcgtacctcccttcaatcaaggagcctgagagaaagatcaaggagttgttcagtgtgatgcaggaccagcctaaccacgaaaaggagcttaataagattcggtctcagttgcagcaggtcgaggaataccacaattccgaacaggagcggatgaggaacgaaatcagtgacctgactgaagagctacaccaaaaagagataaccattgccaccgtcacaaaaaaggccgcccttctggagaagcagttaaagatggagcttgaaattaaggagaagatgctcgccaaacaaaaggttagcgacatgaaatacaaagcagtccgaactgaaaatacgcatctcaagggcatgatgggagaccttgaccctggcgaatacatgagcatggactttacaaacagggaacagtctcgccacacaagcattaataagctccagtatgagaacgagagactgcgcaatgaccttgccaagctgcatgtgaacggcaaatccacttggactaatcaaaacacgtacgaagaaactggccgctacgcatatcagtcacagatcaaagtagagcagaatgaagagcgcctgagccatgattgtgagccaaacaggtccactatgcctccgctgccacctagcacctttcaggcaaaggaaatgacctcacccctcgtttccgacgacgatgtcttcccattgagtcctccagacatgagcttccctgcctctctcgctgcccagcacttcctcctggaggaggagaagcgggccaaagagcttgaaaagcttctcaatacccacatagacgagctgcaacgacacaccgaattcaccttgaataagtacagcaaactgaagcaaaatagacacatctag

SEQ ID NO: 255271 - DNA, 1815 bp, Artificial Sequence
  derived and/or modified sequence
atggagaaccaggcccacaacaccatgggcaccagcccctgtgaggccgagctgcaggagctgatggagcagattgacatcatggtgagcaacaagaagatggactgggagaggaagatgagggccctggagacccggctggacctgcgggaccaggagctggccaatgcccagacctgcctggaccagaagggccaggaggtgggcctgctgcggcagaagctggacagcctggagaagtgcaacctggccatgacccagaactatgagggccagctgcagagcctgaaggcccagttcagcaagctgaccaacaactttgagaagctgcggctgcaccagatgaagcagaacaaggtgcccaggaaggagctgccccacctgaaggaggagatcccctttgagctgagcaacctgaaccagaagctggaggagttccgggccaagagccgggagtgggacaagcaggagatcctgtaccagacccacctgatcagcctggatgcccagcagaagctgctgtctgagaagtgcaaccagttccagaagcaggcccagagctaccagacccagctgaatggcaagaagcagtgcctggaggacagcagcagcgagatccccaggctcatctgtgaccctgaccccaactgtgagatcaatgaaagagatgagttcatcatcgagaagctgaagtctgctgtgaatgaaattgccctgagcaggaacaagctgcaggatgagaaccagaagctgctgcaggagctgaagatgtaccagaggcagtgccaggccatggaggccggcctgtctgaggtgaagtctgagctgcagagcagagatgacctgctgcgcatcatcgagatggagcggctgcagctgcaccgggagctgctgaagatcggggagtgccagaatgcccagggcaacaagacccggctggagagcagctacctgcccagcatcaaggagcctgagaggaagatcaaggagctgttctctgtgatgcaggaccagcccaaccacgagaaggagctgaacaagatccgcagccagctgcagcaggtggaggagtaccacaacagcgagcaggagaggatgagaaatgagatcagtgacctgacagaggagctgcaccagaaggagatcaccatcgccaccgtgaccaagaaggccgccctgctggagaagcagctgaagatggagctggagatcaaggagaagatgctggccaagcagaaggtgtctgacatgaagtacaaggctgtgaggacagagaacacccacctgaagggcatgatgggagacctggaccccggggagtacatgtccatggacttcaccaaccgggagcagagccgccacaccagcatcaacaagctgcagtatgaaaatgaaaggctgagaaatgacctggccaagctgcacgtgaatggcaagagcacctggaccaaccagaacacctatgaggagaccggccgctatgcctaccagagccagatcaaggtggagcagaatgaggagcggctgagccatgactgtgagcccaacagaagcaccatgccacccctgccccccagcaccttccaggccaaggagatgaccagccccctggtgtctgatgatgatgtgttccccctgagccccccagacatgtccttccctgccagcctggccgcccagcacttcctgctggaggaggagaagagggccaaggagctggagaagctgctgaacacccacattgatgagctgcagaggcacacagagttcaccctgaacaagtacagcaagctgaagcagaacagacacatctag

SEQ ID NO: 255272 - DNA, 1815 bp, Artificial Sequence
  derived and/or modified sequence
atggagaaccaggcccacaacaccatgggcaccagcccctgcgaggctgaactgcaagagcttatggagcagattgatattatggtcagcaataaaaagatggattgggagcgaaaaatgcgcgctttggaaactagactggatctcagagaccaagaattggccaacgcccagacctgcctcgaccagaagggccaagaagttggactcttgcgccagaagctcgattccttggaaaaatgcaaccttgctatgactcagaattatgaaggacaattacagtcactgaaggcccaattctctaaacttaccaacaacttcgaaaaactcagacttcatcagatgaagcaaaataaagtgcctcgcaaggaacttccacacctcaaggaggagattccttttgaactgtccaatctgaatcagaaactcgaagaatttcgcgctaagagtcgtgagtgggataagcaggagattctgtaccaaacccatctaatttctctggacgcgcagcagaaactacttagcgagaagtgcaaccaattccagaaacaggctcaatcataccagacgcagctgaacggtaaaaaacagtgcctggaggattccagctccgaaatccctcgtttaatctgcgatcccgatcccaactgcgaaattaacgaacgtgacgaatttatcatcgagaagttgaaatcagccgtgaatgaaattgccctgagccgaaacaagctgcaggatgagaaccaaaagctcctccaggagttaaagatgtaccaacggcagtgccaggccatggaggccggtctgagtgaggtgaaatctgagctgcagtcaagggacgatttacttcgcataattgaaatggagcgacttcagcttcaccgggagctgctcaagatcggggagtgtcagaatgcacagggcaacaagaccagactggagagcagctacctgccctccataaaggagcccgaacggaaaattaaggagttattttcagtaatgcaggatcagcccaaccacgaaaaagaactgaacaagattcgcagtcagctccagcaagtagaagaataccacaactcagagcaagaaagaatgaggaatgagatctctgatttaacagaggaactacaccagaaggagatcactatcgccaccgtaacgaagaaggccgctctgctggagaagcaactcaagatggaactggaaatcaaggaaaagatgcttgccaagcagaaggtgtcagacatgaagtataaagcagtcagaactgagaatacacatctcaagggaatgatgggcgaccttgatccaggagagtatatgagtatggattttaccaatcgcgagcagtctagacacacatctatcaataaactgcagtacgaaaatgagaggttacggaatgacttagccaagctgcatgtgaatggtaagagtacttggaccaaccagaatacatacgaggagaccggtcgctacgcctaccagtcccagatcaaggtggagcagaatgaggaaaggctgtcacacgactgcgagccgaataggagcaccatgccccccctcccaccatctacttttcaagcgaaagagatgaccagcccactagtttctgacgatgatgtgtttcctctctccccgccagacatgtcctttcccgcatctctcgcggcacagcattttctcctcgaggaagaaaaaagagctaaagaactcgaaaagttgctgaacacacacatcgatgagctccagagacatacagagttcacgctgaacaagtactccaaactgaaacagaataggcacatctag

SEQ ID NO: 255273 - DNA, 1815 bp, Artificial Sequence
  derived and/or modified sequence
atggagaaccaggcccacaacaccatgggcaccagcccctgcgaggcggagttacaggaactcatggaacagatcgacattatggtcagcaacaagaagatggactgggagagaaagatgcgggccctggaaacccgtctggatctcagagaccaggaactggccaatgcacagacatgtctggatcagaaaggccaggaagtgggcttactccggcagaagctagattccctcgagaaatgcaatctggctatgactcagaattacgagggtcaactccagagcttaaaagcccagtttagtaagttgacaaataacttcgagaaactgagattgcaccagatgaaacagaacaaggtcccacgaaaagaactgccccacttgaaggaggagatcccattcgaactctcgaacctgaaccagaagcttgaagaattcagagcaaagtcgcgggagtgggataagcaggagatactatatcagacacacctgatctctttagatgcccaacagaagctgctctctgagaagtgtaaccagttccaaaaacaggcacagtcataccagacgcagctgaatggaaaaaagcaatgcctggaggacagttcgtccgagatcccaaggctgatttgcgatcccgacccaaactgtgagattaacgagagggatgagtttatcatagagaagttaaagagtgcagttaacgagatcgctctgagtcggaataaactgcaggatgaaaatcagaagctgttgcaggagttgaaaatgtatcagcgccagtgccaagccatggaagctggtctatccgaagtcaagtccgagctgcagagtagggacgacctgctgcgtatcatcgagatggaacgtcttcaactccaccgggagctgttaaagatcggcgaatgtcagaacgctcagggtaacaagacacggctcgaatcgtcctatctccccagtatcaaagaacctgagaggaaaataaaagaactcttcagcgttatgcaagaccaaccaaatcatgagaaagagcttaataaaataaggtcacagctgcaacaggtggaggagtaccataattccgagcaggaaaggatgcgtaacgaaatcagcgacttgaccgaagaactccaccaaaaagagatcacaatagcgacagtgactaagaaagcagctctgctcgaaaaacagctgaaaatggaactggaaattaaggaaaaaatgctggccaaacagaaggtttctgacatgaaatacaaggctgtaagaaccgagaatacccacttgaaaggtatgatgggagaccttgacccgggcgaatatatgtctatggatttcacgaaccgagaacagtccagacatacaagtataaataagcttcagtacgagaatgaacgcctgaggaatgacctagccaaactccatgtgaatggaaagtctacctggaccaatcagaacacctatgaggaaaccggacgctacgcatatcagagccagattaaggtcgaacagaacgaagaacgtttatcacacgattgcgaacccaaccggagtaccatgcccccacttccaccatccactttccaggccaaagaaatgacctccccacttgtcagtgacgatgacgtctttccgttaagtcctcctgacatgagctttcccgcatctctggccgcccagcactttctcctggaagaggagaagagggcaaaagagcttgagaagctgctcaacactcatatcgatgaactccaacgccatacagaattcactctgaacaagtacagcaaattgaaacagaatcggcacatttag

SEQ ID NO: 255274 - DNA, 1815 bp, Artificial Sequence
  derived and/or modified sequence
atggaaaaccaggcccataatactatgggaacatctccttgcgaagctgagcttcaggagctaatggaacagattgatattatggtgagtaataaaaaaatggactgggaacggaaaatgagggccctagaaaccaggctggatctcagggaccaagaactcgcgaatgctcagacttgtttggaccagaaggggcaggaggtgggccttctgaggcaaaaactggactcattggagaaatgcaacctcgccatgacccagaattatgagggccagttgcaatctttgaaggcgcagttctcaaaactgaccaataacttcgaaaaactccggctacatcagatgaagcagaacaaggtccccagaaaagaactgccacacctgaaggaggaaatccctttcgaacttagcaaccttaatcaaaaacttgaggagtttagggcgaagtcacgggaatgggacaagcaggaaatcctataccaaacccatctaataagcctggatgcccagcaaaaactgctgtccgagaagtgtaaccagtttcagaaacaagcccagtcttaccaaacgcaactgaatggaaaaaaacaatgtctggaggacagctcttccgagatacctcgactcatatgcgatcccgacccaaattgtgagattaatgagagagatgagtttattatcgaaaaattaaaaagcgccgtgaatgagatagcattgagcagaaacaagctgcaagatgaaaatcaaaaactcctgcaggaacttaaaatgtatcagcgccagtgtcaggctatggaagctggactcagcgaagtcaagtccgagctccaatccagggatgacctccttcgtattatcgaaatggaaagactccagctgcaccgggaactgttgaaaatcggggaatgccagaacgcacagggtaataagaccagactggagagttcttacttacctagcatcaaagaacccgagcgcaaaattaaggagctgttcagtgtgatgcaggaccagccaaatcatgagaaggagctgaataaaattagatctcagctgcagcaggtggaggagtatcataacagtgagcaggaacgcatgaggaatgaaatatccgaccttaccgaagaactacaccagaaagaaatcaccatcgccaccgtgacaaagaaggcggctctcttagagaagcagttgaaaatggagctggagataaaggagaagatgcttgccaaacaaaaggtgtccgatatgaaatacaaggccgtgaggaccgagaatacgcacctgaagggaatgatgggcgacctcgatcctggtgaatatatgtccatggattttaccaatagggagcagtctcggcacacaagcattaacaaattgcagtatgaaaatgagaggctcagaaatgatcttgcgaagttacatgtgaacggtaaatctacatggacaaaccagaacacttatgaagagaccggcagatatgcgtatcagagtcaaatcaaagtggaacagaacgaggagagactgagtcacgattgcgagccaaatcggagcactatgcccccattacctccttcaaccttccaggcgaaggaaatgacttcccctctagtctctgatgatgatgtgttccctctgtcacctcctgacatgtcgtttcctgcgtcattagccgctcaacacttcctgctcgaagaagagaaacgtgctaaagaattggaaaagttgctgaacacgcacattgacgagctgcaaagacacaccgagttcaccttgaataagtattctaaacttaaacagaaccgccacatctag

SEQ ID NO: 255275 - DNA, 1815 bp, Artificial Sequence
  derived and/or modified sequence
atggagaaccaggcccacaataccatgggtacgtctccttgcgaagccgaacttcaggagctcatggaacagatcgatatcatggtctctaataagaaaatggactgggagaggaagatgcgggctctggaaacccgactggatttgcgggatcaggagttggccaacgcccagacatgtttagaccaaaagggtcaggaggtgggcctactccggcagaagctggacagcctggaaaagtgcaatctggccatgactcagaattacgaggggcagctccagtcccttaaggctcagttcagcaagctaactaataatttcgaaaagcttcggctgcatcagatgaagcagaacaaagtccctcgcaaggagcttcctcatttgaaagaggagataccattcgagttatccaacctgaatcagaaactagaagagttcagagctaaatccagggagtgggacaagcaagaaatcctgtatcaaacacatctcatcagcctggacgctcaacagaagttgctgtctgagaagtgtaaccagttccagaaacaggctcagagctatcagacacagctaaacggaaagaagcagtgcctggaagactctagcagtgagattcccagacttatttgtgatccagatcctaactgcgaaatcaatgagcgggatgaattcatcatcgaaaaattgaagagcgcagtgaacgagatagccttgtctcgtaataagttacaggacgagaaccagaagcttctgcaggagcttaagatgtaccagcggcagtgtcaagccatggaggcagggctttccgaagttaagtccgagctgcagtcccgagacgatctcctgcgaatcatcgagatggagcggttgcagctccacagggaactcctcaaaattggcgagtgtcagaacgcgcaaggtaataagacccgcctcgagagtagctatcttccctccattaaggaacctgaaaggaagattaaggaactgtttagcgtcatgcaagatcagccgaatcatgaaaaggagctaaataaaataagaagccagctccagcaggtggaagagtaccataattccgagcaggaaaggatgcgaaacgaaatttccgatttgacagaggaattgcatcagaaggagattacaattgctaccgtgaccaaaaaggccgctttgcttgagaagcagctgaaaatggagctagaaattaaggaaaagatgcttgccaagcagaaagtatccgatatgaaatacaaagccgtgaggaccgagaatacacatctaaagggcatgatgggggacctggaccctggggaatatatgtctatggatttcacaaaccgcgagcaatctcggcacacctctatcaataaactacagtatgagaacgaaagactccgcaatgatctggctaaactacacgttaacggtaaaagcacttggacgaaccaaaatacctatgaagagacaggcaggtacgcctatcagtctcagatcaaagtggaacagaacgaggagagactcagccatgattgtgagcctaacaggagcaccatgccccctctcccaccttccacattccaagcaaaagagatgacttcaccattggtcagcgacgacgacgtattccccctaagtccacccgacatgtcattcccagcgagcctggccgctcaacactttcttctggaagaggagaaaagagcaaaggagttggagaagctattgaacacgcatatcgacgaactgcagcgtcacacagagttcaccctgaataagtactctaagcttaaacaaaacagacacatctag

SEQ ID NO: 255276 - protein, 1349 aa, Artificial Sequence
  derived and/or modified sequence
MACYLVISSRHLSNGHYRGIKGVFRGPLCKNGSPSPDFAEKKSTAKALEDVKANFYCELCDKQYHKHQEFDNHINSYDHAHKQRLKELKQREFARNVASKSWKDEKKQEKALKRLHQLAELRQQSECVSGNGPAYKAPRVAIEKQLQQGIFPIKNGRKVSCMKSALLLKGKNLPRIISDKQRSTMPNRHQLQSDRRCLFGNQVLQTSSDLSNANHRTGVSFTFSKKVHLKLESSASVFSENTEETHDCNKSPIYKTKQTADKCKCCRFANKDTHLTKEKEVNISPSHLESVLHNTISINSKILQDKHDSIDETLEDSIGIHASFSKSNIHLSDVDFTPTSREKETRNTLKNTLENCVNHPCQANASFSPPNIYNHSDARISECLDEFSSLEPSEQKSTVHLNPNSRIENREKSLDKTERVSKNVQRLVKEACTHNVASKPLPFLHVQSKDGHTTLQWPTELLLFTKTEPCISYGCNPLYFDFKLSRNTKEDHNLEDLKTELGKKPLELKTKRESQVSGLTEDQQKLIQEDYQYPKPKTMIANPDWEKFQRKYNLDYSDSEPNKSEYTFSANDLEMKNPKVPLYLNTSLKDCAGKNNSSENKLKEASRAHWQGCRKAVLNDIDEDLSFPSYISRFKKHKLIPCSPHLEFEDERQFNCKSSPCTVGGHSDHGKDFSVILKSNHISMTSKVSGCGNQRYKRYSPQSCLSRYSSSLDTSPSSMSSLRSTCSSHRFNGNSRGNLLCFHKREHHSVERHKRKCLKHNCFYLSDDITKSSQMQSEPQKERNCKLWESFKNEKYSKRRYCHCRERQKLGKNQQQFSGLKSTRIIYCDSNSQISCTGSSKKPPNCQGTQHDRLDSYSIEKMYYLNKSKRNQESLGSPHICDLGKVRPMKCNSGNISCLLKNCSSGPSETTESNTAEGERTPLTAKILLERVQAKKCQEQSSNVEISSNSCKSELEAPSQVPCTIQLAPSGCNRQALPLSEKIQYASESRNDQDSAIPRTTEKDKSKSSHTNNFTILADTDCDNHLSKGIIHLVTESQSLNIKRDATTKEQSKPLISEIQPFIQSCDPVPNEFPGAFPSNKYTGVTDSTETQEDQINLDLQDVSMHINHVEGNINSYYDRTMQKPDKVEDGLEMCHKSISPPLIQQPITFSPDEIDKYKILQLQAQQHMQKQLLSKHLRVLPAAGPTAFSPASTVQTVPVHQHTSITTIHHTFLQHFAVSASLSSHSSHLPIAHLHPLSQAHFSPISFSTLTPTIIPAHPTFLAGHPLHLVAATPFHPSHITLQPLPPTAFIPTLFGPHLNPATTSIIHLNPLIQPVFQGQDFCHHSCSSQMQQLNEVKEALNVSTHLN

SEQ ID NO: 255277 - DNA, 4050 bp, Artificial Sequence
  derived and/or modified sequence
atggcctgctacctggtgatcagcagcagacacctgagcaacggccactacagaggcatcaagggcgtgttcagaggccccctgtgcaagaacggcagccccagccccgacttcgccgagaagaagagcaccgccaaggccctggaggacgtgaaggccaacttctactgcgagctgtgcgacaagcagtaccacaagcaccaggagttcgacaaccacatcaacagctacgaccacgcccacaagcagagactgaaggagctgaagcagagagagttcgccagaaacgtggccagcaagagctggaaggacgagaagaagcaggagaaggccctgaagagactgcaccagctggccgagctgagacagcagagcgagtgcgtgagcggcaacggccccgcctacaaggcccccagagtggccatcgagaagcagctgcagcagggcatcttccccatcaagaacggcagaaaggtgagctgcatgaagagcgccctgctgctgaagggcaagaacctgcccagaatcatcagcgacaagcagagaagcaccatgcccaacagacaccagctgcagagcgacagaagatgcctgttcggcaaccaggtgctgcagaccagcagcgacctgagcaacgccaaccacagaaccggcgtgagcttcaccttcagcaagaaggtgcacctgaagctggagagcagcgccagcgtgttcagcgagaacaccgaggagacccacgactgcaacaagagccccatctacaagaccaagcagaccgccgacaagtgcaagtgctgcagattcgccaacaaggacacccacctgaccaaggagaaggaggtgaacatcagccccagccacctggagagcgtgctgcacaacaccatcagcatcaacagcaagatcctgcaggacaagcacgacagcatcgacgagaccctggaggacagcatcggcatccacgccagcttcagcaagagcaacatccacctgagcgacgtggacttcacccccaccagcagagagaaggagaccagaaacaccctgaagaacaccctggagaactgcgtgaaccacccctgccaggccaacgccagcttcagcccccccaacatctacaaccacagcgacgccagaatcagcgagtgcctggacgagttcagcagcctggagcccagcgagcagaagagcaccgtgcacctgaaccccaacagcagaatcgagaacagagagaagagcctggacaagaccgagagagtgagcaagaacgtgcagagactggtgaaggaggcctgcacccacaacgtggccagcaagcccctgcccttcctgcacgtgcagagcaaggacggccacaccaccctgcagtggcccaccgagctgctgctgttcaccaagaccgagccctgcatcagctacggctgcaaccccctgtacttcgacttcaagctgagcagaaacaccaaggaggaccacaacctggaggacctgaagaccgagctgggcaagaagcccctggagctgaagaccaagagagagagccaggtgagcggcctgaccgaggaccagcagaagctgatccaggaggactaccagtaccccaagcccaagaccatgatcgccaaccccgactgggagaagttccagagaaagtacaacctggactacagcgacagcgagcccaacaagagcgagtacaccttcagcgccaacgacctggagatgaagaaccccaaggtgcccctgtacctgaacaccagcctgaaggactgcgccggcaagaacaacagcagcgagaacaagctgaaggaggccagcagagcccactggcagggctgcagaaaggccgtgctgaacgacatcgacgaggacctgagcttccccagctacatcagcagattcaagaagcacaagctgatcccctgcagcccccacctggagttcgaggacgagagacagttcaactgcaagagcagcccctgcaccgtgggcggccacagcgaccacggcaaggacttcagcgtgatcctgaagagcaaccacatcagcatgaccagcaaggtgagcggctgcggcaaccagagatacaagagatacagcccccagagctgcctgagcagatacagcagcagcctggacaccagccccagcagcatgagcagcctgagaagcacctgcagcagccacagattcaacggcaacagcagaggcaacctgctgtgcttccacaagagagagcaccacagcgtggagagacacaagagaaagtgcctgaagcacaactgcttctacctgagcgacgacatcaccaagagcagccagatgcagagcgagccccagaaggagagaaactgcaagctgtgggagagcttcaagaacgagaagtacagcaagagaagatactgccactgcagagagagacagaagctgggcaagaaccagcagcagttcagcggcctgaagagcaccagaatcatctactgcgacagcaacagccagatcagctgcaccggcagcagcaagaagccccccaactgccagggcacccagcacgacagactggacagctacagcatcgagaagatgtactacctgaacaagagcaagagaaaccaggagagcctgggcagcccccacatctgcgacctgggcaaggtgagacccatgaagtgcaacagcggcaacatcagctgcctgctgaagaactgcagcagcggccccagcgagaccaccgagagcaacaccgccgagggcgagagaacccccctgaccgccaagatcctgctggagagagtgcaggccaagaagtgccaggagcagagcagcaacgtggagatcagcagcaacagctgcaagagcgagctggaggcccccagccaggtgccctgcaccatccagctggcccccagcggctgcaacagacaggccctgcccctgagcgagaagatccagtacgccagcgagagcagaaacgaccaggacagcgccatccccagaaccaccgagaaggacaagagcaagagcagccacaccaacaacttcaccatcctggccgacaccgactgcgacaaccacctgagcaagggcatcatccacctggtgaccgagagccagagcctgaacatcaagagagacgccaccaccaaggagcagagcaagcccctgatcagcgagatccagcccttcatccagagctgcgaccccgtgcccaacgagttccccggcgccttccccagcaacaagtacaccggcgtgaccgacagcaccgagacccaggaggaccagatcaacctggacctgcaggacgtgagcatgcacatcaaccacgtggagggcaacatcaacagctactacgacagaaccatgcagaagcccgacaaggtggaggacggcctggagatgtgccacaagagcatcagcccccccctgatccagcagcccatcaccttcagccccgacgagatcgacaagtacaagatcctgcagctgcaggcccagcagcacatgcagaagcagctgctgagcaagcacctgagagtgctgcccgccgccggccccaccgccttcagccccgccagcaccgtgcagaccgtgcccgtgcaccagcacaccagcatcaccaccatccaccacaccttcctgcagcacttcgccgtgagcgccagcctgagcagccacagcagccacctgcccatcgcccacctgcaccccctgagccaggcccacttcagccccatcagcttcagcaccctgacccccaccatcatccccgcccaccccaccttcctggccggccaccccctgcacctggtggccgccacccccttccaccccagccacatcaccctgcagcccctgccccccaccgccttcatccccaccctgttcggcccccacctgaaccccgccaccaccagcatcatccacctgaaccccctgatccagcccgtgttccagggccaggacttctgccaccacagctgcagcagccagatgcagcagctgaacgaggtgaaggaggccctgaacgtgagcacccacctgaactag

SEQ ID NO: 255278 - DNA, 4050 bp, Artificial Sequence
  derived and/or modified sequence
atggcatgttatctggtgatcagctcacgacatctgagtaatggccattacagaggaatcaagggagtgttccgagggccactgtgtaagaacggaagtccttccccggacttcgccgagaagaaaagtaccgctaaggcgttagaagacgtgaaagcaaacttctattgcgaactctgcgacaaacagtaccataagcaccaggaattcgataaccacattaatagctacgatcacgcgcacaagcaacgcttgaaagaattgaagcaacgtgaatttgctcgcaatgtggcatcaaagagttggaaggacgagaagaagcaggagaaagccctgaagcggcttcaccaactggcggagctgcgtcaacagtcagagtgtgtgtctggcaatggtccagcttataaggccccccgggtcgcaatcgaaaagcagctgcagcagggtatcttccctattaagaacggcaggaaagtctcctgcatgaaatccgccctgctcctcaaggggaagaatctcccacggatcattagcgataagcagcgatcaacaatgccaaatcgacaccagctccagtctgatcgccgctgcctcttcggaaatcaagtactccagacgagtagcgacttgtcaaacgctaatcatagaactggcgtcagcttcacattctctaagaaggtgcacctcaaactggagtccagcgcttccgtttttagcgagaacacagaagagactcacgactgcaacaaatcccctatatacaagacaaagcagaccgccgataagtgcaagtgttgtaggttcgctaacaaggacactcaccttaccaaagagaaggaggtgaatatctcacctagtcatctggaaagcgtgctgcacaatacaatcagtatcaattccaagatccttcaggacaagcacgatagtattgacgaaacactggaggatagtatcggaatacatgcatccttctctaagagcaatatccacctcagcgacgtggatttcacacctacctctcgtgagaaggaaacgaggaacaccttgaaaaatactctggagaactgcgttaaccacccttgtcaagccaacgcgagtttttcaccaccaaatatctataaccattctgacgctagaatatccgaatgtctcgacgagttctcatctctcgaaccttccgagcagaagagcacagtgcatctaaaccctaacagcaggatagaaaacagggaaaagtctctggacaaaactgaaagagtctccaaaaatgtgcagaggctagtaaaagaggcatgtacacacaatgtagcttccaaacctcttccatttcttcatgtccaatccaaagacggccacactaccctgcagtggcccactgagctgctcttgtttacaaagaccgagccatgcatatcatacggatgcaatccgttatactttgacttcaagcttagcaggaatactaaagaggatcacaatcttgaggatctgaagaccgagctgggaaaaaagccgcttgaactgaaaaccaaacgggaaagccaggtgagcggtctgactgaggaccagcaaaaactgatccaggaggactaccagtatccaaagcccaagaccatgattgctaatcccgattgggagaaatttcagcgcaagtacaacctagactactcagattccgaaccaaacaagagcgaatacaccttctccgcgaacgacttggagatgaagaacccaaaagtgcccctgtatcttaacacgagcctgaaggattgtgccgggaaaaataacagctccgagaacaagcttaaggaggcctctcgggcgcactggcagggatgcagaaaagccgtgttgaatgatatcgacgaagatctgtcgtttccatcatatatttctagattcaagaagcataaactcatcccgtgctcccctcacctggagtttgaagatgagcggcaatttaactgcaaatcctcaccatgcactgtgggcggtcactcagatcacggcaaggacttctccgtgatcctcaagagcaatcatatcagcatgacctccaaggtatccggatgcggtaaccagaggtataagcgctatagcccccagtcgtgtctgtcacgctactcttcctctctcgatactagcccttccagtatgtcttctctgagaagcacctgttcatctcaccgcttcaacggcaattctagaggtaacctgctgtgctttcataagcgcgaacaccacagtgttgaacggcataaacgaaaatgtctaaagcacaactgcttctatttgtccgacgatatcactaagagttcccaaatgcagtccgagcctcaaaaagagcggaattgtaagctgtgggagagtttcaagaacgagaagtactctaagcgacggtactgtcactgtcgtgagagacagaaactcggcaaaaaccaacaacagttttccggattgaagtccaccagaattatctactgtgactcaaattctcagattagctgcacgggatcctctaagaaaccaccaaactgccagggcacccagcatgatcgactggattcatatagcattgagaagatgtattatttaaataaatcaaaacggaaccaagaaagcctggggtcaccccacatctgtgacctcggaaaagtgcggccaatgaaatgtaattccggaaatatcagttgcctgctcaaaaattgctccagcggaccatctgagactacagaatcgaataccgctgaaggagagagaacaccactcaccgccaagatactgctcgagcgtgtgcaagctaaaaaatgccaagagcagagcagcaacgtcgaaatttcttctaattcctgcaaatccgagcttgaggcgccgtcccaggtgccatgcacaatccaactggcaccctctgggtgcaatcgccaggctctgcccctgtcagaaaagatccagtacgccagcgaatcccgcaacgaccaggattctgccattcctcggactactgagaaggacaaaagcaaaagctcgcataccaataactttacaatattagctgataccgactgcgacaatcatctgtctaagggaattatccatctggttaccgagagccagagcctgaatatcaaaagagatgccacaacgaaggaacaatctaaaccactaatatccgaaatacagccctttatccagtcctgtgatcctgttcctaatgaatttccgggagccttcccttcaaacaagtatactggggtgactgattcgacggagacgcaggaggaccagatcaacctcgacctgcaggatgtaagtatgcacatcaaccacgttgagggtaatattaactcatattatgaccggaccatgcagaaacctgataaggtcgaagacggcttagaaatgtgccacaagagcatctctcctcccctgatccaacagcccataacgttctcccctgatgagattgataagtacaaaatactgcagctccaggcgcaacagcatatgcagaagcagctgctgagtaagcacctgagggtgcttcctgccgccgggcctacggctttctcgccggcgagtacagtgcagactgtaccggttcatcagcataccagtatcacgaccattcatcacactttcctgcaacatttcgcagtctctgcctcgcttagctcacactcatcccacttgcctatagcacacctgcatcccctgagccaggctcattttagccccatcagtttctctaccctaacgccaacgatcatccccgcccatcctacgttcctcgcaggtcatcccctgcacctagtggccgcgacgccattccaccctagtcacatcaccctgcagccacttcctccgactgcgttcattcccactctcttcggtccacatctcaaccccgctacaacttctattattcacctgaaccccctcatccagcctgtgttccaagggcaggatttctgccatcacagctgttcctctcaaatgcagcagcttaatgaagtgaaagaggctctaaacgtgtcaacacatctaaactag

SEQ ID NO: 255279 - DNA, 4050 bp, Artificial Sequence
  derived and/or modified sequence
atggcctgctacctggtgatcagcagccgccacctgagcaatggccactaccggggcatcaagggcgtcttccggggccccctgtgcaagaatggcagccccagcccagactttgctgagaagaagagcacagccaaggccctggaggatgtgaaggccaacttctactgtgagctgtgtgacaagcagtaccacaagcaccaggagtttgacaaccacatcaacagctatgaccacgcccacaagcagaggctgaaggagctgaagcagcgggagtttgccagaaatgtggccagcaagtcctggaaggatgagaagaagcaggagaaggccctgaagaggctgcaccagctggccgagctgcggcagcagagtgaatgtgtgtctggaaatggacctgcctacaaggccccccgggtggccatcgagaagcagctgcagcagggcatcttccccatcaagaatggaaggaaggtgtcctgcatgaagagcgccctgctgctgaagggcaagaacctgccccgcatcatcagtgacaagcagaggagcaccatgcccaacagacaccagctgcagagcgaccggcgctgcctgtttggaaaccaggtgctgcagaccagcagtgacctgagcaatgccaaccacaggactggagtgtccttcaccttcagcaagaaggtgcacctgaagctggagagcagcgccagcgtcttcagcgagaacacagaggagacccatgactgcaacaagagccccatctacaagaccaagcagacagctgacaagtgcaagtgctgccgctttgccaacaaggacacccacctgaccaaggagaaggaggtgaacatcagccccagccacctggagagcgtgctgcacaacaccatcagcatcaacagcaagatcctgcaggacaagcatgacagcattgatgagaccctggaggacagcatcggcatccacgccagcttcagcaagagcaacatccacctgagtgatgtggacttcacccccaccagccgggagaaggagaccaggaacaccctgaagaacaccctggagaactgtgtgaaccacccctgccaggccaatgccagcttcagcccccccaacatctacaaccacagtgatgcccgcatcagcgagtgcctggatgagttcagcagcctggagcccagcgagcagaagagcacagtgcacctgaaccccaacagcagaattgagaaccgggagaagagcctggacaagacagagcgggtgtccaagaatgtgcagaggctggtgaaggaggcctgcacccacaacgtggccagcaagcccctgcccttcctgcacgtgcagagcaaggatggccacaccaccctgcagtggcccacagagctgctgctcttcaccaagacagagccctgcatctcctatggctgcaaccccctgtactttgacttcaagctgagcaggaacaccaaggaggaccacaacctggaggacctgaagacagagctgggcaagaagcccctggagctgaagaccaagcgggagagccaggtgtctggcctgacagaggaccagcagaagctgatccaggaggactaccagtaccccaagcccaagaccatgattgccaacccagactgggagaagttccagaggaagtacaacctggactacagcgacagcgagcccaacaagtctgagtacaccttcagcgccaatgacctggagatgaagaaccccaaggtgcccctgtacctgaacaccagcctgaaggactgtgccggcaagaacaacagcagcgagaacaagctgaaggaggccagccgggcccactggcagggctgcaggaaggctgtgctgaatgacattgatgaggacctgtccttccccagctacatcagccgcttcaagaagcacaagctgatcccctgcagcccccacctggagtttgaagatgagcggcagttcaactgcaagagcagcccctgcaccgtgggcggccacagcgaccacggcaaggacttcagcgtcatcctgaagagcaaccacatctccatgaccagcaaggtgtctggctgcggcaaccagcgctacaagcgctacagcccccagagctgcctgagccgctacagcagcagcctggacaccagccccagctccatgagcagcctgcggagcacctgcagcagccaccgcttcaacggcaacagccggggcaacctgctgtgcttccacaagcgggagcaccacagcgtggagcggcacaagaggaagtgcctgaagcacaactgcttctacctgagtgatgacatcaccaagagcagccagatgcagagcgagccccagaaggagaggaactgcaagctgtgggagagcttcaagaatgagaagtacagcaagaggcgctactgccactgccgggagcggcagaagctgggcaagaaccagcagcagttcagcggcctgaagagcacccgcatcatctactgtgacagcaacagccagatcagctgcaccggcagcagcaagaagccacccaactgccagggcacccagcacgaccggctggacagctacagcattgagaagatgtactacctgaacaagagcaagaggaaccaggagagcctgggcagcccccacatctgtgacctgggcaaggtgcggcccatgaagtgcaacagcggcaacatcagctgcctgctgaagaactgcagcagcggccccagcgagaccacagagagcaacacagctgagggggagaggacccccctgacagccaagatcctgctggagcgggtgcaggccaagaagtgccaggagcagagcagcaatgtggagatcagcagcaacagctgcaagtctgagctggaggcccccagccaggtgccctgcaccatccagctggcccccagcggctgcaaccggcaggccctgcccctgtctgagaagatccagtatgccagcgagagcagaaatgaccaggacagcgccatccccaggaccacagagaaggacaagagcaagagcagccacaccaacaacttcaccatcctggccgacacagactgtgacaaccacctgagcaagggcatcatccacctggtgacagagagccagagcctgaacatcaagagagatgccaccaccaaggagcagagcaagcccctcatcagcgagatccagcccttcatccagagctgtgaccctgtgcccaatgagttccctggggccttccccagcaacaagtacacaggagtgacagacagcacagagacccaggaggaccagatcaacctggacctgcaggatgtgtccatgcacatcaaccacgtggagggcaacatcaacagctactatgacaggaccatgcagaagccagacaaggtggaggatggcctggagatgtgccacaagagcatcagccccccactcatccagcagcccatcaccttctccccagatgaaattgacaagtacaagatcctgcagctgcaggcccagcagcacatgcagaagcagctgctgagcaagcacctgcgggtgctgcctgctgctggccccacagccttctccccagccagcacagtgcagacagtgcctgtgcaccagcacaccagcatcaccaccatccaccacaccttcctgcagcactttgctgtgtctgccagcctgagcagccacagcagccacctgcccatcgcccacctgcaccccctgagccaggcccacttcagccccatctccttcagcaccctgacccccaccatcatcccagcccaccccaccttcctggccggccaccccctgcacctggtggccgccacccccttccaccccagccacatcaccctgcagcccctgcccccaacagccttcatccccaccctgtttggcccccacctgaacccagccaccaccagcatcatccacctgaaccccctcatccagcccgtcttccagggccaggacttctgccaccacagctgcagcagccagatgcagcagctgaatgaggtgaaggaggccctgaatgtgtccacccacctgaactag

SEQ ID NO: 255280 - DNA, 4050 bp, Artificial Sequence
  derived and/or modified sequence
atggcctgctacctggtgatcagcagccggcacctgagcaacggccactacagaggcatcaagggagttttcagaggaccgctgtgtaagaatggcagtcccagccccgacttcgcagaaaagaaatcaactgcaaaggcgctggaagatgtgaaagcaaacttctattgcgagctgtgtgataaacagtatcataaacatcaggaattcgacaatcatatcaatagctatgatcacgcccacaagcagaggctgaaagaacttaagcagcgtgagttcgcccgaaacgtggcaagcaaatcctggaaggatgaaaaaaaacaggaaaaggcactgaagcggctccaccagctggcggaactgcgccaacaatcggaatgcgtctctggaaacggtccagcatacaaggctcctagagttgctattgagaagcaactgcagcaagggattttcccaatcaagaacggccgcaaagtgtcttgcatgaagagcgcgctgttattgaaaggaaaaaacctgcctagaattatcagcgataagcaacgttccactatgcccaatcgccatcaattacagtccgatcgtaggtgcctcttcggtaatcaggtgctgcaaaccagcagtgacctgagcaacgccaaccataggacaggggtttccttcaccttttctaaaaaagtacacctgaaattagagtcctccgcctctgtgttctccgaaaataccgaggagactcatgactgcaacaaaagcccaatctacaagaccaaacagaccgcagacaagtgtaagtgttgtagatttgctaataaagatacccatctcacgaaggaaaaagaggtgaacatttccccctcccatcttgagtctgtgctgcacaacaccataagcatcaacagcaagattctgcaggataaacatgattctatcgacgaaacactcgaggatagcattgggattcatgcatcattttctaaatccaatatccatctttccgatgtggattttactcctacgagccgcgaaaaagagactcgaaataccctgaaaaataccttagaaaactgtgttaaccacccctgccaggccaatgcctcctttagtccgccgaacatctacaaccactccgacgctcggatcagcgagtgcttagatgaattttcttcactcgagcccagtgagcaaaagagcaccgtgcaccttaatcccaactccagaatagaaaaccgtgaaaagtccttggataaaaccgaacgggtttccaaaaacgtccagcggctggtgaaagaggcctgcacccataacgttgccagcaaaccccttcccttccttcacgtgcaatccaaggacggccataccacccttcagtggcccaccgagctccttctcttcacaaagaccgagccatgcatctcttatggctgtaaccctttgtactttgattttaaactgtcaagaaacacaaaggaagatcataacttggaagacctgaagaccgaactggggaagaagccgctcgaactcaagaccaagcgagaatcccaggtgtccggattgactgaggaccagcaaaagcttatccaggaggactatcaatacccaaagcctaagacaatgattgcaaatccagactgggaaaagtttcagaggaagtacaatctcgattattcagactctgagccaaataagtccgaatacacattctctgctaacgatctcgagatgaaaaaccctaaagtgcctctatacttaaacactagcctgaaggactgcgccgggaagaacaatagtagtgagaataagctgaaagaagcttcaagagctcattggcaaggctgtaggaaggccgtgctgaacgacattgacgaggacctcagtttccctagttacatctcccgatttaagaaacacaaattgattccttgtagtccccatctggagtttgaagatgagaggcaattcaactgcaaatcctccccgtgcactgtgggaggacattccgaccacggtaaggattttagcgtcatcttgaaaagtaatcacatcagcatgacaagtaaggtgtctggctgtggcaaccaacggtacaaacggtactccccacagtcctgcctatcccgctatagttcctccctggatacttccccttcttccatgtcttccctgcgctcgacctgcagcagccataggttcaacggtaatagccgaggaaacttgctgtgcttccacaaacgggaacaccactctgtcgaacggcataaaaggaaatgcctgaagcacaattgtttctatttgtccgatgacatcaccaagtcaagccaaatgcagtccgagcctcagaaggagagaaattgcaaactgtgggagagcttcaaaaacgagaaatacagtaaaagaagatactgtcattgtcgcgagaggcagaagttgggaaaaaaccagcagcaatttagcgggctgaagtcaacccggataatctactgcgattctaatagccagatctcctgtacgggcagctccaaaaagccacctaactgtcaggggacccagcacgaccgattagacagttattccatcgaaaaaatgtattacttaaacaaatcaaagcggaaccaggagagcctgggatccccacacatttgtgacctcggaaaagtgagaccaatgaagtgcaacagcggaaacatctcttgtctacttaaaaactgctcttctggtccgagtgaaacaaccgaaagcaatacagctgagggagaaagaaccccattgaccgcaaagatcctgctagagcgtgtccaggctaaaaagtgtcaggaacaaagcagtaacgttgaaattagttctaattcttgcaagtccgagctcgaggccccaagccaggtcccttgcaccatccagctggcgccttctggttgcaatcggcaggctctgcctttaagcgagaagattcaatacgcctctgagagccggaacgaccaggactcagcaatcccccggactaccgagaaggataaatctaaaagctcgcacaccaataatttcaccatcctggctgacacagactgtgataaccacttatccaagggtattatccacctcgtgaccgagagtcagtctctaaatattaaacgcgatgccacgactaaggagcagagtaagccgctgataagcgagattcagccattcattcagagctgcgaccctgtgccgaacgagttcccgggagcatttccatctaataaatacaccggcgttaccgacagtacagaaacgcaggaggaccagataaatctggatctgcaggacgtttccatgcacattaaccacgtagaagggaatatcaactcatactacgacaggactatgcaaaagcctgataaggtagaggacggtctggagatgtgccataagagcatctccccgccgcttattcagcagcccataacgttcagtccggatgagatagacaagtataagattctccagctgcaagcccagcagcacatgcagaagcagctgctgtccaagcacctcagagtcttgccagcggctggcccgaccgcttttagccctgctagcaccgtgcaaaccgtgccagtccatcagcacacatcaatcaccactatacatcacaccttcttgcagcattttgccgtttccgccagcttatctagtcattcttcacatctgcccattgctcacctccatcccctgagccaggctcatttcagtccgatatctttttcgacattaactcccaccattatccccgcccaccctacctttctggccggtcaccccctccatcttgtggcggccacgccctttcacccaagccacatcacattacagcccttgccacccactgcctttattccaaccctgtttggtccccacctcaaccccgccactacttccatcatccacctcaacccattaattcaaccggtgttccaggggcaggatttttgccaccactcatgcagcagccaaatgcagcagttgaacgaggtgaaggaggctttgaatgtaagcacccacctcaactag

SEQ ID NO: 255281 - DNA, 4050 bp, Artificial Sequence
  derived and/or modified sequence
atggcgtgttaccttgtgatctcgtcccggcacctcagtaacggccattatagaggcatcaaaggcgtcttccgaggcccactctgcaagaacggaagcccctcccctgatttcgccgagaaaaagagtactgccaaggcactggaagatgtgaaggccaacttttattgtgaactctgtgataagcaatatcataagcaccaggaatttgacaaccacattaattcatatgaccacgcacacaaacagcggctgaaggagctgaagcagcgggaatttgctcgcaatgtcgcatccaagagttggaaggacgagaagaaacaggaaaaggctctcaagagactccaccaactggctgaattgaggcaacagtctgagtgtgtgagtggtaacggtccagcgtacaaggcaccacgcgtagcaatcgaaaaacagctgcagcaaggcatcttcccgattaagaacggtcgcaaggtgagctgcatgaaatccgcccttctcttgaaaggcaagaacctgccccgaatcatttcagacaaacagagatccactatgccaaatagacaccagctccagagcgaccggaggtgcttgttcggcaaccaggtgttgcagacaagctctgatctgtccaacgcgaaccaccgcactggagttagttttaccttctcaaagaaggtgcatttgaaacttgagtctagtgcatctgtcttcagcgaaaatactgaagaaacccatgactgtaacaaatcccccatttataagaccaaacagaccgctgataagtgtaagtgctgtagattcgcaaataaagacactcatctgaccaaggagaaggaagtaaacatatctcccagccatcttgagagcgttttgcataataccatctctattaactcaaagattctgcaggataaacatgattccattgacgaaactctggaggatagtatagggatccatgcgtccttctccaaatctaatatccacctcagtgatgtggacttcacgcctactagtagggaaaaggagaccagaaacaccttgaagaacactttggaaaattgcgtgaatcacccctgccaggccaacgcatcattctctccgccaaacatttataaccattctgacgccaggataagtgagtgcctggacgagttctctagtcttgagccctctgagcaaaaaagcacagttcacctgaacccaaattcacggatcgagaatagagagaaaagcctcgacaaaacagagagggtttcaaagaacgtccaacggttggttaaagaggcctgcactcacaatgtggcgtctaaaccgctgcctttcctccatgtacagtctaaagatggccatacaacactccaatggcctaccgaactgttgctttttaccaagacagagccttgcatcagttatggatgcaatcctctttactttgactttaagttatcccgaaatacgaaagaggatcacaatcttgaggatctgaagaccgaactgggaaagaagcctttggagttgaaaactaaacgggagagccaagtcagtgggttgaccgaggatcagcagaaattaatccaggaggattaccaatatcccaaaccaaaaacaatgatagccaacccagactgggaaaagtttcagagaaagtacaatctggactactcggacagcgagcccaataaatcagagtacacttttagtgcgaatgacctcgagatgaaaaatccaaaagttcctctgtacctgaacacatctctcaaggattgcgccggtaaaaataacagttccgagaacaaactgaaagaagcttcccgtgcccactggcaaggctgtaggaaggcagtcctcaatgatatcgatgaagatctatcattcccttcctacatcagccggttcaaaaaacacaagctcattccgtgttctcctcacttggagttcgaggacgaaagacagttcaactgcaagtcatctccctgtaccgtcgggggacactccgatcatggcaaagatttttctgtgatcctcaaatccaatcacatctcgatgacaagtaaggtttctggctgcgggaatcaaaggtacaagagatattctccacagtcgtgtctgagcagatacagctcttccctggacaccagcccctcttctatgtccagcctgaggtccacatgtagctcacatagattcaatggcaattctcgcggaaacttgctttgcttccataagcgtgagcaccactctgttgagcggcacaaacgcaaatgtctgaagcacaactgtttctatctgagcgacgacattaccaagtcaagtcagatgcaatcagagccgcagaaagaaagaaattgtaagttgtgggagagtttcaagaacgagaagtatagcaagagacggtactgccattgcagggagaggcagaagctgggaaagaaccagcagcagttttcaggcctgaagtcaacccgcatcatttactgcgactccaactcccagatctcatgcacaggttcttccaagaagccacctaactgccaaggcactcagcatgatcgcctggactcatattccattgagaaaatgtattatctcaacaaaagtaagcggaaccaagagtcactcgggagcccacacatttgcgacttgggaaaggtgcgtcctatgaaatgcaactccggaaacatcagctgcttgcttaagaactgttcaagtggcccttcagagacgacagagagtaataccgccgagggggaaagaacccccctcacggccaaaattctgctggaacgagtgcaggcaaaaaaatgtcaggagcagagttctaatgtagaaatctcaagtaacagttgcaagtccgaactggaggcccctagccaggttccctgcactattcagctggccccttctggatgcaataggcaggccctcccgttgtctgagaagatccagtacgccagtgagagccggaatgaccaagacagcgccatcccacggacaaccgaaaaggacaagagcaagagttctcacacaaataactttacaatcctcgcggatactgactgtgacaatcatttaagcaaaggtatcatacacctcgtcaccgagtcccagtctctcaacatcaaacgtgacgccaccaccaaagagcagtccaaacccctgatctcggaaatccagccattcattcaatcttgcgaccccgtgcctaacgagttccccggagccttcccctccaacaaatataccggtgtgactgactccaccgaaactcaggaagaccagattaacctagatctgcaggatgtctctatgcacattaatcatgtggagggtaatatcaacagctactatgatcgcactatgcagaagcctgacaaggtggaggatgggctggagatgtgccataagagtatcagtccacccctcatacagcagccaattaccttctcaccagacgagatcgataagtataagatcctccagcttcaggctcaacaacatatgcaaaaacaattgttgagcaaacacctgagggtccttccagccgctggtccaaccgccttcagtcccgctagcactgtgcagacagtgcctgtacatcaacatacttctatcactacaatccaccacaccttcctgcagcacttcgctgtctcagcttccctgtcatctcactccagccacctgcctattgctcatctgcatccactctctcaagcccactttagtcctatttcgttctctacccttactcctacaattatccccgcacatccgacatttttggccggacaccctctgcacctggtggcggcaacgccgttccacccttctcacatcacccttcagccattaccccctacggcctttatccccaccctattcggtcctcaccttaatcccgcaactacatccatcatccacctgaatcctttgattcagcctgtattccaaggccaggatttctgccatcactcgtgcagcagtcagatgcagcagctgaatgaagttaaagaggctctgaacgtcagcacgcacctgaattag

SEQ ID NO: 255282 - DNA, 4659 bp, Artificial Sequence
  derived and/or modified sequence
cccaactccctgtcctcaccccggcccgcccgtctcctcctccgccctctcccgactgcagcgggggcagcgctttggcgctcccaaggactccccgccactctccccacaaagcagcggcggtggcggcggctgctgctggatcttcacactgcagccagcagcccaggacgcccccggccggacgatgggtacccgcgcctgagcatcccccgggcaggcgccaggcgcgaaggcagggggcgggaggaaaggggcgggggaattcctgattccctggtggaccctggaagttgtccttaaataaatatatcgctggcccgcggttgagcagccacctcgtcagagcagcatgtggactggctcgccgggtcccctccgtgctctgtgctgtcgccgccgccgcctctgtcagagcagcagctgtcggcagcaggagccccgcacggggcgcggagcagggacgcgctgccaccgcctccccctgcgtcctgctggccgcgtcttctcgggaggtggtagtcgctgttgccgctgagaaacccgcccgctttccacggctggtcgcctggtgaggagttgagactctgcgcctccgcccggacccacatggcttgttacctggtcatcagttcgagacatctcagcaatgggcactaccggggcattaaaggagtcttcaggggacccctgtgcaagaacggatctccctctccggattttgcagaaaagaagtccacagcaaaggccctggaagatgtaaaggcaaacttttactgtgaattatgtgacaagcagtatcacaaacaccaggagtttgacaatcatattaattcttatgaccatgctcataagcagagactgaaagaattaaagcaacgggaatttgctcgaaatgtagcttctaagtcatggaaagatgagaaaaaacaagaaaaagcacttaaacgacttcatcagctggctgagttaaggcagcaatctgaatgtgtttctggaaatggaccagcatacaaagcccccagggtagccatagaaaagcaactccagcaaggaattttccccattaagaatggcagaaaggtatcatgcatgaagagtgctcttctccttaaaggaaaaaatctccccagaatcatatccgataaacagcggtccaccatgccaaatcgacaccaattacaatcagacaggcgttgtttgtttggaaatcaggtactgcaaacatcttcagatctcagcaatgcaaatcacagaacaggagtatcatttactttttccaaaaaagtgcacctaaaattagaatcttcagcatcagttttcagtgagaacacagaagaaacccatgattgtaacaagtcacccatttataaaacaaaacaaactgcagataagtgcaagtgctgcaggtttgcaaataaagatacacaccttaccaaggaaaaagaggtaaatatctcaccaagccatctggaaagtgttttacacaataccatctccataaactctaaaattttgcaagacaaacacgactctattgatgagacactagaagattcaattggcattcatgcttcattctctaaatctaacattcatctttcagatgtagattttactcctaccagcagagaaaaagaaactagaaatacattgaagaacactttagaaaattgtgttaatcacccatgccaagcaaatgcttccttcagcccaccaaacatttacaaccatagtgatgccaggatatctgaatgcctggatgagttttcatcactggagccaagtgaacaaaagagtacagtgcatctgaatccaaattccagaatagagaacagagaaaaatctttagataaaacagaaagagttagcaaaaatgttcaaagacttgtaaaagaagcatgtacccataatgtggcatctaaaccactaccttttctccacgttcaaagcaaggatggccacaccactcttcaatggcctacggaacttctgctctttacaaaaacagaaccctgtatctcttatggctgcaacccactgtattttgattttaagctttctcggaacacaaaggaagaccacaatctagaggacttaaaaacagaattgggtaagaagcccttggaattgaagactaaaagagagagccaagtctcaggtttaactgaagaccaacaaaaattgatccaagaagattatcaatatccgaaaccaaagacgatgatagctaatccggattgggaaaaattccagaggaaatataatttggactacagtgattctgagccaaataagagtgaatatactttcagtgcaaatgatttggaaatgaaaaatcctaaagtgcctctttacctcaacacatctctaaaggattgtgctggaaagaataatagtagtgagaacaaacttaaggaagcttcaagggcccattggcaaggctgcagaaaggcagttctaaatgatatagatgaggacctatcttttccttcctacatctctaggtttaaaaagcataaattgattccctgcagtcctcatttggaatttgaagatgaaagacaattcaactgcaagtccagtccttgtacagtagggggtcacagtgaccatgggaaagacttcagtgtaattttgaagagtaaccacatcagcatgaccagcaaggtttccggatgtggaaaccaaagatacaagagatactctccacagtcatgtttgagtagatattcttcctctttggacacatcccctagcagcatgtctagcttgagaagtacttgttcaagtcatagattcaatggtaatagcagaggtaatttgctctgcttccataaaagagaacaccactcagttgaaaggcacaaacggaaatgtctaaagcacaactgcttctacttgtctgatgatataacaaagagcagccaaatgcagtctgaaccacagaaagagaggaactgcaaattgtgggaatcatttaaaaatgaaaaatactcaaaacgtagatattgtcactgcagagaaagacaaaaactgggcaaaaatcaacaacaattttcagggctaaaatctacgagaatcatctattgtgattctaactcacagatttcctgtactggaagcagtaaaaaaccacctaattgccagggaactcagcacgacagattggactcttactcaatagagaaaatgtattacttgaataaaagcaagagaaatcaagagtctttgggcagccctcacatttgtgatctgggaaaagtcaggcccatgaagtgtaactccgggaatatcagctgccttctaaagaactgttccagtggcccttcagaaaccacagaatcaaacactgcagaaggagagaggacccctctaacagcaaaaatccttttagaaagagtacaagccaagaaatgtcaagaacaatcaagtaatgttgagatctcttcaaacagttgtaaaagtgaattagaggctccttcgcaagtcccatgcacaattcaacttgcaccatcaggctgtaacagacaagcattgcctttgtctgaaaaaatacagtatgcaagtgagagcagaaatgatcaagacagtgcaattccaaggactacggagaaagacaaaagcaaaagttcacacacaaataattttacaattttagcagacactgattgtgataaccatctttctaaaggtataattcacctagtaacagagtctcagtcactaaacataaaaagggatgcaacaacaaaagaacaatcaaaacctttaattagtgaaatccaaccttttattcaaagctgtgacccagtaccaaatgaattccctggtgcttttccgtctaataaatatactggtgtgactgattcaacagagacccaagaagaccaaataaatctagacttacaggatgtaagcatgcatataaatcatgtagagggaaatataaactcttactatgacagaactatgcagaaacctgacaaagtcgaagacggattagaaatgtgtcataaatctatctctccccctttaattcaacagcccataacattttctcctgacgaaatagataaatataagatcctacagctacaagcccagcagcatatgcagaagcaactcctatcaaagcatcttcgagttttgcctgctgcagggcctactgccttctctccggcctcaaccgtacagacagttccagttcaccagcacacttctatcaccaccatccaccacacgttcctgcagcattttgctgtttctgcttccttaagttctcatagcagtcacctccctattgctcatctacatcctctttcacaggcacatttcagtcctatttcattttcgactctgactccaaccattatccctgcacaccccactttcttagcaggtcatcccctgcatttagtagctgctacccccttccacccatctcacataacacttcagcctctgccccctacagcatttattcctacattgtttggtcctcacttaaatccagccacaacttctatcatccacttgaatcctttaatccaaccagtattccaaggtcaagatttttgccatcattcttgctctagccagatgcaacagctaaatgaagtgaaagaggccttaaatgtgtccacacacttgaactaa

SEQ ID NO: 255283 - protein, 170 aa, Artificial Sequence
  derived and/or modified sequence
MGLAGVCALRRSAGYILVGGAGGQSAAAAARRYSEGEWASGGVRSFSRAAAAMAPIKVGDAIPAVEVFEGEPGNKVNLAELFKGKKGVLFGVPGAFTPGCSKVRLLADPTGAFGKETDLLLDDSLVSIFGNRRLKRFSMVVQDGIVKALNVEPDGTGLTCSLAPNIISQL

SEQ ID NO: 255284 - DNA, 513 bp, Artificial Sequence
  derived and/or modified sequence
atgggcctggccggtgtatgcgctctacgcagaagcgccggctatatcctggtgggcggcgccggtggccagagcgcagccgctgcagctaggcgatattctgagggagagtgggcttccggcggcgttcgatctttttcccgggctgctgcagcgatggccccaatcaaggtgggagacgccatacccgccgtcgaggtcttcgaaggcgagccgggaaacaaagtaaacttagccgaattgttcaagggcaagaagggtgttctgttcggagttcctggcgcctttacaccaggatgtagcaaggtgagattactagccgacccaactggagcctttggtaaggagaccgacctgctactagatgattccctggtctctatctttggaaacagacgtctaaagcgcttctcaatggttgttcaggatggcattgtcaaggcgctgaacgtcgaacccgatggcaccggcctaacctgttcactggcccccaatatcatcagccaactctag

SEQ ID NO: 255285 - DNA, 513 bp, Artificial Sequence
  derived and/or modified sequence
atgggcctggccggcgtgtgtgccctgcggcgctctgctggctacatcctggtgggcggggccggcggccagagcgctgctgctgctgcccggcgctacagcgagggggagtgggccagcggcggcgtgcgctccttcagcagagctgctgctgccatggcccccatcaaggtgggagatgccatcccagctgtggaggtgtttgaaggagagcccggcaacaaggtgaacctggccgagctgttcaagggcaagaagggcgtgctgtttggagtgcctggggccttcaccccaggctgcagcaaggtgcggctgctggccgaccccaccggggccttcggcaaggagacagacctgctgctggatgacagcctggtgtccatctttggaaacagaaggctgaagcgcttctccatggtggtgcaggacggcatcgtgaaggccctgaatgtggagccagatggcaccggcctgacctgcagcctggcccccaacatcatcagccagctgtag

SEQ ID NO: 255286 - DNA, 513 bp, Artificial Sequence
  derived and/or modified sequence
atgggcctggccggcgtgtgcgccctgcggcggagcgccggctacatcctggtgggcggtgcggggggtcagagcgccgccgccgccgccaggaggtattctgagggcgagtgggcctccggaggtgtgcgctctttttctcgcgcagcagccgccatggcccctatcaaggtgggggatgctatcccggcggtagaagtgttcgaaggagaaccagggaacaaggtgaatctggccgagttgtttaaggggaagaaaggagtgctgtttggtgtgcctggcgctttcacccccggctgttccaaggtgagactcctggccgatcccactggtgcttttggaaaggaaaccgatcttctcttagacgattccctcgtatcaatcttcgggaacaggcgactaaagaggtttagcatggtcgtccaggacggtatcgttaaggcattaaacgtagaaccggatggcactggcctcacctgttctctcgctcctaacatcatctcccagctatag

SEQ ID NO: 255287 - DNA, 596 bp, Artificial Sequence
  derived and/or modified sequence
caggaggcggagtggaagtggccgtggggcgggtatgggactagctggcgtgtgcgccctgagacgctcagcgggctatatactcgtcggtggggccggcggtcagtctgcggcagcggcagcaagacggtacagtgaaggagagtgggcgtctggcggggtccgcagtttcagcagagccgctgcagccatggccccaatcaaggtgggagatgccatcccagcagtggaggtgtttgaaggggagccagggaacaaggtgaacctggcagagctgttcaagggcaagaagggtgtgctgtttggagttcctggggccttcacccctggatgttccaaggttcggctcctggctgatcccactggggcctttgggaaggagacagacttattactagatgattcgctggtgtccatctttgggaatcgacgtctcaagaggttctccatggtggtacaggatggcatagtgaaggccctgaatgtggaaccagatggcacaggcctcacctgcagcctggcacccaatatcatctcacagctctgaggccctgggccagattacttcctccacccctccctatctcacctgccca

SEQ ID NO: 255288 - DNA, 513 bp, Artificial Sequence
  derived and/or modified sequence
atgggactggccggagtttgcgctcttcggaggagcgcagggtacattctcgtcggcggagctgggggtcaatccgctgcagccgcagcaaggcgctactcggagggtgagtgggcgagtggaggtgtgagaagttttagccgtgccgcagcggcaatggctcctatcaaagtgggtgacgccatccccgcagttgaggtcttcgagggggaacccggaaacaaagttaacctagccgagctgtttaagggtaagaagggggtgctctttggagtccccggagccttcacccccggttgctctaaagtgcgcttactggcagatccaaccggcgcattcgggaaggagactgatcttctactggacgattccctggtatccattttcgggaataggagattgaaaagatttagtatggttgttcaggacggtattgtgaaggccctcaacgtcgagccagatgggaccggattgacatgttctttagccccaaacattataagccaactgtag

SEQ ID NO: 255289 - DNA, 513 bp, Artificial Sequence
  derived and/or modified sequence
atgggcctggccggcgtgtgcgccctgagaagaagcgccggctacatcctggtgggcggcgccggcggccagagcgccgccgccgccgccagaagatacagcgagggcgagtgggccagcggcggcgtgagaagcttcagcagagccgccgccgccatggcccccatcaaggtgggcgacgccatccccgccgtggaggtgttcgagggcgagcccggcaacaaggtgaacctggccgagctgttcaagggcaagaagggcgtgctgttcggcgtgcccggcgccttcacccccggctgcagcaaggtgagactgctggccgaccccaccggcgccttcggcaaggagaccgacctgctgctggacgacagcctggtgagcatcttcggcaacagaagactgaagagattcagcatggtggtgcaggacggcatcgtgaaggccctgaacgtggagcccgacggcaccggcctgacctgcagcctggcccccaacatcatcagccagctgtag

SEQ ID NO: 255290 - protein, 125 aa, Artificial Sequence
  derived and/or modified sequence
MGLAGVCALRRSAGYILVGGAGGQSAAAAARRYSEGEWASGGVRSFSRAAAAMAPIKVRLLADPTGAFGKETDLLLDDSLVSIFGNRRLKRFSMVVQDGIVKALNVEPDGTGLTCSLAPNIISQL

SEQ ID NO: 255291 - DNA, 378 bp, Artificial Sequence
  derived and/or modified sequence
atggggctggccggtgtgtgcgccctccgcaggtcggccggatacatactggtcggaggagccggtgggcagagtgctgccgcggcggctaggaggtactccgagggcgaatgggcttctgggggagtccgatcatttagcagagcagccgcagcaatggcccccattaaggtgcgcctcttggccgatccaacaggagcttttggcaaagaaactgacctcctgttagatgacagtttagtgagcatttttgggaacaggcggctgaaacggttttccatggtggtgcaagacggcattgtcaaggccctgaacgtagagccggatgggacaggtttaacctgttcactggcccctaacattatctcacaactctag

SEQ ID NO: 255292 - DNA, 378 bp, Artificial Sequence
  derived and/or modified sequence
atgggcctggccggcgtgtgtgccctgcggcgctctgctggctacatcctggtgggcggggccggcggccagagcgctgctgctgctgcccggcgctacagcgagggggagtgggccagcggcggcgtgcgctccttcagcagagctgctgctgccatggcccccatcaaggtgcggctgctggccgaccccactggagccttcggcaaggagacagacctgctgctggatgacagcctggtgtccatcttcggcaacagaaggctgaagcgcttctccatggtggtgcaggacggcatcgtgaaggccctgaatgtggagccagatggcaccggcctgacctgcagcctggcccccaacatcatcagccagctgtag

SEQ ID NO: 255293 - DNA, 378 bp, Artificial Sequence
  derived and/or modified sequence
atgggcctggccggcgtgtgcgccctgcggcggagcgccggctacattctcgtcgggggcgccgggggtcaatcggccgcagctgccgctaggaggtattctgaaggagaatgggcatcggggggggtcagatcatttagccgggctgcagcggccatggcccctatcaaggtccgcctcctggccgatccaacaggcgccttcggcaaagagacagatctgctcctcgatgactctctcgtctctatttttggcaaccggaggctgaaacgtttcagcatggtagtccaggacggcattgtgaaagccctgaatgtggagcctgatgggaccggtctgacgtgttccctcgcccccaacatcatatcacagctatag

SEQ ID NO: 255294 - DNA, 463 bp, Artificial Sequence
  derived and/or modified sequence
caggaggcggagtggaagtggccgtggggcgggtatgggactagctggcgtgtgcgccctgagacgctcagcgggctatatactcgtcggtggggccggcggtcagtctgcggcagcggcagcaagacggtacagtgaaggagagtgggcgtctggcggggtccgcagtttcagcagagccgctgcagccatggccccaatcaaggttcggctcctggctgatcccactggggcctttgggaaggagacagacttattactagatgattcgctggtgtccatctttgggaatcgacgtctcaagaggttctccatggtggtacaggatggcatagtgaaggccctgaatgtggaaccagatggcacaggcctcacctgcagcctggcacccaatatcatctcacagctctgaggccctgggccagattacttcctccacccctccctatctcacctgcccagc

SEQ ID NO: 255295 - DNA, 378 bp, Artificial Sequence
  derived and/or modified sequence
atgggtctggcaggcgtctgcgccctgagacgttccgctgggtacattctcgtgggtggcgcaggcggacagtctgcagccgcagcggcacgtcggtactcagagggagagtgggccagcggcggagtgagatctttctcccgagccgcagccgcaatggctccaataaaggtgcggttgctggccgacccaacgggggcttttgggaaagagacggaccttttacttgacgattccctggtgtccattttcggcaaccggagattgaagagattttcaatggtggtacaggatggaatcgtcaaagccctcaatgtcgagcctgacggaacagggttgacgtgctcactcgctccaaacatcatttcacagctctag

SEQ ID NO: 255296 - DNA, 378 bp, Artificial Sequence
  derived and/or modified sequence
atgggcctggccggcgtgtgcgccctgagaagaagcgccggctacatcctggtgggcggcgccggcggccagagcgccgccgccgccgccagaagatacagcgagggcgagtgggccagcggcggcgtgagaagcttcagcagagccgccgccgccatggcccccatcaaggtgagactgctggccgaccccaccggcgccttcggcaaggagaccgacctgctgctggacgacagcctggtgagcatcttcggcaacagaagactgaagagattcagcatggtggtgcaggacggcatcgtgaaggccctgaacgtggagcccgacggcaccggcctgacctgcagcctggcccccaacatcatcagccagctgtag

SEQ ID NO: 255297 - protein, 160 aa, Artificial Sequence
  derived and/or modified sequence
MAFLMKSMISNQVKNLGFGGGSEENKEEGGASDPAAAQGMTREEYEEYQKQMIEEKMERDAAFTQKKAERACLRVHLREKYRLPKSEMDENQIQMAGDDVDLPEDLRKMVDEDQEEEEDKDSILGQIQNLQNMDLDTIKEKAQATFTEIKQTAEQKCSVM

SEQ ID NO: 255298 - DNA, 483 bp, Artificial Sequence
  derived and/or modified sequence
atggccttcctgatgaagagcatgatcagcaaccaggtgaagaacctgggcttcggcggcggcagcgaggagaacaaggaggagggcggcgccagcgaccccgccgccgcccagggcatgaccagagaggagtacgaggagtaccagaagcagatgatcgaggagaagatggagagagacgccgccttcacccagaagaaggccgagagagcctgcctgagagtgcacctgagagagaagtacagactgcccaagagcgagatggacgagaaccagatccagatggccggcgacgacgtggacctgcccgaggacctgagaaagatggtggacgaggaccaggaggaggaggaggacaaggacagcatcctgggccagatccagaacctgcagaacatggacctggacaccatcaaggagaaggcccaggccaccttcaccgagatcaagcagaccgccgagcagaagtgcagcgtgatgtag

SEQ ID NO: 255299 - DNA, 1966 bp, Artificial Sequence
  derived and/or modified sequence
agcttacggccgacaaaccactcttctctatcagtatgcccttgaatagatgaggttgtgcaaagtcctttgctcttaaatgtattgctgtcattgagaatatttggaggttttctcttgggtttgtttggattttttttttcagcttttgtctgaattttggttttatttttctggggcagagaaaatggctttccttatgaaaagtatgataagtaaccaggtaaagaatttaggatttggtggtgggtctgaagaaaataaagaagaaggaggtgcatctgatcctgcagcagctcaagggatgactagagaggagtatgaggagtatcaaaagcaaatgattgaggagaagatggaaagagatgctgcatttacacagaaaaaggcagaaagggcatgcctcagagttcatctcagagaaaaatacaggctcccaaagagtgaaatggatgagaatcaaatccagatggctggagatgatgtggatttacctgaagatctccggaaaatggtagatgaagatcaagaagaggaagaagataaagattctattcttgggcagatacagaatctccagaacatggacttggataccataaaagaaaaagcccaggccaccttcactgaaatcaagcagacagcggagcagaagtgttccgtgatgtgaggggtgggaggggtggagggagggaaccagccatccttggaaaagaccactctcttgtgggacgtttcaagcagtacatgttttaatgtagtgaacacagttaggaaaaccacgatgatccattgacagacaataatttggttgttctaaatattcctggcagagcatttagctaacaccttgcagcgggaaccttactttccttttagttataaatgagataaactggaaaatttcagttgtaaatgatgatgcagaacacatatctgcttaaagaccttgagatgagccaggaagaaacaaaagcaaggggcatttcctctccaactttcttccttggaggccaagttctcaccctgtccaactattcgcaggacaccaggtcccttcagagagaaatgtggagagtcaaggtgtctactgggagccgggtttcccacagggagctgagtctacagactccagggcaatcaaaggtcaccacccccacccctcacctctaggatccttgaatttgtcaatgatactcatcaagtatgcttggatcctttggtccttggatgcttctcagccaagtggcggtagcacagatgtggtgaacaatgacgaattgaggcagggaatagacctcactagccctttgcaatggagatcatcgttctagtggccatgtgaagaatggaaccaagggaggcacaattagaggcagagggaaaccaggcagacggctgctctttttgagttgagcttaactctccttgtctgaacttggtgatagcaatgggaacaaagtgggtagactaacagagagcattaagaagttaaatcaatctctctctgtctcctcccaacctctctctctctttcatccccttctctccctatctctcttttttttttcttctcctgtcccttcccatcccacccctttagactaccttccagtaaatcacactgtcatttggtgccacaagctttcagggtagacactgatttttcccccctaatatctgctctctttcaaaaggaataattcaaaagacttaggacaattaccactgaaacacttcgagctatttagctaaagcccaccaaaccaaaacaaaatactgatttttttttttttttttggtgactctgttcatacagtgaataaagatctatcaaaggaaaaggaaactgagaccgaaaacttagggtctaagttgttctaaacccagggttctcaaatgtgttgtacaaaaagtttcatgtaataaaattaagcaaataaaacaaatgaatagaggtccaaaa

SEQ ID NO: 255300 - DNA, 483 bp, Artificial Sequence
  derived and/or modified sequence
atggctttcttgatgaagagtatgatttctaaccaggtgaaaaatttgggttttggaggaggctcagaggagaacaaggaggagggaggtgccagtgacccagcggcagcacagggcatgacccgggaagagtacgaggaataccaaaaacaaatgatagaagaaaagatggaacgggacgccgcatttacacagaagaaggctgagcgcgcctgtctgcgcgtccacttgagagaaaagtacaggttacccaagtccgagatggatgagaatcagatccagatggccggtgacgacgtggacctccccgaagatctgaggaaaatggttgacgaggatcaggaggaggaagaggacaaggacagcattctcggtcagatccaaaatctacaaaacatggatctggacacaattaaagaaaaggcccaggctacatttaccgagattaaacagacggccgagcagaagtgcagtgtgatgtag

SEQ ID NO: 255301 - DNA, 483 bp, Artificial Sequence
  derived and/or modified sequence
atggccttcctgatgaagtccatgatcagcaaccaggtgaagaacctgggctttggaggcggcagcgaggagaacaaggaggagggcggggccagtgaccctgctgctgcccagggcatgacccgggaggagtatgaggagtaccagaagcagatgattgaggagaagatggagagagatgctgccttcacccagaagaaggccgagcgggcctgcctgcgggtgcacctgcgggagaagtaccgcctgcccaagtctgagatggatgagaaccagatccagatggctggagatgatgtggacctgcctgaggacctgaggaagatggtggatgaggaccaggaggaggaggaggacaaggacagcatcctgggccagatccagaacctgcagaacatggacctggacaccatcaaggagaaggcccaggccaccttcacagagatcaagcagacagctgagcagaagtgcagcgtgatgtag

SEQ ID NO: 255302 - DNA, 483 bp, Artificial Sequence
  derived and/or modified sequence
atggccttcctgatgaagagcatgatcagcaaccaggtgaagaacttgggatttggtggagggtcagaggaaaacaaagaagagggcggggcatcggacccggctgccgcccagggaatgacccgggaagagtacgaggagtaccagaagcagatgattgaagagaaaatggagcgcgacgccgcattcacacagaagaaagctgaaagggcctgtttgcgcgtacaccttcgcgaaaagtatagactgccaaagtccgagatggatgaaaatcagatccagatggctggagacgacgtcgacttaccagaggacctgcggaagatggttgatgaggatcaggaggaggaagaagacaaggattccatcctaggacaaatccagaacttacagaacatggacctggatactatcaaggagaaagctcaggcaacatttacagagattaaacagaccgccgagcaaaagtgctccgtgatgtag

SEQ ID NO: 255303 - DNA, 483 bp, Artificial Sequence
  derived and/or modified sequence
atggcattcctgatgaagtccatgatttctaatcaggttaaaaaccttgggttcggcggaggctccgaagaaaacaaggaggaaggcggagcgagtgatccagccgctgcacagggcatgactcgtgaggagtacgaagaataccagaaacaaatgattgaagaaaaaatggaaagggacgccgcatttacccagaagaaggctgagagagcatgcctccgagttcacctgagagaaaagtatagacttcccaagtctgagatggacgagaatcaaatacaaatggctggcgacgatgttgacctgcctgaagacctccgtaaaatggtggatgaagatcaggaggaggaagaggataaagatagtatactgggccagattcagaatttgcaaaatatggatctggacactattaaggagaaagcccaagccacctttacagaaatcaagcagacagcggagcagaagtgctccgtaatgtag

SEQ ID NO: 255304 - protein, 1424 aa, Artificial Sequence
  derived and/or modified sequence
MSGLGENLDPLASDSRKRKLPCDTPGQGLTCSGEKRRREQESKYIEELAELISANLSDIDNFNVKPDKCAILKETVRQIRQIKEQGKTISNDDDVQKADVSSTGQGVIDKDSLGPLLLQALDGFLFVVNRDGNIVFVSENVTQYLQYKQEDLVNTSVYNILHEEDRKDFLKNLPKSTVNGVSWTNETQRQKSHTFNCRMLMKTPHDILEDINASPEMRQRYETMQCFALSQPRAMMEEGEDLQSCMICVARRITTGERTFPSNPESFITRHDLSGKVVNIDTNSLRSSMRPGFEDIIRRCIQRFFSLNDGQSWSQKRHYQEAYLNGHAETPVYRFSLADGTIVTAQTKSKLFRNPVTNDRHGFVSTHFLQREQNGYRPNPNPVGQGIRPPMAGCNSSVGGMSMSPNQGLQMPSSRAYGLADPSTTGQMSGARYGGSSNIASLTPGPGMQSPSSYQNNNYGLNMSSPPHGSPGLAPNQQNIMISPRNRGSPKIASHQFSPVAGVHSPMASSGNTGNHSFSSSSLSALQAISEGVGTSLLSTLSSPGPKLDNSPNMNITQPSKVSNQDSKSPLGFYCDQNPVESSMCQSNSRDHLSDKESKESSVEGAENQRGPLESKGHKKLLQLLTCSSDDRGHSSLTNSPLDSSCKESSVSVTSPSGVSSSTSGGVSSTSNMHGSLLQEKHRILHKLLQNGNSPAEVAKITAEATGKDTSSITSCGDGNVVKQEQLSPKKKENNALLRYLLDRDDPSDALSKELQPQVEGVDNKMSQCTSSTIPSSSQEKDPKIKTETSEEGSGDLDNLDAILGDLTSSDFYNNSISSNGSHLGTKQQVFQGTNSLGLKSSQSVQSIRPPYNRAVSLDSPVSVGSSPPVKNISAFPMLPKQPMLGGNPRMMDSQENYGSSMGGPNRNVTVTQTPSSGDWGLPNSKAGRMEPMNSNSMGRPGGDYNTSLPRPALGGSIPTLPLRSNSIPGARPVLQQQQQMLQMRPGEIPMGMGANPYGQAAASNQLGSWPDGMLSMEQVSHGTQNRPLLRNSLDDLVGPPSNLEGQSDERALLDQLHTLLSNTDATGLEEIDRALGIPELVNQGQALEPKQDAFQGQEAAVMMDQKAGLYGQTYPAQGPPMQGGFHLQGQSPSFNSMMNQMNQQGNFPLQGMHPRANIMRPRTNTPKQLRMQLQQRLQGQQFLNQSRQALELKMENPTAGGAAVMRPMMQPQVSSQQGFLNAQMVAQRSRELLSHHFRQQRVAMMMQQQQQQQQQQQQQQQQQQQQQQQQQQQQQTQAFSPPPNVTASPSMDGLLAGPTMPQAPPQQFPYQPNYGMGQQPDPAFGRVSSPPNAMMSSRMGPSQNPMMQHPQAASIYQSSEMKGWPSGNLARNSSFSQQQFAHQGNPAVYSMVHMNGSSGHMGQMNMNPMPMSGMPMGPDQKYC

SEQ ID NO: 255305 - protein, 257 aa, Artificial Sequence
  derived and/or modified sequence
MMEEGEDLQSCMICVARRITTGERTFPSNPESFITRHDLSGKVVNIDTNSLRSSMRPGFEDIIRRCIQRFFSLNDGQSWSQKRHYQEAYLNGHAETPVYRFSLADGTIVTAQTKSKLFRNPVTNDRHGFVSTHFLQREQNGYRPNPNPVGQGIRPPMAGCNSSVGGMSMSPNQGLQMPSSRAYGLADPSTTGQMSGARYGGSSNIASLTPGPGMQSPSSYQNNNYGLNMSSPPHGSPGLAPNQQNIMILLVIVGVQR

SEQ ID NO: 255306 - DNA, 4275 bp, Artificial Sequence
  derived and/or modified sequence
atgtcaggcttgggcgagaatctggacccgctggcaagcgattctaggaagcgcaagcttccttgtgacaccccaggccagggcttgacttgcagcggtgagaagaggaggagagagcaggagtcaaagtatatcgaggaactcgccgagctcatcagcgctaatctgtcggacatcgacaactttaacgtgaaacccgacaaatgtgcaatccttaaggagacagtaagacagattcgacagattaaggaacaaggtaaaaccatttctaatgatgacgacgtgcaaaaagcggatgtttccagcacagggcagggcgtgatcgacaaggacagcctgggcccattactgctgcaggccctggacggcttccttttcgtggttaaccgggacggcaacattgtcttcgtcagcgagaacgtgacccagtacctgcagtataagcaagaggacctcgtcaacactagcgtgtacaatatcctccacgaggaagatcggaaggacttcctcaaaaatctgccaaaatccactgtgaatggagtgagctggacaaacgaaacgcaaagacagaagtcacacacgtttaactgccgaatgttgatgaagaccccccacgacatcttggaggacattaatgcgtcccctgaaatgagacaacggtacgaaaccatgcagtgttttgcactctcacagccacgcgcaatgatggaggaaggggaggacctacaatcttgtatgatctgcgtggcaagacgaatcacaactggggagaggactttcccctccaacccggagtcctttatcacacgccatgacttgagtggaaaggtggtgaatatcgacacgaattcattacgcagctctatgcggccaggcttcgaagacattatccgacgttgtatccagcggttcttcagtctgaatgacgggcagtcctggagccaaaagaggcactaccaggaggcatacctcaatggccatgcagaaacacccgtatatcggttttccctggcagacggtacaatcgtcacagctcagactaaaagcaagctctttagaaaccccgtgaccaatgacaggcatggttttgtttctacacacttcctgcagagggagcagaatgggtacagacccaaccccaaccccgtcgggcaaggcataaggcccccaatggcaggctgcaactcctcagtcggtgggatgtcgatgtccccaaaccagggcctgcagatgccctcctctcgggcatatggcctggcagatccttcaactacgggacaaatgtcgggcgcccggtatggaggctcgagtaacattgcatctctgacacctggtcccggtatgcagagcccgtccagctaccaaaataataactatggtctgaacatgagctccccccctcacggcagcccaggtctggcgcccaatcagcaaaacataatgattagcccacggaacagggggtcaccaaagattgcctcacaccagtttagcccagtggccggggtgcatagccctatggcatcatccggcaacacaggaaaccacagcttctcttctagttcactgtccgctctccaggccatcagcgaaggagttgggacttccctgcttagtaccctctcgagtccaggcccgaaattagacaattctccaaatatgaacatcacccagccctccaaagtgtctaatcaggatagcaagtccccactggggttttattgcgaccagaatccagtggaatcaagtatgtgccaaagcaacagccgggatcatctgagtgataaggaatccaaagaaagttcggtggagggagctgaaaatcagcgaggccctctggaaagcaaaggccataaaaaactgctccagctccttacctgttcctctgacgacaggggccatagcagtctcaccaatagtcctttggactcatcctgcaaggagagctcagtttcagttacttccccctccggagtatcctcaagtacatccggaggggtgtcctctacaagtaatatgcacggctcactccttcaagagaagcatagaatccttcataagcttcttcagaacggaaatagcccagccgaggtggctaagattaccgcagaagccactgggaaagacaccagcagtattacatcttgcggtgacggaaacgtggtgaagcaggaacagctttcccctaagaagaaggagaataacgccctcctccgctacttacttgacagggacgacccaagcgacgcactctcgaaggaactgcaaccgcaagtcgaaggcgtggataacaagatgtcgcagtgtacatcctccaccataccttcatcaagtcaagagaaggatcccaagatcaagacggagacttcagaggaagggtcgggcgacctggacaaccttgatgccatcctgggtgatttaacctcttccgatttttacaacaatagcatctcttccaacggaagtcacctcggcacaaagcagcaggtgttccagggcaccaacagcctgggactgaagtctagtcagtcagtccagtcaataaggcccccttacaatcgtgccgtgtctctggactcaccggtctctgtcgggtcttcccctcctgtgaagaatatttccgcattccccatgctgcctaagcagccaatgctgggaggaaaccctcgtatgatggactcccaggagaactacggttcttccatgggaggtccaaaccgtaatgttacagtgacacagaccccaagctctggcgattggggccttcccaactctaaagcaggccgcatggaacctatgaacagcaattcaatgggccggcctggcggcgattacaatactagcctaccacgaccggcccttggagggagcatacctaccctgccactgcgcagcaattccatacctggagcgcggcctgtcttacagcagcagcagcagatgttgcagatgcgtccaggggagattccgatgggcatgggcgcgaatccatacggacaggcagccgcctccaatcagctagggtcttggccggacggcatgttgtctatggaacaggtgtcacacggcacacaaaaccgacctttgctgagaaacagtttggacgatttggttggccccccctcgaatctggaggggcaatccgatgagcgagctctgttggatcaactccatacccttctcagcaatacagacgcaactgggttagaggagattgacagagcgctcggcatccccgagctggtgaaccaaggacaggccttagaaccaaaacaagacgcattccagggccaagaggcagccgtgatgatggatcagaaggccgggctgtacggccagacttaccctgctcaaggccctccaatgcagggcgggtttcatctgcaaggacaatccccttcctttaattctatgatgaaccagatgaaccagcaaggaaacttccccttgcagggcatgcacccgcgcgcaaatataatgaggccccgcacaaatacacccaagcagttgcgcatgcaattacagcaacgtctgcagggacagcagtttctgaaccagagtcggcaggcgctggaattaaagatggaaaacccgaccgccggaggcgctgctgtcatgcgccctatgatgcaacctcaggtctcctcccagcagggattcctgaacgcccagatggttgcccagcgatcccgggaattactgagtcaccattttaggcagcagagagtggcgatgatgatgcagcagcagcagcagcagcagcaacagcagcagcagcaacagcagcaacaacaacagcagcaacagcagcagcaacagcagcagcagacgcaggcattttctcctcctccgaatgttaccgctagcccgtctatggacgggctactggctggcccaaccatgcctcaagcccctccccagcagtttccataccagccaaactatggcatgggacagcagcccgatccagccttcggccgtgtctcctccccgcccaacgctatgatgtcttctagaatggggccgagccaaaatcccatgatgcagcacccacaggccgcgtctatttatcagtcatctgagatgaaaggttggccctcaggtaatctggcccggaactcgtcattttcccaacagcagtttgcccaccagggcaaccccgcagtgtattccatggtgcacatgaacggcagctccgggcatatggggcagatgaatatgaaccccatgcccatgagtggtatgcccatgggacctgatcagaaatactgctag

SEQ ID NO: 255307 - DNA, 4275 bp, Artificial Sequence
  derived and/or modified sequence
atgagcggcctgggggagaacctggaccccctggccagtgacagcaggaagaggaagctgccctgtgacaccccaggccagggcctgacctgcagcggggagaagagaagaagagagcaggagagcaagtacatcgaggagctggccgagctgatcagcgccaacctgagtgacatcgacaacttcaacgtgaagccagacaagtgtgccatcctgaaggagaccgtgcggcagatccggcagatcaaggagcagggcaagaccatcagcaatgatgatgatgtgcagaaggcagatgtgagcagcacaggccagggcgtcatcgacaaggacagcctgggccccctgctgctgcaggccctggatggcttcctgtttgtggtgaacagagatggcaacatcgtgtttgtgtctgaaaatgtgacccagtacctgcagtacaagcaggaggacctggtgaacacctctgtgtacaacatcctgcacgaggaggacaggaaggacttcctgaagaacctgcccaagagcacagtgaatggagtgtcctggaccaatgagacccagaggcagaagagccacaccttcaactgcaggatgctgatgaagacccctcatgacatcctggaggacatcaatgccagccctgagatgaggcagagatatgagaccatgcagtgctttgccctgagccagccccgggccatgatggaggagggggaggacctgcagagctgcatgatctgtgtggcccggcgcatcaccactggagagaggaccttccccagcaaccctgagagcttcatcaccaggcatgacctgagcggcaaggtggtgaacatcgacaccaacagcctgcggagctccatgaggcctggctttgaggacatcatccgccgctgcatccagcgcttcttcagcctgaatgatggccagagctggagccagaagaggcactaccaggaggcctacctgaatggacatgctgagacccctgtgtaccgcttcagcctggctgatggcaccatcgtgacagcccagaccaagagcaagctgttcagaaatcctgtgaccaatgacagacatggctttgtgtccacccacttcctgcagcgggagcagaatggctaccggcccaaccccaaccctgtgggccagggcatccggccccccatggccggctgcaacagctctgtgggcggcatgtccatgagccccaaccagggcctgcagatgcccagcagccgggcctacggcctggccgaccccagcaccaccggccagatgtctggggcccgctatggaggcagcagcaacatcgccagcctgaccccaggccctggcatgcagagccccagcagctaccagaacaacaactacggcctgaacatgagcagccccccccacggcagccctggcctggcccccaaccagcagaacatcatgatcagccccaggaacagaggcagccccaagatcgccagccaccagttcagccctgtggccggcgtgcacagccccatggccagcagcggcaacacaggcaaccacagcttcagcagcagcagcctgagcgccctgcaggccatcagcgagggcgtgggcaccagcctgctgagcaccctgagcagccctggccccaagctggacaacagccccaacatgaacatcacccagcccagcaaggtgagcaaccaggacagcaagagccccctgggcttctactgtgaccagaaccctgtggagagctccatgtgccagagcaacagccgggaccacctgagtgacaaggagagcaaggagagctctgtggagggcgctgagaaccagaggggccccctggagagcaagggccacaagaagctgctgcagctgctgacctgcagcagtgatgaccggggccacagcagcctgaccaacagccccctggacagcagctgcaaggagagctctgtgtctgtgaccagccccagcggcgtgagcagcagcaccagcggcggcgtgagcagcaccagcaacatgcacggcagcctgctgcaggagaagcaccgcatcctgcacaagctgctgcagaatggaaacagccctgctgaggtggccaagatcacagctgaggccaccgggaaggacaccagcagcatcaccagctgtggagatggaaatgtggtgaagcaggagcagctgagccccaagaagaaggaaaataatgccctgctgcgctacctgctggacagagatgaccccagtgatgccctgagcaaggagctgcagccccaggtggagggcgtggacaacaagatgagccagtgcaccagcagcaccatccccagcagcagccaggagaaggaccccaagatcaagacagagaccagcgaggagggcagcggggacctggacaacctggatgccatcctgggggacctgaccagcagtgacttctacaacaacagcatcagcagcaatggcagccacctgggcaccaagcagcaggtgttccagggcaccaacagcctgggcctgaagagcagccagagcgtgcagagcatccggcccccctacaacagagctgtgtccctggacagccctgtgtctgtgggcagcagcccccctgtgaagaacatcagcgccttccccatgctgcccaagcagcccatgctgggcggcaaccccaggatgatggacagccaggagaactacggcagctccatgggcggccccaacagaaatgtgacagtgacccagacccccagcagcggggactggggcctgcccaacagcaaggccggccgcatggagcccatgaacagcaacagcatgggccggcctggaggagactacaacaccagcctgcccaggcctgccctgggcggcagcatccccaccctgcccctgcggagcaacagcatccctggggcccggcctgtgctgcagcagcagcagcagatgctgcagatgaggcctggagagatccccatgggcatgggcgccaacccctacggccaggccgccgccagcaaccagctgggctcctggccagatggcatgctgtccatggagcaggtgagccacggcacccagaaccggcccctgctgaggaacagcctggatgacctggtgggcccccccagcaacctggagggccagagtgatgagcgggccctgctggaccagctgcacaccctgctgagcaacacagatgccaccggcctggaggagattgaccgggccctgggcatccctgagctggtgaaccagggccaggccctggagcccaagcaggatgccttccagggccaggaggccgctgtgatgatggaccagaaggccggcctgtatggccagacctacccagcccagggcccccccatgcagggcggcttccacctgcagggccagagccccagcttcaacagcatgatgaaccagatgaaccagcagggcaacttccccctgcagggcatgcacccccgggccaacatcatgaggcccaggaccaacacccccaagcagctgaggatgcagctgcagcagaggctgcagggccagcagttcctgaaccagagccggcaggccctggagctgaagatggagaaccccacagctgggggcgctgctgtgatgaggcccatgatgcagccccaggtgagcagccagcagggcttcctgaatgcccagatggtggcccagaggagccgggagctgctgagccaccacttccggcagcagagggtggccatgatgatgcagcagcagcagcagcagcagcagcagcagcagcagcagcagcagcagcagcagcagcagcagcagcagcagcagcagcagcagcagacccaggccttcagccccccaccaaatgtgacagccagccccagcatggatggcctgctggccggccccaccatgccccaggccccaccccagcagttcccctaccagcccaactacggcatgggccagcagcctgaccctgccttcggccgggtgagcagccccccaaatgccatgatgagcagcaggatgggccccagccagaaccccatgatgcagcacccccaggccgccagcatctaccagagcagcgagatgaagggctggcccagcggcaacctggccaggaacagcagcttcagccagcagcagtttgcccaccagggcaacccagctgtgtacagcatggtgcacatgaatggcagcagcggccacatgggccagatgaacatgaaccccatgcccatgagcggcatgcccatgggccctgaccagaagtactgctag

SEQ ID NO: 255308 - DNA, 4275 bp, Artificial Sequence
  derived and/or modified sequence
atgagcggcctgggcgagaacctggaccccctggccagcgacagccgcaagagaaaattgccctgcgacactcctggccagggcctaacatgctccggggaaaaacggcggcgtgagcaggagtcgaagtatatcgaagagctggctgaactgatttcggccaacctaagtgacattgataacttcaatgtgaagccggataaatgcgccattctcaaggaaactgtccggcagatacggcagatcaaggagcagggaaaaaccatatccaacgacgatgatgtgcagaaggcggatgtgtcaagtacaggtcagggtgtcatcgataaggatagcctggggcccctcctgctgcaggcactcgacggcttcctgttcgttgtcaacagggacggcaatatcgtgtttgtgagtgagaacgtgacccagtacttacagtacaagcaggaagacctagttaatacaagcgtgtataacatcctgcacgaggaggacaggaaggactttctgaagaatctgccaaagagcaccgtcaatggggtgtcctggaccaacgagacccaacggcagaagagccatacctttaattgtcgaatgttgatgaagactcctcatgacatcctcgaggacattaacgcctcccctgaaatgaggcagcggtacgaaacaatgcagtgctttgcgctctcgcagccaagggctatgatggaggaaggggaagatctgcagagctgtatgatttgcgtcgcccgtagaatcaccacaggggagcgcacgtttccgagtaatccagagagcttcatcacccgccatgatctctcaggcaaggtcgtgaatatcgatactaactcactgaggagctctatgaggcctggtttcgaagacatcattagacggtgcattcagagatttttctcgcttaacgacgggcaatcctggtcccagaagcgtcattatcaggaggcatatttgaatggacatgctgagactccggtgtacaggttttctcttgcggatggcaccatcgtgaccgcccagaccaagagcaagctttttcggaatccggtgaccaacgatcggcatggatttgtaagcacacatttcctgcagcgcgaacagaatgggtatcggcctaaccctaaccctgtagggcaggggatcaggcctcccatggctggctgcaattcgtccgtgggcgggatgagtatgtcaccgaatcaagggctgcagatgcctagctctcgggcatacggactggccgatccatccaccacaggccagatgagcggagcaaggtacggcggctcctctaatatcgccagtctgacacccggacctggtatgcagtcccctagctcttatcagaataacaattacggactcaatatgagtagcccaccacacgggtctcctgggttggcacccaaccagcagaacattatgatctcaccccgcaatcggggttcgcctaaaatcgcctcccaccaatttagccctgtagcgggggtgcattctccaatggcctccagcggtaacacaggtaatcactcattttccagctcctccctgagcgccctgcaggccatatctgagggagtgggaacttctctgctatccaccctctcatctcctggccctaagctggacaattcacctaatatgaatatcactcagccatccaaggttagcaaccaggacagtaagagccctctaggcttctactgcgaccagaatccggtcgaatcatccatgtgccagtcaaacagtagggaccatctctcagacaaagaatcgaaggagagtagtgttgagggagctgaaaaccaaagaggaccattggaatccaagggacataagaagctgctgcagttgctcacttgctctagtgacgatagagggcactcatcgctgaccaatagcccactggacagtagctgcaaagagtcctccgtgtcagtgacgagtcctagtggggtcagcagcagcactagcggtggcgtgagttccacttcaaacatgcacggctcactgttacaagaaaaacacagaattctccataagctcctacagaatgggaatagcccagccgaggttgctaagattacggccgaagccaccgggaaagataccagctctatcaccagctgcggcgacggaaatgtagtgaagcaggaacagctttcaccgaagaaaaaggaaaacaacgctctgctacggtacctcctagatcgtgacgaccctagcgacgcgttgtctaaggaactccagccgcaagttgaaggggttgataataaaatgtcccagtgcacatccagcacaattccatcctcaagccaggaaaaggaccctaagattaagacagagaccagcgaagagggttccggggacttagataaccttgacgcaatcctgggtgacctcacaagctcagacttttataataattccatcagtagcaacgggtcccatctcggtactaaacagcaggtgttccagggaaccaactccctcggacttaaatcctcccagtctgtgcagtcaatcaggccaccctataaccgagctgtctctttagattcacctgtgtctgtaggctccagtcctcccgtaaagaatattagcgcgtttccaatgctgcctaagcagccaatgttgggaggtaaccctcgcatgatggattctcaggagaactacggatcaagcatgggggggccgaaccgcaacgtgacggtcacacaaacacccagttctggagactggggattaccaaattctaaggctggtaggatggagccaatgaattcaaattccatgggaaggccagggggtgattacaacacaagcctcccccgccccgcccttggaggctcaattcccacgctgccactgcggtccaactctatcccaggggcgaggccggttctgcagcagcagcagcaaatgctccaaatgaggcccggagagattcccatgggcatgggcgcaaatccgtatggccaagctgcagcttccaatcagttaggatcttggcctgacggtatgctgagcatggagcaggtgtcccacgggacacagaaccggccattgctgcgcaattccctcgatgacctagtgggacccccatctaacctggaagggcagagcgacgagagagccctgctggaccagttgcataccctcctttcaaataccgatgcaacggggttggaggagatcgacagggccctgggcattccggagctggtgaaccagggtcaggccttagagcccaaacaagatgcctttcagggtcaggaggcggccgtgatgatggaccagaaggctgggttgtacggccagacttatccggctcagggcccaccgatgcaaggcggatttcacctgcaggggcaatcacctagctttaattctatgatgaatcagatgaaccagcagggtaatttccctctacagggtatgcatcctagggccaatattatgcgacctagaaccaacacacctaagcagctgagaatgcagctccagcaaaggctacagggtcagcagttcctcaatcagagcaggcaggctctcgaactgaaaatggaaaatcctactgccggaggcgctgcggttatgagacccatgatgcagccgcaggtatcctctcaacagggtttcctaaatgctcagatggtggctcagcggtctcgcgaacttctgtcacaccattttaggcagcagagggtggctatgatgatgcagcagcagcagcaacagcagcagcagcagcaacagcagcagcagcaacagcagcaacagcagcagcaacagcagcagcaacagcagactcaagcattttctcctcctcccaacgtgactgccagtcccagcatggatgggcttctcgccggcccaaccatgccacaggcgcctccacaacagttcccctaccagcctaattacggaatgggacagcagcctgaccccgcctttgggcgggtaagttcccctccaaacgcgatgatgagcagcaggatgggccccagccaaaaccctatgatgcagcatccccaggcagcatccatataccaatcttccgaaatgaaggggtggccttctggtaacttagccaggaattcctcttttagccagcagcaatttgcccaccagggtaaccctgccgtgtactccatggttcacatgaacggcagctctgggcacatgggccaaatgaatatgaacccgatgcccatgtcaggaatgccaatgggaccagatcagaaatactgctag

SEQ ID NO: 255309 - DNA, 4668 bp, Artificial Sequence
  derived and/or modified sequence
ctgcggcttagtcggtggcggccggcggcggctgcgggctgagcggcgagtttccgatttaaagctgagctgcgaggaaaatggcggcgggaggatcaaaatacttgctggatggtggactcagagaccaataaaaataaactgcttgaacatcctttgactggttagccagttgctgatgtatattcaagatgagtggattaggagaaaacttggatccactggccagtgattcacgaaaacgcaaattgccatgtgatactccaggacaaggtcttacctgcagtggtgaaaaacggagacgggagcaggaaagtaaatatattgaagaattggctgagctgatatctgccaatcttagtgatattgacaatttcaatgtcaaaccagataaatgtgcgattttaaaggaaacagtaagacagatacgtcaaataaaagagcaaggaaaaactatttccaatgatgatgatgttcaaaaagccgatgtatcttctacagggcagggagttattgataaagactccttaggaccgcttttacttcaggcattggatggtttcctatttgtggtgaatcgagacggaaacattgtatttgtatcagaaaatgtcacacaatacctgcaatataagcaagaggacctggttaacacaagtgtttacaatatcttacatgaagaagacagaaaggattttcttaagaatttaccaaaatctacagttaatggagtttcctggacaaatgagacccaaagacaaaaaagccatacatttaattgccgtatgttgatgaaaacaccacatgatattctggaagacataaacgccagtcctgaaatgcgccagagatatgaaacaatgcagtgctttgccctgtctcagccacgagctatgatggaggaaggggaagatttgcaatcttgtatgatctgtgtggcacgccgcattactacaggagaaagaacatttccatcaaaccctgagagctttattaccagacatgatctttcaggaaaggttgtcaatatagatacaaattcactgagatcctccatgaggcctggctttgaagatataatccgaaggtgtattcagagattttttagtctaaatgatgggcagtcatggtcccagaaacgtcactatcaagaagcttatcttaatggccatgcagaaaccccagtatatcgattctcgttggctgatggaactatagtgactgcacagacaaaaagcaaactcttccgaaatcctgtaacaaatgatcgacatggctttgtctcaacccacttccttcagagagaacagaatggatatagaccaaacccaaatcctgttggacaagggattagaccacctatggctggatgcaacagttcggtaggcggcatgagtatgtcgccaaaccaaggcttacagatgccgagcagcagggcctatggcttggcagaccctagcaccacagggcagatgagtggagctaggtatgggggttccagtaacatagcttcattgacccctgggccaggcatgcaatcaccatcttcctaccagaacaacaactatgggctcaacatgagtagccccccacatgggagtcctggtcttgccccaaaccagcagaatatcatgatttctcctcgtaatcgtgggagtccaaagatagcctcacatcagttttctcctgttgcaggtgtgcactctcccatggcatcttctggcaatactgggaaccacagcttttccagcagctctctcagtgccctgcaagccatcagtgaaggtgtggggacttcccttttatctactctgtcatcaccaggccccaaattggataactctcccaatatgaatattacccaaccaagtaaagtaagcaatcaggattccaagagtcctctgggcttttattgcgaccaaaatccagtggagagttcaatgtgtcagtcaaatagcagagatcacctcagtgacaaagaaagtaaggagagcagtgttgagggggcagagaatcaaaggggtcctttggaaagcaaaggtcataaaaaattactgcagttacttacctgttcttctgatgaccggggtcattcctccttgaccaactcccccctagattcaagttgtaaagaatcttctgttagtgtcaccagcccctctggagtctcctcctctacatctggaggagtatcctctacatccaatatgcatgggtcactgttacaagagaagcaccggattttgcacaagttgctgcagaatgggaattcaccagctgaggtagccaagattactgcagaagccactgggaaagacaccagcagtataacttcttgtggggacggaaatgttgtcaagcaggagcagctaagtcctaagaagaaggagaataatgcacttcttagatacctgctggacagggatgatcctagtgatgcactctctaaagaactacagccccaagtggaaggagtggataataaaatgagtcagtgcaccagctccaccattcctagctcaagtcaagagaaagaccctaaaattaagacagagacaagtgaagagggatctggagacttggataatctagatgctattcttggtgatctgactagttctgacttttacaataattccatatcctcaaatggtagtcatctggggactaagcaacaggtgtttcaaggaactaattctctgggtttgaaaagttcacagtctgtgcagtctattcgtcctccatataaccgagcagtgtctctggatagccctgtttctgttggctcaagtcctccagtaaaaaatatcagtgctttccccatgttaccaaagcaacccatgttgggtgggaatccaagaatgatggatagtcaggaaaattatggctcaagtatgggtgggccaaaccgaaatgtgactgtgactcagactccttcctcaggagactggggcttaccaaactcaaaggccggcagaatggaacctatgaattcaaactccatgggaagaccaggaggagattataatacttctttacccagacctgcactgggtggctctattcccacattgcctcttcggtctaatagcataccaggtgcgagaccagtattgcaacagcagcagcagatgcttcaaatgaggcctggtgaaatccccatgggaatgggggctaatccctatggccaagcagcagcatctaaccaactgggttcctggcccgatggcatgttgtccatggaacaagtttctcatggcactcaaaataggcctcttcttaggaattccctggatgatcttgttgggccaccttccaacctggaaggccagagtgacgaaagagcattattggaccagctgcacactcttctcagcaacacagatgccacaggcctggaagaaattgacagagctttgggcattcctgaacttgtcaatcagggacaggcattagagcccaaacaggatgctttccaaggccaagaagcagcagtaatgatggatcagaaggcaggattatatggacagacatacccagcacaggggcctccaatgcaaggaggctttcatcttcagggacaatcaccatcttttaactctatgatgaatcagatgaaccagcaaggcaattttcctctccaaggaatgcacccacgagccaacatcatgagaccccggacaaacacccccaagcaacttagaatgcagcttcagcagaggctgcagggccagcagtttttgaatcagagccgacaggcacttgaattgaaaatggaaaaccctactgctggtggtgctgcggtgatgaggcctatgatgcagccccaggtgagctcccagcagggttttcttaatgctcaaatggtcgcccaacgcagcagagagctgctaagtcatcacttccgacaacagagggtggctatgatgatgcagcagcagcagcagcagcaacagcagcagcagcagcagcagcagcagcaacagcaacagcaacagcaacagcagcaacagcagcaaacccaggccttcagcccacctcctaatgtgactgcttcccccagcatggatgggcttttggcaggacccacaatgccacaagctcctccgcaacagtttccatatcaaccaaattatggaatgggacaacaaccagatccagcctttggtcgagtgtctagtcctcccaatgcaatgatgtcgtcaagaatgggtccctcccagaatcccatgatgcaacacccgcaggctgcatccatctatcagtcctcagaaatgaagggctggccatcaggaaatttggccaggaacagctccttttcccagcagcagtttgcccaccaggggaatcctgcagtgtatagtatggtgcacatgaatggcagcagtggtcacatgggacagatgaacatgaaccccatgcccatgtctggcatgcctatgggtcctgatcagaaatactgctgacatctctgcaccaggacctcttaaggaaaccactgtacaaatgacactgcactaggattattgggaaggaatcattgttccaggcatccatcttggaagaaaggaccagctttgagctccatcaagggtattttaagtgatgtcatttgagcaggactggattttaagccgaagggcaatatctacgtgtttttcccccctc

SEQ ID NO: 255310 - DNA, 4275 bp, Artificial Sequence
  derived and/or modified sequence
atgtcagggttgggggaaaacctggaccctctcgctagcgatagtagaaaaagaaaactgccctgcgacacaccgggtcagggtcttacctgtagcggagagaaaaggaggcgggagcaggaatcaaaatacatcgaggaactggctgagttgatcagcgctaatttgtctgacatcgacaacttcaatgtcaagcctgataagtgtgccatccttaaggagactgtcagacagattagacagatcaaagagcaaggcaagacgattagcaatgacgatgatgtgcaaaaggcagatgtttcgtccacaggccaaggggtcatcgataaagattccctgggaccgctactgctgcaggccttggatggctttctgtttgtagtgaaccgggacggtaatatagtatttgtgtccgagaatgtaactcaatacctgcagtataagcaggaggatctcgtgaatacttctgtgtacaatattttgcacgaggaggatcgaaaggactttctgaagaaccttcctaagagcacagtgaacggcgtctcctggactaatgagacccagagacagaaatcacacacattcaactgtcggatgctgatgaagacaccgcacgatatcctcgaggatattaacgctagccccgagatgaggcagcgctatgaaacgatgcagtgctttgctttgtcacagccgagagcaatgatggaagagggagaggatctccagtcttgtatgatttgtgtggcacgtagaataacaacaggtgagagaaccttcccctccaatcccgaaagttttattaccaggcacgatctcagtggtaaagttgtgaacatcgataccaattccttacggagttcaatgagaccgggttttgaggatatcatcaggcgatgcatccagcgcttctttagtctgaacgacgggcagtcttggtctcagaaaagacactaccaagaagcttatctaaacgggcacgccgagaccccagtctatcgtttctcccttgctgacgggacaatcgtcaccgcccaaacgaaaagcaagctctttcggaatcccgtcaccaatgacaggcatgggtttgtcagcacgcacttcctgcagcgcgagcaaaatgggtaccggcctaacccgaacccagtaggccagggcattcggccaccaatggcagggtgtaattcttcggtgggtggaatgagcatgtcgcccaatcaggggttgcagatgccatcaagccgagcctacgggctagccgacccatcaacaaccggccagatgagcggcgctcggtatggcggaagttctaacatcgcatctttgacacctggcccaggcatgcagagcccctcaagctatcagaacaacaactacggtctgaacatgtcctctcccccacacggctccccgggactggctcccaaccagcagaacatcatgatctcacctaggaataggggatctcccaaaattgcctcccaccagttttcacccgtcgcaggggtgcattccccaatggcatcttctggcaataccggcaaccactctttcagcagcagttcactatcagcactgcaagctatttcagagggcgtcgggaccagcctgttgtctaccctttctagccctggcccaaaactagataattcccccaatatgaacataacccagccatccaaagtgagtaaccaagacagcaagtctcctctgggattttactgcgatcaaaaccccgtcgagagctcgatgtgtcagagcaatagccgggaccatctcagtgataaagagtctaaggaatcgtcagtggaaggtgccgagaatcagaggggtccactcgagtccaaggggcataagaagctgttgcagctccttacctgcagctccgatgaccggggacacagctcgcttactaacagtccccttgacagcagctgtaaagagagctcagtttcggtaaccagtcctagtggtgtttcctccagcacctccggtggcgtcagtagcactagcaacatgcatggctctctgctccaggagaagcataggattctgcataagctgctccagaatggcaactctcctgctgaggtcgctaaaataacggcggaggctacagggaaagacacctcaagcattacctcatgtggtgacggtaatgttgttaaacaggaacaactgagcccgaaaaagaaagaaaataacgcattgctccgctatctgctggatcgggacgacccttcagatgctttgagtaaggaactgcagccccaggtagagggtgtggacaataagatgtcacagtgcacttcctctacgattccaagctcttcacaggaaaaagaccctaaaatcaagaccgaaacaagcgaagaaggcagtggggatctggataatctggatgctatcctaggggatctcacgagctccgacttttataataactcgataagctcgaacggctcccacttgggcactaagcagcaggtcttccaggggaccaatagccttgggctcaaatcatcacagtccgtgcagtccattaggccgccatataatcgggcagtatcattagactctcctgtatcggtcggcagttccccaccagtaaaaaatatctcagctttcccaatgttacccaaacaacccatgcttggcggaaacccacgtatgatggacagtcaagaaaactatgggtcttccatgggtggccctaatcgcaacgtaactgtgacccagacccccagttcaggcgactggggtttgcccaattctaaagcagggaggatggagcccatgaactccaattcaatggggaggcctggcggtgattataatactagccttcctcgccctgccctgggcggttcgatccctactctcccgttgcggtcgaactctattccaggagccagacctgttctgcagcagcagcagcagatgcttcagatgagaccaggggaaatacccatgggcatgggtgcgaatccatatggccaagccgctgctagtaatcaactgggcagctggcccgacggcatgctgagcatggaacaagtgagtcacgggacacagaatcggccactgcttaggaattcattggatgatctcgtaggccctccctcgaatctggagggacaatcagacgaacgggcactgctcgaccaactccacactttattatcgaacacggacgcaaccggcctcgaggagattgacagggctctcgggatccctgagctagtgaatcagggccaggctcttgagcccaaacaggatgccttccagggacaggaagccgctgtcatgatggaccagaaggcagggctgtacggccagacttatcccgcacaagggcctccgatgcagggaggctttcacctgcaaggacagagtccctctttcaatagcatgatgaaccagatgaatcagcaggggaactttccactgcaggggatgcacccgagggccaatattatgaggccgcgtactaacactcctaaacagctacggatgcagctgcaacagaggctccaagggcagcagtttctcaatcaaagtcgtcaagctcttgagcttaagatggaaaatccaactgcagggggagcagcagtgatgcgccctatgatgcaaccccaggtatcgtcccaacagggattcctaaatgctcaaatggtcgctcagcgcagccgcgaacttctctcccaccatttccgacagcagcgggttgctatgatgatgcagcagcagcagcagcaacagcaacagcagcagcagcagcagcagcaacagcaacagcagcagcagcaacagcaacagcagcagcagacacaggccttttctcctcccccaaacgtcaccgcctccccttctatggatggactactagcagggcctacaatgccacaggctcccccacaacagtttccttaccagcctaattacggcatgggtcaacagcccgatccggcttttggtagagtgagcagccccccaaacgctatgatgtccagtcgcatgggaccttcccaaaacccaatgatgcagcatcctcaagccgcttcgatctaccagagcagcgagatgaaagggtggccttctgggaaccttgctcggaactcttcgttctcacagcagcagttcgctcatcaagggaatcccgcagtgtactctatggtgcacatgaacggatcatccggccacatggggcagatgaatatgaatcccatgcctatgagcgggatgcccatgggccctgaccagaaatactgttag

SEQ ID NO: 255311 - DNA, 4275 bp, Artificial Sequence
  derived and/or modified sequence
atgagcggcctgggcgagaacctggaccccctggccagcgacagcagaaagagaaagctgccctgcgacacccccggccagggcctgacctgcagcggcgagaagagaagaagagagcaggagagcaagtacatcgaggagctggccgagctgatcagcgccaacctgagcgacatcgacaacttcaacgtgaagcccgacaagtgcgccatcctgaaggagaccgtgagacagatcagacagatcaaggagcagggcaagaccatcagcaacgacgacgacgtgcagaaggccgacgtgagcagcaccggccagggcgtgatcgacaaggacagcctgggccccctgctgctgcaggccctggacggcttcctgttcgtggtgaacagagacggcaacatcgtgttcgtgagcgagaacgtgacccagtacctgcagtacaagcaggaggacctggtgaacaccagcgtgtacaacatcctgcacgaggaggacagaaaggacttcctgaagaacctgcccaagagcaccgtgaacggcgtgagctggaccaacgagacccagagacagaagagccacaccttcaactgcagaatgctgatgaagaccccccacgacatcctggaggacatcaacgccagccccgagatgagacagagatacgagaccatgcagtgcttcgccctgagccagcccagagccatgatggaggagggcgaggacctgcagagctgcatgatctgcgtggccagaagaatcaccaccggcgagagaaccttccccagcaaccccgagagcttcatcaccagacacgacctgagcggcaaggtggtgaacatcgacaccaacagcctgagaagcagcatgagacccggcttcgaggacatcatcagaagatgcatccagagattcttcagcctgaacgacggccagagctggagccagaagagacactaccaggaggcctacctgaacggccacgccgagacccccgtgtacagattcagcctggccgacggcaccatcgtgaccgcccagaccaagagcaagctgttcagaaaccccgtgaccaacgacagacacggcttcgtgagcacccacttcctgcagagagagcagaacggctacagacccaaccccaaccccgtgggccagggcatcagaccccccatggccggctgcaacagcagcgtgggcggcatgagcatgagccccaaccagggcctgcagatgcccagcagcagagcctacggcctggccgaccccagcaccaccggccagatgagcggcgccagatacggcggcagcagcaacatcgccagcctgacccccggccccggcatgcagagccccagcagctaccagaacaacaactacggcctgaacatgagcagccccccccacggcagccccggcctggcccccaaccagcagaacatcatgatcagccccagaaacagaggcagccccaagatcgccagccaccagttcagccccgtggccggcgtgcacagccccatggccagcagcggcaacaccggcaaccacagcttcagcagcagcagcctgagcgccctgcaggccatcagcgagggcgtgggcaccagcctgctgagcaccctgagcagccccggccccaagctggacaacagccccaacatgaacatcacccagcccagcaaggtgagcaaccaggacagcaagagccccctgggcttctactgcgaccagaaccccgtggagagcagcatgtgccagagcaacagcagagaccacctgagcgacaaggagagcaaggagagcagcgtggagggcgccgagaaccagagaggccccctggagagcaagggccacaagaagctgctgcagctgctgacctgcagcagcgacgacagaggccacagcagcctgaccaacagccccctggacagcagctgcaaggagagcagcgtgagcgtgaccagccccagcggcgtgagcagcagcaccagcggcggcgtgagcagcaccagcaacatgcacggcagcctgctgcaggagaagcacagaatcctgcacaagctgctgcagaacggcaacagccccgccgaggtggccaagatcaccgccgaggccaccggcaaggacaccagcagcatcaccagctgcggcgacggcaacgtggtgaagcaggagcagctgagccccaagaagaaggagaacaacgccctgctgagatacctgctggacagagacgaccccagcgacgccctgagcaaggagctgcagccccaggtggagggcgtggacaacaagatgagccagtgcaccagcagcaccatccccagcagcagccaggagaaggaccccaagatcaagaccgagaccagcgaggagggcagcggcgacctggacaacctggacgccatcctgggcgacctgaccagcagcgacttctacaacaacagcatcagcagcaacggcagccacctgggcaccaagcagcaggtgttccagggcaccaacagcctgggcctgaagagcagccagagcgtgcagagcatcagacccccctacaacagagccgtgagcctggacagccccgtgagcgtgggcagcagcccccccgtgaagaacatcagcgccttccccatgctgcccaagcagcccatgctgggcggcaaccccagaatgatggacagccaggagaactacggcagcagcatgggcggccccaacagaaacgtgaccgtgacccagacccccagcagcggcgactggggcctgcccaacagcaaggccggcagaatggagcccatgaacagcaacagcatgggcagacccggcggcgactacaacaccagcctgcccagacccgccctgggcggcagcatccccaccctgcccctgagaagcaacagcatccccggcgccagacccgtgctgcagcagcagcagcagatgctgcagatgagacccggcgagatccccatgggcatgggcgccaacccctacggccaggccgccgccagcaaccagctgggcagctggcccgacggcatgctgagcatggagcaggtgagccacggcacccagaacagacccctgctgagaaacagcctggacgacctggtgggcccccccagcaacctggagggccagagcgacgagagagccctgctggaccagctgcacaccctgctgagcaacaccgacgccaccggcctggaggagatcgacagagccctgggcatccccgagctggtgaaccagggccaggccctggagcccaagcaggacgccttccagggccaggaggccgccgtgatgatggaccagaaggccggcctgtacggccagacctaccccgcccagggcccccccatgcagggcggcttccacctgcagggccagagccccagcttcaacagcatgatgaaccagatgaaccagcagggcaacttccccctgcagggcatgcaccccagagccaacatcatgagacccagaaccaacacccccaagcagctgagaatgcagctgcagcagagactgcagggccagcagttcctgaaccagagcagacaggccctggagctgaagatggagaaccccaccgccggcggcgccgccgtgatgagacccatgatgcagccccaggtgagcagccagcagggcttcctgaacgcccagatggtggcccagagaagcagagagctgctgagccaccacttcagacagcagagagtggccatgatgatgcagcagcagcagcagcagcagcagcagcagcagcagcagcagcagcagcagcagcagcagcagcagcagcagcagcagcagcagcagacccaggccttcagccccccccccaacgtgaccgccagccccagcatggacggcctgctggccggccccaccatgccccaggcccccccccagcagttcccctaccagcccaactacggcatgggccagcagcccgaccccgccttcggcagagtgagcagcccccccaacgccatgatgagcagcagaatgggccccagccagaaccccatgatgcagcacccccaggccgccagcatctaccagagcagcgagatgaagggctggcccagcggcaacctggccagaaacagcagcttcagccagcagcagttcgcccaccagggcaaccccgccgtgtacagcatggtgcacatgaacggcagcagcggccacatgggccagatgaacatgaaccccatgcccatgagcggcatgcccatgggccccgaccagaagtactgctag

SEQ ID NO: 255312 - protein, 415 aa, Artificial Sequence
  derived and/or modified sequence
MLESYVTPILMSYVNRYIKNLKPSDLQLSLWGGDVVLSKLELKLDVLEQELKLPFTFLSGHIHELRIHVPWTKLGSEPVVITINTMECILKLKDGIQDDHESCGSNSTNRSTAESTKSSIKPRRMQQAAPTDPDLPPGYVQSLIRRVVNNVNIVINNLILKYVEDDIVLSVNITSAECYTVGELWDRAFMDISATDLVLRKVINFSDCTVCLDKRNASGKIEFYQDPLLYKCSFRTRLHFTYENLNSKMPSVIKIHTLVESLKLSITDQQLPMFIRIMQLGIALYYGEIGNFKEGEIEDLTCHNKDMLGNITGSEDETRIDMQYPAQHKGQELYSQQDEEQPQGWVSWAWSFVPAIVSYDDGEEDFVGNDPASTMHQQKAQTLKDPIVSIGFYCTKATVTFKVGLFSCCLYLYQL

SEQ ID NO: 255313 - DNA, 1248 bp, Artificial Sequence
  derived and/or modified sequence
atgctggagagctacgtgacccccatcctgatgagctacgtgaacagatacatcaagaacctgaagcccagcgacctgcagctgagcctgtggggcggcgacgtggtgctgagcaagctggagctgaagctggacgtgctggagcaggagctgaagctgcccttcaccttcctgagcggccacatccacgagctgagaatccacgtgccctggaccaagctgggcagcgagcccgtggtgatcaccatcaacaccatggagtgcatcctgaagctgaaggacggcatccaggacgaccacgagagctgcggcagcaacagcaccaacagaagcaccgccgagagcaccaagagcagcatcaagcccagaagaatgcagcaggccgcccccaccgaccccgacctgccccccggctacgtgcagagcctgatcagaagagtggtgaacaacgtgaacatcgtgatcaacaacctgatcctgaagtacgtggaggacgacatcgtgctgagcgtgaacatcaccagcgccgagtgctacaccgtgggcgagctgtgggacagagccttcatggacatcagcgccaccgacctggtgctgagaaaggtgatcaacttcagcgactgcaccgtgtgcctggacaagagaaacgccagcggcaagatcgagttctaccaggaccccctgctgtacaagtgcagcttcagaaccagactgcacttcacctacgagaacctgaacagcaagatgcccagcgtgatcaagatccacaccctggtggagagcctgaagctgagcatcaccgaccagcagctgcccatgttcatcagaatcatgcagctgggcatcgccctgtactacggcgagatcggcaacttcaaggagggcgagatcgaggacctgacctgccacaacaaggacatgctgggcaacatcaccggcagcgaggacgagaccagaatcgacatgcagtaccccgcccagcacaagggccaggagctgtacagccagcaggacgaggagcagccccagggctgggtgagctgggcctggagcttcgtgcccgccatcgtgagctacgacgacggcgaggaggacttcgtgggcaacgaccccgccagcaccatgcaccagcagaaggcccagaccctgaaggaccccatcgtgagcatcggcttctactgcaccaaggccaccgtgaccttcaaggtgggcctgttcagctgctgcctgtacctgtaccagctgtag

SEQ ID NO: 255314 - DNA, 1248 bp, Artificial Sequence
  derived and/or modified sequence
atgctcgaatcttatgtcacccccatcttgatgtcttacgtcaatagatatatcaaaaatttaaaacctagtgacctacagctctcactgtggggaggagacgttgtgcttagcaaacttgagctgaagttggacgtgctggaacaggaactcaagcttccattcacattcctgagcgggcatatccatgagctgaggatacatgtcccatggacaaagcttggctccgaaccggtagtgattacgattaacacaatggaatgtatcttaaagttgaaagacgggattcaagacgatcacgaatcttgcggttcaaactcaaccaataggagcactgctgaatctaccaaatcatcaattaagccgcgtaggatgcaacaggctgcaccaacggatccggacctgccacccgggtatgtgcagtccctgattcggcgcgtcgtgaataatgttaacattgttatcaacaacctgattcttaaatacgtggaggatgacattgtcttaagcgtcaatatcaccagcgccgagtgctacacggtcggcgagttgtgggaccgcgcatttatggatatctccgccacagatttggtcctcaggaaggtaattaacttctccgattgcaccgtgtgcctcgataagcgaaatgcttccgggaaaatcgagttctaccaagaccctctgctgtacaagtgtagtttcagaacgcgtctgcatttcacatatgagaacttgaactcaaagatgcccagcgtgattaaaattcacacactcgtagagtcattgaagctgagtataaccgatcaacagctgcctatgttcatccggatcatgcagcttggtattgcactttattacggcgaaatcgggaatttcaaggaaggcgaaattgaggacctaacatgtcacaacaaggacatgctgggcaacattacgggatcagaggacgagacacggatcgacatgcagtatcctgcccagcataagggccaggaactctatagccagcaggatgaagagcaacctcagggatgggtgagctgggcctggagctttgttcccgcgatcgtatcctatgatgatggcgaggaagatttcgttggtaatgaccccgcttcaaccatgcaccagcagaaagctcagactctgaaagatcccatcgtcagtatcggcttctactgtacaaaggcaacggtgacgttcaaggtggggttattctcttgttgcctgtatttgtatcagctgtag

SEQ ID NO: 255315 - DNA, 1248 bp, Artificial Sequence
  derived and/or modified sequence
atgctggagagctatgtgacccccatcctgatgtcctatgtgaaccgctacatcaagaacctgaagcccagcgacctgcagctgagcctgtggggcggagatgtggtgctgagcaagctggagctgaagctggatgtgctggagcaggagctgaagctgcccttcaccttcctgagcggccacatccacgagctgcgcatccacgtgccctggaccaagctgggcagcgagcctgtggtgatcaccatcaacaccatggagtgcatcctgaagctgaaggatggcatccaggatgaccacgagagctgtggcagcaacagcaccaacagaagcacagctgagagcaccaagagcagcatcaagcccaggaggatgcagcaggccgcccccacagatcctgacctgcccccaggctacgtgcagagcctcatcagaagagtggtgaacaacgtgaacatcgtcatcaacaacctgatcctgaagtatgtggaggatgacatcgtgctgtctgtgaacatcaccagcgctgagtgctacacagtgggggagctgtgggaccgggccttcatggacatcagcgccacagacctggtgctgaggaaggtgatcaacttcagtgactgcaccgtgtgcctggacaagagaaatgccagcggcaagattgagttctaccaggaccccctgctgtacaagtgcagcttccgcacccggctgcacttcacctatgagaacctgaacagcaagatgcccagcgtcatcaagatccacaccctggtggagagcctgaagctgagcatcacagaccagcagctgcccatgttcatccgcatcatgcagctgggcatcgccctgtactacggggagatcggcaacttcaaggagggggagattgaggacctgacctgccacaacaaggacatgctgggcaacatcaccggctctgaagatgagaccagaattgacatgcagtacccagcccagcacaagggccaggagctgtacagccagcaggatgaggagcagccccagggctgggtgtcctgggcctggagctttgtgcctgccatcgtgtcctatgatgatggagaggaggactttgtgggcaatgaccctgccagcaccatgcaccagcagaaggcccagaccctgaaggaccccatcgtgtccatcggcttctactgcaccaaggccaccgtgaccttcaaggtgggcctcttcagctgctgcctgtacctgtaccagctgtag

SEQ ID NO: 255316 - DNA, 1248 bp, Artificial Sequence
  derived and/or modified sequence
atgctggagagctacgtgacccccatcctgatgagctacgtgaaccgctatataaagaatctcaagccctctgacctccagctgtccttatggggcggggacgtcgtgctctccaagctggagctcaagctggacgttctcgagcaggagttgaagctcccatttacatttttgtccgggcatatccacgagctgcgaattcacgtgccttggacaaagctaggctcagaacccgtcgtcataacaatcaacaccatggaatgcatcctcaagttaaaggacggaattcaagatgaccatgaatcttgtggttcgaactctacgaacagatcaactgcagaaagtaccaaatccagtattaaaccaaggaggatgcaacaggctgcgcccaccgatcccgacctgcctccagggtacgtgcagagtctaatcaggcgtgtggttaataatgtcaacattgttatcaataatctgatattaaagtatgtggaggatgatatcgtgctctctgtgaacattacctctgccgagtgctacacagtcggcgagctctgggaccgagctttcatggatatttctgccacggacctggtgcttcgcaaggtgattaacttttcggactgtacagtgtgtcttgataagcgtaatgcttctggcaagattgaattttatcaggaccccctgctgtataagtgctcatttaggacacgtcttcactttacatatgaaaacctgaattccaaaatgcctagcgtgattaagatccatacacttgttgaatctttaaaattatcaataacagaccagcagttgcccatgttcattcggattatgcagctcgggattgctctttattacggagagatcgggaactttaaggagggggaaatagaggaccttacttgtcacaataaggatatgttagggaatattactggctcagaggatgagaccagaattgatatgcagtacccggcccaacacaagggccaggaactctattctcaacaagatgaggaacagccccagggctgggtatcctgggcgtggtcctttgtccctgccatcgtgtcatacgatgacggagaggaggacttcgttggcaacgatcccgcaagcaccatgcatcaacaaaaagcccagactctgaaagaccctatcgtgtcaataggattttactgcactaaggctaccgttacctttaaagtcggccttttcagctgttgtctgtacttgtaccagctgtag

SEQ ID NO: 255317 - DNA, 1248 bp, Artificial Sequence
  derived and/or modified sequence
atgctggaatcctatgtcactccaattctgatgtcttatgtaaatcggtatatcaagaacctcaagccatcggatttacagctctctctttgggggggagacgtggtccttagtaagctggagctgaagctggatgtgctcgaacaggagttaaagctccccttcacattcctgtccgggcacattcatgagctccgcattcatgtgccctggacaaagctggggtctgagcctgtggttattacaatcaacacaatggaatgcatcttaaaactaaaagacggaatccaggatgatcacgagtcctgtggttccaacagcactaaccggtctacagcagaaagcacaaagtcgagtatcaaaccgaggaggatgcagcaggccgcacctacggaccccgatctgccaccaggatacgtgcaatcactcattaggagagtcgtgaacaacgttaacatcgtgatcaacaacttgattcttaagtatgtggaggatgacatcgttctgagtgtgaatattacctccgccgaatgctacaccgtgggggagctctgggatcgcgcttttatggatatctcagccaccgacctagttctacgaaaggttattaacttttccgattgcacggtgtgcctggataaaagaaacgcaagtgggaaaattgaattttatcaggacccgctactgtacaaatgcagttttaggacacgattgcactttacctacgagaatctgaactccaaaatgccatctgtgataaaaattcacaccctggtggagtcactgaaattgtctatcaccgaccagcaacttcccatgttcattcggattatgcagctcggtatagcgctctactatggcgagatcgggaactttaaggagggtgaaatcgaggatctgacctgccacaataaggacatgttagggaatattactggctcagaggatgagacaaggatcgatatgcagtatccagcacaacacaaaggccaggaattgtatagtcagcaagacgaagagcagcctcaggggtgggtcagctgggcctggagttttgtccccgctattgtaagctacgatgatggcgaggaggatttcgtaggtaatgacccagcttctaccatgcaccagcaaaaggctcagacactgaaagatcccattgtgagtattggcttttactgcacaaaagcgaccgtgacattcaaggtgggcttgttctcttgctgtctctatctgtatcagctgtag

SEQ ID NO: 255318 - DNA, 1626 bp, Artificial Sequence
  derived and/or modified sequence
acaggagcagcactgccggcgggggcgggtgccagggacttggaggtggaggggacgcggcggtactctggcgtcttccgacttcgactccttaccttaaaagatgctggagtcatatgtaactccaattttaatgagctatgtgaatcgctacatcaagaacttaaagccgtcggatctacagctttcactatggggtggagacgtggtactcagcaagctcgagttaaagttggatgtgctggaacaggaactgaaattaccattcacttttttaagtggacatattcatgaattgaggattcatgtaccatggacaaaactgggttcagaaccagtggtaattaccatcaatactatggaatgcattttgaaacttaaggatgggatacaggatgaccatgaaagctgtggttctaattctaccaaccgtagtactgctgagagcacaaaatcatcaatcaaaccgcggagaatgcagcaggctgctcctacagatcctgacttaccaccaggttatgtgcagagtctgattagacgagttgtaaataatgtaaacattgtgataaataatctcatactaaaatatgttgaagatgatatcgtcctttccgtcaatatcacttctgcagaatgttatacagtaggtgaattatgggatcgtgcattcatggatatttctgcaactgatttggtgctgagaaaggttatcaatttttctgactgtacagtttgtcttgataaacggaatgccagtggtaaaatagaattttaccaggatcctttattatacaaatgttccttcagaactcgtcttcattttacatatgaaaacctaaattccaagatgccatctgttattaaaattcatactttagtggaaagtttgaaactttctatcacagatcaacaactgcctatgtttattcgtataatgcaacttggaattgctctttactatggagaaataggcaattttaaagaaggcgaaatagaggaccttacttgtcataataaagatatgctaggaaacattacaggttctgaagatgaaacaagaatagatatgcaatatcctgctcagcataaaggtcaagagttatattcacagcaagatgaggagcagccacagggatgggtgtcatgggcctggtcctttgtgcctgcaattgtgagttatgacgatggcgaggaagactttgttgggaacgatcctgcatcaaccatgcatcaacaaaaagcacagactttgaaggatcctattgtttctataggattttattgcacaaaggcaacggtgactttcaaagtaggtcttttctcttgctgtttatatctctatcaactttaatgcttaaatttggattgttagtacaattctagctttattcaagtttgctttgcattcagtagatgtgagatagagtctaacagttcttacttcataaaattacatggctcctccacttgaaatctttgaattctgatcccttcctgtcttcttagggcattctccacatttcttttttattagcttcatggatagttttttgccctattgaatcattcagttggtgtacaaacatgccttaatattgtcattaaaaaagaaaggaacagcaaaaa

SEQ ID NO: 255319 - protein, 510 aa, Artificial Sequence
  derived and/or modified sequence
MMWQCHLSAQDYRYYPVDGYSLLKRFPLHPLTGPRCPVQTVGQWLESIGLPQYENHLMANGFDNVQFMGSNVMEDQDLLEIGILNSGHRQRILQAIQLLPKMRPIGHDGYHPTSVAEWLDSIELGDYTKAFLINGYTSMDLLKKIWEVELINVLKINLIGHRKRILASLGDRLHDDPPQKPPRSITLREPSGNHTPPQLSPSLSQSTYTTGGSLDVPHIIMQGDARRRRNENYFDDIPRSKLERQMAQSSVCEIWTNQNAGFPFSAIHQVHNTGDWGEPSITLRPPNEATASTPVQYWQHHPEKLIFQSCDYKAFYLGSMLIKELRGTESTQDACAKMRANCQKSTEQMKKVPTIILSVSYKGVKFIDATNKNIIAEHEIRNISCAAQDPEDLSTFAYITKDLKSNHHYCHVFTAFDVNLAYEIILTLGQAFEVAYQLALQARKGGHSSTLPESFENKPSKPIPKPRVSIRKSVQIDPSEQKTLANLPWIVEPGQEAKRGINTKYETTIF

SEQ ID NO: 255320 - DNA, 1533 bp, Artificial Sequence
  derived and/or modified sequence
atgatgtggcaatgccatttatccgctcaggactaccgttattatcctgtggatggctatagcctgctgaaaagatttcccctgcacccgctcactggaccacggtgtcccgtccagaccgtgggccagtggctcgaatccattggcctgcctcaatacgaaaaccatctgatggccaatggttttgacaacgtacagtttatggggtctaacgtaatggaagaccaggatcttctcgagatcggtattctcaattccggacataggcagcggattttacaggcaatccagctcctgcctaaaatgcgcccaattgggcacgatggctaccatcctacctctgtggctgagtggctcgacagtatagaactcggagattacacaaaagccttcctgatcaatggatacacctccatggacctactcaaaaagatttgggaggtggaacttataaacgttctgaagattaatctcattggtcaccgaaaacgaattttggcttctctcggggaccgactccacgatgaccctccccagaaacctccccggagcatcacactgcgtgagccgagtggaaaccatacccccccccagcttagcccgagtctatcacagagcacttataccactgggggctccctggacgtgccccatattattatgcagggcgacgccaggagacgcagaaacgaaaactacttcgacgatattccacgctcaaagctggaacgacagatggcacagtcctccgtgtgtgagatttggactaaccagaatgctgggttcccgttctccgcaatccaccaggtgcacaatacaggcgactggggggagccttcgataactttgcgtcctcctaacgaggcgactgcctctacgcctgtgcagtattggcagcatcaccccgagaaattgatctttcagagttgcgactacaaggcattttatctcggaagcatgctcattaaggagctgaggggaactgagagcactcaggacgcctgcgctaaaatgcgcgccaactgtcaaaagagcaccgagcagatgaaaaaggtgccaacaataattctttctgtgagctataagggagtcaagtttatagacgctacaaataagaacatcatcgccgagcatgaaatcaggaacatctcttgcgctgcacaggacccagaagatctatccacattcgcgtatatcactaaagatcttaagtcgaatcaccattactgccacgttttcactgcattcgacgtgaatctggcctatgagattatcctcaccctcggccaggctttcgaagtcgcctaccagcttgcactgcaggctcgaaaaggaggccactcctccaccctgccagaatctttcgagaacaagccaagtaagccaattccgaagcctcgcgtgagcattcggaagagtgttcagattgacccaagcgagcagaagactctggcaaaccttccgtggatcgtagagcccggccaggaggcgaagcgcggtatcaacacaaaatatgagacgaccattttctag

SEQ ID NO: 255321 - DNA, 1533 bp, Artificial Sequence
  derived and/or modified sequence
atgatgtggcagtgccacctgagcgcccaggactaccgctactaccctgtggatggctacagcctgctgaagcgcttccccctgcaccccctgaccggcccccgctgccctgtgcagacagtgggccagtggctggagagcatcggcctgccccagtatgagaaccacctgatggccaacggctttgacaacgtgcagttcatgggcagcaatgtgatggaggaccaggacctgctggagatcggcatcctgaacagcggccaccggcagaggatcctgcaggccatccagctgctgcccaagatgaggcccatcggccatgatggctaccaccccacctctgtggccgagtggctggacagcattgagctgggggactacaccaaggccttcctgatcaatggctacacctccatggacctgctgaagaagatctgggaggtggagctgatcaacgtgctgaagatcaacctgattggccacaggaagaggatcctggccagcctgggggaccggctgcatgatgatcctccccagaagcccccaagaagcatcaccctgcgggagcccagcggcaaccacaccccaccccagctgagccccagcctgagccagagcacctacaccaccggcggcagcctggatgtgccccacatcatcatgcagggagatgccaggagaagaagaaatgaaaactactttgatgacatccccaggagcaagctggagcggcagatggcccagagctctgtgtgtgagatctggaccaaccagaatgccggcttccccttcagcgccatccaccaggtgcacaacacaggagactggggcgagcccagcatcaccctgcggcccccaaatgaggccacagccagcacccctgtgcagtactggcagcaccaccctgagaagctgatcttccagagctgtgactacaaggccttctacctgggctccatgctgatcaaggagctgcggggcacagagagcacccaggatgcctgtgccaagatgagggccaactgccagaagagcacagagcagatgaagaaggtgcccaccatcatcctgtctgtgtcctacaagggcgtgaagttcattgatgccaccaacaagaacatcatcgccgagcacgagatccggaacatcagctgtgccgcccaggaccctgaggacctgagcacctttgcctacatcaccaaggacctgaagagcaaccaccactactgccacgtgttcaccgcctttgatgtgaacctggcctatgagatcatcctgaccctgggccaggcctttgaggtggcctaccagctggccctgcaggccaggaagggcggccacagcagcaccctgcctgagagctttgagaacaagcccagcaagcccatccccaagccccgggtgtccatcaggaagtctgtgcagattgaccccagcgagcagaagaccctggccaacctgccctggatcgtggagcccggccaggaggccaagaggggcatcaacaccaagtatgagaccaccatcttctag

SEQ ID NO: 255322 - DNA, 1533 bp, Artificial Sequence
  derived and/or modified sequence
atgatgtggcagtgccacctgagcgcccaggactaccggtactacccagtcgacggttacagcttactgaagcgatttccgcttcatccactgacaggaccacgatgccccgtccaaaccgtaggacagtggctagagagcattggcttaccacaatatgagaatcatctgatggctaatggctttgacaacgttcaattcatggggagcaacgtcatggaggaccaggacctgctcgaaattgggattctcaacagcggtcacaggcaaagaattctgcaagcaatacagcttctgcccaagatgaggccaatcggccatgatggctaccacccgacatccgtggccgagtggttagattctatcgagttaggcgactacaccaaagctttcctgattaacggctacacatctatggatctactcaaaaagatatgggaggtcgagctcataaacgtgctcaagatcaacttgatcggccacaggaagcgcatcctggcatccctgggagacaggctgcatgatgatcccccgcagaagccgccaagatcaattactctgagggaaccctccggtaaccacacaccccctcagttaagtccatccctgtctcaatccacctacactacaggcggctctttggacgtgccccacattatcatgcagggagatgcccgccgtcgtcgaaacgaaaactacttcgatgatatcccacggagtaaactcgaaagacagatggctcagtccagtgtctgcgagatctggacaaaccaaaacgccgggttccccttttccgcgatccatcaggtccataacactggcgattggggtgaaccaagcatcactctcagacctccaaatgaggcgacggccagcacaccagtgcaatattggcagcatcatccagaaaaactcatcttccaatcatgcgattacaaagccttttacctggggtcgatgctcatcaaggaactgagaggcactgagagtacacaggatgcgtgtgctaagatgcgtgcgaattgtcagaagagcactgagcagatgaaaaaggtgccaaccataatcctctccgtctcatacaaaggggttaagttcatcgacgccactaataaaaacatcatcgctgagcatgagattaggaatatttcatgtgcagcccaggatcctgaggacctcagcacttttgcatatatcactaaagacctcaaatccaaccaccactattgtcatgtgttcaccgcttttgatgtgaatctggcctacgaaattattctaacgctcgggcaagctttcgaggtggcataccagctggccttgcaggcacgtaaaggtggacattcttccaccctgccggagtcattcgaaaataaaccaagcaagcctatccccaaaccccgcgtgtccattagaaaaagtgtgcagattgacccaagtgaacagaagacactcgccaatctcccttggatagtggagcccggccaggaagccaagagaggaattaatactaaatacgagactaccatcttttag

SEQ ID NO: 255323 - DNA, 3328 bp, Artificial Sequence
  derived and/or modified sequence
attgctcattgtggagtactccaacaatcacatagaacgcagaccagcccaagctgacagcttgatatgccttcttctgctgcctggttttgggggctgtatgacgtactggtcggtagtaaagattaatatgtaagaaatgtggagctaggatcaagtcatactccacagcctgcctggcaaactatgttttacttctgactttgctctctcgctgagaacattaatctgtcaagctggcgggctcctttgatagcaactttcccaggggcatgatgtggcaatgccacctctcagcccaggactaccgctattaccccgtggacggctactccctgcttaaacgcttccctcttcatcctcttacaggacccagatgccctgtccaaacagtgggacaatggttggaaagcattgggctacctcagtacgagaaccacctgatggctaatggatttgacaatgtgcagtttatgggaagcaatgttatggaagatcaggatttgttggaaattggaatccttaattctgggcacagacaaagaattctacaggcaatccagctccttccaaagatgagacccattgggcatgatggctaccatcccacctctgtagctgagtggctggattccattgaactgggcgactacaccaaagcctttctaattaatggctacacttcgatggacctgttgaaaaaaatctgggaggttgaacttattaatgttttaaaaatcaatttgattggccacaggaaacgtattttggcatctctgggagacaggctgcacgacgatcccccacagaagccccctcggtccatcaccctcagggaacccagtggtaatcacactcctcctcagttgtctccatcacttagccaaagcacttacaccactggtggctccctagacgttcctcacattatcatgcagggcgatgcaaggaggagaagaaatgaaaactactttgatgatattccccgatcaaaactggagaggcagatggctcagtcgtctgtctgtgaaatatggacgaatcagaacgcaggatttcctttctcagcgatccatcaggttcataatacaggagactggggagaaccttccattaccttgcgacctccgaatgaagccacagcctctaccccggtacagtactggcagcatcacccagaaaagcttatcttccagtcgtgtgattacaaagctttttatttaggttctatgctgataaaagagcttagggggacagaatcaacccaagatgcttgtgcaaaaatgcgggctaactgtcagaagtctacagagcaaatgaagaaggtccctactattattctttctgtctcatataaaggagtcaaatttattgatgcaacaaataagaacataattgctgagcatgaaattcgtaatatctcctgtgctgcccaggacccagaagacctctcaacatttgcctatatcacaaaagatttgaagtctaatcaccactactgtcatgtgtttactgcctttgatgtgaatttagcctatgaaatcatcctaaccctgggacaggcattcgaagtcgcttaccagctagcactacaagcaagaaaagggggacactcctccacacttccagaaagctttgaaaacaaaccctccaaacccatccccaagccccgcgttagcattcgcaagtccgtgcagatcgacccatctgagcaaaagactctggccaatctaccgtggattgtggagccgggccaagaagccaagaggggcattaataccaagtatgaaaccacgattttctgatactcgccgtcctcctgtcctcgcggtgccttgctcgccaagcggtcccggagcaggctttccttcgcgcctccgcgtccacccagcccaggaggaagactgctctgagcgtgcggccttgttacgggcgaaaggccactggccattcctggggaagttctttctgcaccagtgatggaaaacgcaagactttccagtcgcaacccctgagaggcgtgagttgagatgggttttccctgatgctcccgactcccctccccaccacctcccaaggtatttctgatgactccgccccagtacttgctttgcttcatttggggaaaataataccttttctttaaaaaaaaaaaaaaaaaaaaaaaagtaaaggggatctctaatactgcctaaaagtatgctttcactgtcagcagttttaaaggtgaaatcagagcagcactacccctcccacctccaaagcatctgtaaaatcattctatcattgagtatcgtttaatgcaaaaggacaaaaacaactcccgtgatatgattgccaggagattctgtttccccatttctatatttgtggattttatatgtaatcacctatgtcagagaaagaaaacctttcaaccaaatgattggttcaaaaggaaagaatgattcaaagcagaggaatttattatgcacagcaaaatgtgtcttgtattaaatatttttattaaaagaatgtttcattaatgcattgataagaaaactaggttagttgcgagggatgtttctggtttcatttcaaataattaaatttctactgctactaccaagaggactggctcagtggtggcaaaatactggtgatgctccctagagcaggaggcccggaagtgctgacgcagccatcagcctgccaagattgttttttaatcttcacagtgttttaaagaacatgttaaaaaaaaaaaaatctagtgctcctgctgtcaagatttctgtcatggaaaccttgtttgagaaaggtgttaataaaattctattgcaaaaatttctttttctagaaaaaataaatacaaaaaaaaaaaagaagaaattccaaagtaataaaacttttcttgagacaaacaaaaaaaaagtttgcttactatttgattaaataaaatttacttacatttctttaaggtattttaattttttaatgtctctgtggagtatttgtatgataccataatgtatatttatgtagaatcaaattatataaacagtaccaatatcattatagaaaaaaataacattttaatgtatattgttctaacaatcatattgtgaatcattttgaagttcattatagcgatattgataaattgtggaattgtcttaatgtttttttattaactgacattattttaaacctaactgagatgatcagttacattcatcagttggtgagttttgaagaataactacattttatttcaaactaacaaatgtatacggttttagttcagtgttgaagaattttaatacaatattaaattacttgaactgaa

SEQ ID NO: 255324 - DNA, 1533 bp, Artificial Sequence
  derived and/or modified sequence
atgatgtggcagtgtcacctgagcgcacaagattatcgctactatcctgttgacggatattcattgctaaagcgctttccactgcacccactgaccggaccaaggtgccctgtgcagactgtgggacagtggctagaatcaattgggctaccccaatatgaaaatcatctgatggccaatggcttcgataacgtccagtttatgggatcaaatgtcatggaagatcaggaccttcttgagattggaattctaaactccgggcaccggcagaggattctgcaagctatccaactcctcccgaaaatgagaccaatcggacacgatggctatcacccaacatccgtagcagagtggctcgatagtatagagttaggcgactatacaaaggctttcctgatcaacgggtatacaagcatggatctgttaaaaaagatctgggaggtcgagttgattaacgtgctaaaaattaatttaatcggccaccgaaaaaggatacttgctagtcttggcgatagactgcatgatgatcctccacaaaaacccccaagatccatcactctaagagaaccgtcaggcaatcacacacctccccaactcagcccatcgttgagccagagtacatatactactggtggatccctggacgtcccccatattattatgcagggagacgctcgcaggcggcgtaacgaaaattattttgacgatataccacggagcaagctagagcgccagatggcccagtcgtccgtgtgtgagatatggactaatcagaatgcgggtttcccattcagcgccatccatcaggtgcacaacacaggcgattggggcgaacccagcattaccctcagaccaccgaatgaagcgactgcgtcgactcccgtccagtactggcaacatcaccccgaaaaactaatttttcaatcctgtgattataaggccttctatctagggtccatgctcataaaggagctcagaggcacagaaagtacgcaggacgcgtgtgccaagatgcgcgcaaattgtcagaagtccactgagcagatgaagaaggtgcccacaatcattctttcagtgagttataagggtgtgaaattcattgacgcaaccaataagaatatcatcgcagaacatgagatccggaatatatcgtgcgccgcacaggaccctgaagacctgtctaccttcgcttacattactaaagacctcaaaagtaatcatcattactgccatgtgttcaccgcctttgatgtcaatcttgcctatgagattattttgacactcggtcaggcgttcgaagttgcttaccagctggcccttcaggccagaaagggagggcattcatcaaccctgccagaatcttttgaaaataaaccatcgaagcctatccctaaaccacgcgtttccatacgcaaaagcgtgcaaatcgacccgtccgaacagaagacactggccaaccttccctggatcgtggagcctggccaggaagcaaagcggggaatcaacacgaaatacgagactactatcttttag

SEQ ID NO: 255325 - DNA, 1533 bp, Artificial Sequence
  derived and/or modified sequence
atgatgtggcagtgccacctgagcgcccaggactacagatactaccccgtggacggctacagcctgctgaagagattccccctgcaccccctgaccggccccagatgccccgtgcagaccgtgggccagtggctggagagcatcggcctgccccagtacgagaaccacctgatggccaacggcttcgacaacgtgcagttcatgggcagcaacgtgatggaggaccaggacctgctggagatcggcatcctgaacagcggccacagacagagaatcctgcaggccatccagctgctgcccaagatgagacccatcggccacgacggctaccaccccaccagcgtggccgagtggctggacagcatcgagctgggcgactacaccaaggccttcctgatcaacggctacaccagcatggacctgctgaagaagatctgggaggtggagctgatcaacgtgctgaagatcaacctgatcggccacagaaagagaatcctggccagcctgggcgacagactgcacgacgaccccccccagaagccccccagaagcatcaccctgagagagcccagcggcaaccacacccccccccagctgagccccagcctgagccagagcacctacaccaccggcggcagcctggacgtgccccacatcatcatgcagggcgacgccagaagaagaagaaacgagaactacttcgacgacatccccagaagcaagctggagagacagatggcccagagcagcgtgtgcgagatctggaccaaccagaacgccggcttccccttcagcgccatccaccaggtgcacaacaccggcgactggggcgagcccagcatcaccctgagaccccccaacgaggccaccgccagcacccccgtgcagtactggcagcaccaccccgagaagctgatcttccagagctgcgactacaaggccttctacctgggcagcatgctgatcaaggagctgagaggcaccgagagcacccaggacgcctgcgccaagatgagagccaactgccagaagagcaccgagcagatgaagaaggtgcccaccatcatcctgagcgtgagctacaagggcgtgaagttcatcgacgccaccaacaagaacatcatcgccgagcacgagatcagaaacatcagctgcgccgcccaggaccccgaggacctgagcaccttcgcctacatcaccaaggacctgaagagcaaccaccactactgccacgtgttcaccgccttcgacgtgaacctggcctacgagatcatcctgaccctgggccaggccttcgaggtggcctaccagctggccctgcaggccagaaagggcggccacagcagcaccctgcccgagagcttcgagaacaagcccagcaagcccatccccaagcccagagtgagcatcagaaagagcgtgcagatcgaccccagcgagcagaagaccctggccaacctgccctggatcgtggagcccggccaggaggccaagagaggcatcaacaccaagtacgagaccaccatcttctag

SEQ ID NO: 255326 - protein, 1046 aa, Artificial Sequence
  derived and/or modified sequence
MASSVGNVADSTEPTKRMLSFQGLAELAHREYQAGDFEAAERHCMQLWRQEPDNTGVLLLLSSIHFQCRRLDRSAHFSTLAIKQNPLLAEAYSNLGNVYKERGQLQEAIEHYRHALRLKPDFIDGYINLAAALVAAGDMEGAVQAYVSALQYNPDLYCVRSDLGNLLKALGRLEEAKACYLKAIETQPNFAVAWSNLGCVFNAQGEIWLAIHHFEKAVTLDPNFLDAYINLGNVLKEARIFDRAVAAYLRALSLSPNHAVVHGNLACVYYEQGLIDLAIDTYRRAIELQPHFPDAYCNLANALKEKGSVAEAEDCYNTALRLCPTHADSLNNLANIKREQGNIEEAVRLYRKALEVFPEFAAAHSNLASVLQQQGKLQEALMHYKEAIRISPTFADAYSNMGNTLKEMQDVQGALQCYTRAIQINPAFADAHSNLASIHKDSGNIPEAIASYRTALKLKPDFPDAYCNLAHCLQIVCDWTDYDERMKKLVSIVADQLEKNRLPSVHPHHSMLYPLSHGFRKAIAERHGNLCLDKINVLHKPPYEHPKDLKLSDGRLRVGYVSSDFGNHPTSHLMQSIPGMHNPDKFEVFCYALSPDDGTNFRVKVMAEANHFIDLSQIPCNGKAADRIHQDGIHILVNMNGYTKGARNELFALRPAPIQAMWLGYPGTSGALFMDYIITDQETSPAEVAEQYSEKLAYMPHTFFIGDHANMFPHLKKKAVIDFKSNGHIYDNRIVLNGIDLKAFLDSLPDVKIVKMKCPDGGDNADSSNTALNMPVIPMNTIAEAVIEMINRGQIQITINGFSISNGLATTQINNKAATGEEVPRTIIVTTRSQYGLPEDAIVYCNFNQLYKIDPSTLQMWANILKRVPNSVLWLLRFPAVGEPNIQQYAQNMGLPQNRIIFSPVAPKEEHVRRGQLADVCLDTPLCNGHTTGMDVLWAGTPMVTMPGETLASRVAASQLTCLGCLELIAKNRQEYEDIAVKLGTDLEYLKKVRGKVWKQRISSPLFNTKQYTMELERLYLQMWEHYAAGNKPDHMIKPVEVTESA

SEQ ID NO: 255327 - DNA, 3141 bp, Artificial Sequence
  derived and/or modified sequence
atggccagtagtgtggggaatgtggcagatagcacagagccaacaaagcgcatgctctcatttcaggggttggcagagctggcccatcgcgaataccaggcaggcgacttcgaagctgctgaacgccattgcatgcaactctggcgtcaggagcccgacaataccggagtgctgctcttgctcagttccattcacttccagtgccgcagactggatcgttctgcccacttctctaccctggctatcaagcagaatccactcctggccgaggcctatagtaatctgggaaatgtgtacaaggaacgcggtcagcttcaggaggccatcgagcactacagacatgcgctgagactgaagccagacttcatcgacgggtacatcaatctggccgccgctcttgtagcagccggtgatatggaaggggcagtacaggcctatgtgagtgctctgcagtacaatcctgatctctattgcgtgcggtctgacttgggcaatttgcttaaggcactgggacgcctagaggaggccaaagcatgttatctcaaggctatcgagacccagccaaacttcgcagtggcttggtcaaacctggggtgtgtgtttaacgcccagggcgagatctggcttgcgatccatcactttgagaaagcggtgaccctcgatcctaattttctggacgcctatattaaccttggaaacgttctcaaagaggctcggattttcgatagggcagtggccgcctacctgcgggccctgtccctgagccccaatcatgccgtcgtgcacggaaatctggcttgcgtgtactacgaacagggactgatcgacctcgccatagacacctatagacgggcaattgaacttcagccgcacttccccgacgcctactgcaatctggccaacgctcttaaggaaaagggctcagtggctgaagctgaagattgctacaatactgcccttcgtttgtgccccacccacgcagacagtctgaacaatctggccaatataaaaagggagcaaggcaatatcgaggaggctgtacgcctgtaccgcaaagcactggaggtcttccccgaatttgctgcggcccacagcaatcttgcaagcgtgctgcaacagcaggggaagcttcaggaggctcttatgcactacaaggaggctataaggattagccccactttcgcagatgcatatagcaacatgggtaacacactgaaggaaatgcaggacgtgcagggtgcccttcagtgttacactagggcaatacagatcaaccccgcttttgccgacgctcactcaaacttggcatcaatccataaggatagcgggaatattcccgaggccattgcgagttatagaaccgccctgaagctcaaacctgacttcccagatgcatattgtaacctcgcgcattgcctgcagattgtctgtgattggaccgattacgacgaaaggatgaagaaactcgtcagcattgtggcagaccagctggagaagaacagattaccttccgttcatccccaccattccatgctgtaccctctctcccatggatttcgaaaggccatcgcagagaggcatgggaacctttgcctggacaagatcaacgtactgcacaaacccccatacgagcatcctaaggatctcaagctctcagacggtaggctcagggtcggttacgtatcgtctgattttggcaaccacccaacaagccacttaatgcagagcatcccgggtatgcacaaccctgacaagttcgaggtgttttgttatgcgctgtcacccgacgatggaacgaatttccgggtgaaggtcatggctgaggccaaccatttcatcgacctgtcacagattccctgtaacggtaaagccgcggacaggatacaccaggacggcatccatatcctcgtgaatatgaacggctataccaagggagcccggaacgagttatttgcactgaggcctgcgcccattcaagccatgtggttggggtaccccggcacatccggagccttatttatggactacattattacggaccaggagacctctcccgccgaagtagccgaacagtactctgagaagttagcatatatgcctcatacctttttcatcggagaccatgccaacatgttcccacacctgaagaagaaagccgttattgactttaagtccaacggccacatctatgataatcgtattgtcctgaacggcatcgacttgaaagctttcctggattcattgcctgatgtgaaaattgtgaagatgaaatgcccggatggaggagataatgccgacagctccaacaccgcactgaacatgccagttatccccatgaacacaatagccgaggccgtgatagaaatgatcaaccgtggccagatacaaatcactatcaacggtttctctatcagcaatggactggctaccacccagattaataacaaggccgccaccggagaggaggtgccacggaccattatcgtgacaacaagaagccagtacggtctgcctgaggacgccatagtctactgcaacttcaatcagctgtacaaaattgatccaagtaccctgcagatgtgggccaacatcttaaagcgcgtccctaactcagtcctttggttgctgcggttccccgccgtcggtgagcctaatatccagcaatatgcacagaatatgggtctgcctcagaatcgtatcatattttcacctgttgcccctaaagaggaacatgtgaggagaggtcaactggcagacgtctgcttggatacccctttgtgtaacggacatactaccgggatggatgtgctgtgggccgggacccccatggtgacaatgcctggggaaaccctggcaagccgagtggccgcatcccagctgacctgtctgggatgcttagaactgatcgccaaaaataggcaagagtacgaagacatcgcagtaaaattgggcacagacctagagtatttaaagaaagtccgtgggaaagtttggaaacagaggataagctccccactttttaatacaaagcagtacacaatggagctcgagagactctacctgcagatgtgggagcactacgccgctggaaataagcccgatcatatgattaagcccgtcgaggtgacagagtcagcgtag

SEQ ID NO: 255328 - DNA, 3141 bp, Artificial Sequence
  derived and/or modified sequence
atggccagctctgtgggcaatgtggccgacagcacagagcccaccaagaggatgctgtccttccagggcctggccgagctggcccaccgggagtaccaggccggggactttgaagctgctgagcggcactgcatgcagctgtggaggcaggagccagacaacacaggagtgctgctgctgctgagcagcatccacttccagtgccggcggctggacagaagtgcccacttcagcaccctggccatcaagcagaaccccctgctggccgaggcctacagcaacctgggcaatgtgtacaaggagcggggccagctgcaggaggccatcgagcactacagacatgccctgcggctgaagccagacttcattgatggctacatcaacctggccgccgccctggtggccgccggggacatggagggcgctgtgcaggcctacgtgtctgccctgcagtacaacccagacctgtactgtgtgcggagtgacctgggcaacctgctgaaggccctgggccgcctggaggaggccaaggcctgctacctgaaggccatcgagacccagcccaactttgctgtggcctggagcaacctgggctgtgtgttcaatgcccagggcgagatctggctggccatccaccactttgagaaggctgtgaccctggaccccaacttcctggatgcctacatcaacctgggcaatgtgctgaaggaggcccgcatctttgacagagctgtggccgcctacctgcgggccctgagcctgagccccaaccacgctgtggtgcacggcaacctggcctgtgtgtactatgagcagggcctgattgacctggccatcgacacctacagaagagccatcgagctgcagccccacttcccagatgcctactgcaacctggccaatgccctgaaggagaagggctctgtggccgaggccgaggactgctacaacacagccctgcggctgtgccccacccatgctgacagcctgaacaacctggccaacatcaagcgggagcagggcaacatcgaggaggccgtgcggctgtacaggaaggccctggaggtgtttcctgagtttgctgctgcccacagcaacctggcctctgtgctgcagcagcagggcaagctgcaggaggccctgatgcactacaaggaggccatccgcatcagccccacctttgctgatgcctacagcaacatgggcaacaccctgaaggagatgcaggatgtgcagggcgccctgcagtgctacacccgggccatccagatcaacccagcctttgctgatgcccacagcaacctggccagcatccacaaggacagcggcaacatccctgaggccatcgccagctacagaacagccctgaagctgaagccagacttcccagatgcctactgcaacctggcccactgcctgcagatcgtgtgtgactggacagattatgatgagaggatgaagaagctggtgtccatcgtggccgaccagctggagaagaaccggctgcccagcgtgcacccccaccacagcatgctgtaccccctgagccacggcttcaggaaggccatcgccgagagacatggcaacctgtgcctggacaagatcaacgtgctgcacaagccaccctatgagcaccccaaggacctgaagctgagtgatggccgcctgcgggtgggctacgtgtccagtgactttggaaaccaccccaccagccacctgatgcagagcatccctggcatgcacaacccagacaagtttgaggtgttctgctacgccctgagcccagatgatggcaccaacttccgggtgaaggtgatggccgaggccaaccacttcatcgacctgagccagatcccctgcaatggcaaggctgctgaccgcatccaccaggacggcatccacatcctggtgaacatgaatggctacaccaagggggccagaaatgagctgtttgccctgcggcctgcccccatccaggccatgtggctgggctacccaggcaccagcggggccctcttcatggactacatcatcacagaccaggagaccagccctgctgaggtggccgagcagtacagcgagaagctggcctacatgccccacaccttcttcatcggggaccacgccaacatgttcccccacctgaagaagaaggctgtgattgacttcaagagcaatggccacatctatgacaaccgcatcgtgctgaatggaattgacctgaaggccttcctggacagcctgcctgatgtgaagatcgtgaagatgaagtgcccagatggaggagacaatgctgacagcagcaacacagccctgaacatgcctgtgatccccatgaacaccatcgccgaggccgtgattgagatgatcaacagaggccagatccagatcaccatcaatggcttcagcatcagcaatggcctggccaccacccagatcaacaacaaggccgccactggagaggaggtgcccaggaccatcatcgtgaccaccaggagccagtatggcctgcctgaagatgccatcgtgtactgcaacttcaaccagctgtacaagattgaccccagcaccctgcagatgtgggccaacatcctgaagagggtgcccaacagcgtgctgtggctgctgcgcttccctgctgtgggggagcccaacatccagcagtatgcccagaacatgggcctgccccagaaccgcatcatcttcagccctgtggcccccaaggaggagcacgtgagaagaggccagctggctgatgtgtgcctggacacccccctgtgcaatggccacaccaccggcatggatgtgctgtgggccggcacccccatggtgaccatgcctggagagaccctggccagccgggtggccgccagccagctgacctgcctgggctgcctggagctgattgccaagaaccggcaggagtatgaagatattgctgtgaagctgggcacagacctggagtacctgaagaaggtgcggggcaaggtgtggaagcagaggatcagcagccccctcttcaacaccaagcagtacaccatggagctggagcggctgtacctgcagatgtgggagcactacgccgccggcaacaagccagaccacatgatcaagcctgtggaggtgacagaaagtgcctag

SEQ ID NO: 255329 - DNA, 3141 bp, Artificial Sequence
  derived and/or modified sequence
atggccagcagcgtgggcaacgtggccgacagcaccgagcccaccaagaggatgctgagttttcagggtctcgctgagctggcccatcgggagtaccaagctggtgatttcgaggcggcagaaagacattgtatgcaattgtggagacaggagccagataatacaggagtattgctactactgtcatctatccatttccaatgcaggcgcctcgatcgaagcgcgcactttagcacccttgcaataaaacagaacccactgcttgctgaggcgtacagcaatcttggaaatgtgtacaaggagcggggccagttacaggaagcgattgaacactatcggcatgctctccggctgaagccggacttcattgacggctacataaatttagctgccgccctcgtagcggctggagacatggaaggtgccgtgcaggcctatgtaagtgcattacagtacaacccagatctatactgcgtgcggtcagacttaggcaatcttcttaaagcccttggccgccttgaggaggcaaaggcttgttacctgaaggccatcgaaacccagccaaactttgcagttgcctggtcaaacttgggatgcgtgtttaacgcccaaggggaaatctggcttgccatccaccattttgagaaagccgtcactctggaccccaactttcttgacgcatatataaacctgggcaatgtgctgaaggaggcgcgcatttttgaccgagcagttgccgcctacttgcgagcgctatctctatcccctaatcacgctgtggtgcatggcaatttggcctgtgtttactacgagcaggggcttatcgatctggcgattgatacgtacagacgagccattgagctgcagccccattttcctgacgcctattgtaatctggcaaatgccctcaaagagaaaggctctgtcgcagaggcagaagattgctataataccgccctaagattgtgtcccacacacgccgactcactgaacaacctggccaacataaaaagagaacagggcaacatcgaagaggccgtccgcctctaccgaaaagccctggaggtttttcccgagtttgccgcagcacattccaaccttgcatcagtcctgcagcaacagggaaaacttcaggaagccctgatgcattataaagaagccattcggatctctcctaccttcgcagacgcttactcgaacatggggaacaccctgaaggaaatgcaggatgtccaaggggccctgcaatgttatacccgcgccattcagattaatcccgcttttgctgacgcacactctaacctggccagcatacacaaagattcaggtaacattcctgaagcaattgcctcctaccgcaccgccctgaaactcaagcccgactttcctgacgcatattgtaacctggcacactgtctgcagatcgtctgtgactggacagattacgatgagaggatgaagaaacttgtgtcaattgtcgccgaccagctggagaagaaccgactaccctccgttcacccgcaccacagcatgctctatccattgtcccacgggttcaggaaagctattgctgagagacacggcaatttgtgtctggataaaatcaacgtgctgcacaaacctccatacgagcaccctaaggacctcaagctgtccgacgggcggctgagggtgggttatgtctcatccgactttggaaatcacccaacatctcatctgatgcagagcattcccggaatgcataaccccgacaaatttgaagtgttttgttacgcactgagccccgatgacgggactaattttagggtaaaggttatggctgaagctaaccattttatcgatctctctcaaataccctgcaacggcaaagccgcagataggattcatcaggatgggatacacatccttgtaaacatgaacggctataccaagggagcacgcaacgaactgtttgcactgcgaccggctcctattcaggccatgtggctgggttaccccggaaccagcggagccctattcatggactacattattaccgaccaggaaacttctccagcggaggtggccgaacagtattcagagaaactggcatacatgccgcacactttcttcattggggatcatgctaatatgttcccgcatctgaagaaaaaagcggttattgacttcaaatccaatggccatatctacgataacagaattgtgctgaatggaattgacttgaaagcattcctcgacagtctccctgatgttaagatcgttaagatgaagtgtccagacggcggcgataatgccgattcttctaacacggcacttaacatgccggtaatcccgatgaacacaatagctgaagctgtgatagaaatgatcaataggggccagattcagattactattaacggcttttccatctccaacgggctggccacaacccagatcaataacaaagcagctaccggagaagaggtacctcgtacaataatcgtgaccactcggagccagtacggcctccccgaggatgcaattgtatactgcaatttcaatcaactgtataaaatagatccctcaaccttgcagatgtgggctaatatcctgaagcgtgtgcccaactccgtcctgtggttgttacggttccctgctgtgggggagcctaacattcagcagtacgcacagaacatggggctgccacagaacagaataatcttttctcccgtggctcctaaagaggagcacgttagaagaggacagttagcagacgtgtgtctggatacacctctgtgtaatgggcatacaactggcatggacgttctctgggctggcacgccaatggtaacaatgcctggggaaaccctggcgagtagagtggctgctagccagctaacgtgcctcggatgtctggagctgatcgccaaaaacagacaggaatacgaggatatcgccgtcaagctgggtacagatttggagtacttaaaaaaggttaggggcaaagtttggaaacaacgcatttcttccccgctgtttaacaccaagcagtacactatggagctcgaacgcctgtacttgcaaatgtgggagcattatgcagcaggtaacaagccagatcatatgattaagccagtggaagtaacagaatctgcttag

SEQ ID NO: 255330 - DNA, 5461 bp, Artificial Sequence
  derived and/or modified sequence
ggccgaggagccgtcgccgccatttcaagaccgtactaggtagatggtcaattagagttcccagggtttgaagcctgtaactgctgccgccgctcaagccctccagagcattgctacggctgctgcccttgtactactacctccaaatacgttcttgctggtagtggcggcagcaggaccaattacctcttttttgctctccctcgagaagctccagatggcgtcttccgtgggcaacgtggccgacagcacagaaccaacgaaacgtatgctttccttccaagggttagctgagttggcacatcgagaatatcaggcaggagattttgaggcagctgagagacactgcatgcagctctggagacaagagccagacaatactggtgtgcttttattactttcatctatacacttccagtgtcgaaggctggacagatctgctcactttagcactctggcaattaaacagaacccccttctggcagaagcttattcgaatttggggaatgtgtacaaggaaagagggcagttgcaggaggcaattgagcattatcgacatgcattgcgtctcaaacctgatttcatcgatggttatattaacctggcagccgccttggtagcagcgggtgacatggaaggggcagtacaagcttacgtctctgctcttcagtacaatcctgatttgtactgtgttcgcagtgacctggggaacctgctcaaagccctgggtcgcttggaagaagccaaggcatgttatttgaaagcaattgagacgcaaccgaactttgcagtagcttggagtaatcttggctgtgttttcaatgcacaaggggaaatttggcttgcaattcatcactttgaaaaggctgtcacccttgacccaaactttctggatgcttatatcaatttaggaaatgtcttgaaagaggcacgcatttttgacagagctgtggcagcttatcttcgtgccctaagtttgagtccaaatcacgcagtggtgcacggcaacctggcttgtgtatactatgagcaaggcctgatagatctggcaatagacacctacaggcgggctatcgaactacaaccacatttccctgatgcttactgcaacctagccaatgctctcaaagagaagggcagtgttgctgaagcagaagattgttataatacagctctccgtctgtgtcccacccatgcagactctctgaataacctagccaatatcaaacgagaacagggaaacattgaagaggcagttcgcttgtatcgtaaagcattagaagtcttcccagagtttgctgctgcccattcaaatttagcaagtgtactgcagcagcagggaaaactgcaggaagctctgatgcattataaggaggctattcgaatcagtcctacctttgctgatgcctactctaatatgggaaacactctaaaggagatgcaggatgttcagggagccttgcagtgttatacgcgtgccatccaaattaatcctgcatttgcagatgcacatagcaatctggcttccattcataaggattcagggaatattccagaagccatagcttcttaccgcacggctctgaaacttaagcctgattttcctgatgcttattgtaacttggctcattgcctgcagattgtctgtgattggacagactatgatgagcgaatgaagaagttggtcagtattgtggctgaccagttagagaagaataggttgccttctgtgcatcctcatcatagtatgctatatcctctttctcatggcttcaggaaggctattgctgagaggcacggcaacctgtgcttagataagattaatgttcttcataaaccaccatatgaacatccaaaagacttgaagctcagtgatggtcggctgcgtgtaggatatgtgagttccgactttgggaatcatcctacttctcaccttatgcagtctattccaggcatgcacaatcctgataaatttgaggtgttctgttatgccctgagcccagacgatggcacaaacttccgagtgaaggtgatggcagaagccaatcatttcattgatctttctcagattccatgcaatggaaaagcagctgatcgcatccatcaggatggaattcatatccttgtaaatatgaatggctatactaagggcgctcgaaatgagctttttgctctcaggccagctcctattcaggcaatgtggctgggataccctgggacgagtggtgcgcttttcatggattatattatcactgatcaggaaacttcgccagctgaagttgctgagcagtattccgagaaattggcttatatgccccacactttttttattggtgatcatgctaatatgttccctcacctgaagaaaaaagcagtcatcgattttaagtccaatgggcacatttatgacaatcggatagttctgaatggcatcgacctcaaagcatttcttgatagtctaccagatgtgaaaattgtcaagatgaagtgtcctgatggaggagacaatgcagatagcagtaacacagctcttaatatgcctgttattcctatgaatactattgcagaagcagttattgaaatgattaaccgaggacagattcaaataacaattaatggattcagtattagcaatggactggcaactactcagatcaacaataaggctgcaactggagaggaggttccccgtaccattattgtaaccacccgttctcagtacgggttaccagaagatgccatcgtatactgtaactttaatcagttgtataaaattgacccttctactttgcagatgtgggcaaacattctgaagcgtgttcccaatagtgtactctggctgttgcgttttccagcagtaggagaacctaatattcaacagtatgcacaaaacatgggcctgccccagaaccgtatcattttttcacctgttgctcctaaagaggaacacgtcaggagaggccagctggctgatgtctgcttggacactccactctgtaatgggcacaccacagggatggatgtcctctgggcagggacccccatggtgactatgccaggagagactcttgcttctcgagttgcagcatcccagctcacttgcttaggttgtcttgagcttattgctaaaaacagacaagaatatgaagacatagctgtgaagctgggaactgatctagaatacctgaagaaagttcgtggcaaagtctggaagcaaagaatatctagccctctgttcaacaccaaacaatacacaatggaactagagcggctctatctacagatgtgggagcattatgcagctggcaacaaacctgaccacatgattaagcctgttgaagtcactgagtcagcataaataaagactgcacaggagaattacccctatacctgagcctcaaccttctgggggaaagggaactagataacatacttcttacttgtctgtacagtaccttgttgcagatgggtgatatataatggtaatagaatagcacagccagacttgcttcctgcatggtagggagagacacaaaagatgggaaactgcttttccacaaggaatctccgtagaattttgcggcgaccagatggtgcataggtctggaaggtctgatctcccttggtcttccatgggatggttagtgtggaggggagatatagattgtccggccgctttgtgattccatggattgattcagtcttctggatttttttttctttatattttgggtactggagcttttaaaaatgtttggtttcaggtatttttattcatgtgaagtgtatatgattctcttgagataaggttttaagctaaaatgttactccctgttttagtttctgaactctgacagattgacagggactttgctggtgtagtctttttataggttttataaaccacttgagcctatatcagtcgttttagtgtctgacctaatatttggagctatcagtgctttgttgatttagatgatgactcaagattttttctggtccatttcccatttccttttcttccctgacccccataccctcacccttaaaattctcctgtaactcaactaacaaaatcaagcctgattcaaaacatcctagggtgttttaaacacaccatctggtgccaaatgaagatttttaggagtgattactaattatcaagggcacagttgtggtactgtcattgataataatatagtttttttttttttcctaattttgacctgtttcaccagtgttttacccttgactgccccttctatgctgcttccaaaagtgatagtgtgtgtaagatttttaccttcctttctaaagttttttttttttttttttaagtgagtcctgttcttcctatttctttcagcagaaatgaaatcccaggtaagtataagtattcaagtatttgatcagtaagtcacagttatctccagtgcattaaataaccttcatcaagaaataggttataggtaaaatctctgaaggatcatctatgtattcaagtaattattttttagataataactgtcttctggacttggtcttgaagtctgtacagattcagcctcagtagtagcgaactgcactgctgtttggtttggagtacaaattagacttatagtcctcctggaacttgagttattaaaatcataggaataaaattatgggatctcaacaaagggtcgagggtttgaggcttaaacaagccaacatatgaatatatgttttgtctcgctatactgcacttacgctatccagttgcaggtaattttttgtctgctagtagtgttctagattatgtctttccaaagcgctgaggctgtgcacctattctgtagttgcagctgatgcctgaatgtatcctagctgacaaattattgattaataagaacttgaatttctggaagattcttactgttaaccaaattttgagcaaggagtctcaaaggtaattctgaaccagaattacatgttaatgaacagtgtaccttttaacagtgtaaatcacggaatatccgtgaagggatttcttaatttattttttaccggttgattgaaatatcagttaaaggttgccagcatggttgcagataaactgatgtttgaaattcgctgaaatacttaatgtggaataggataatatacttccaatgccctcaaggctgtgaccttacagccattttacatagcacatcattcctcctatagggatgaactttttcctggcacgaaaagtagccgctctggttgaagctttgcttattgtaacaggcttttatttccaggtaatatgtcttggaagacttaattctgattagagatatagatattactggaaactaattgttttttttctattgtactctgctttatcaaagaagtaaaacatttaaatcgtactacagaaattaagatgttgtcttgcgatccttaataaatgaatgatttccctttaatacgg

SEQ ID NO: 255331 - DNA, 3141 bp, Artificial Sequence
  derived and/or modified sequence
atggccagcagcgttggtaatgtagccgattctacagagcctactaagagaatgttgagcttccagggattagccgaactggcgcaccgcgaatatcaagctggcgacttcgaggccgctgagcgccactgcatgcaactgtggaggcaggaacccgataatactggcgtcttactgctgctgtctagtattcatttccaatgccggcgacttgatagatcggcccacttttcaactcttgccattaaacagaatcctctgctggccgaggcttactcgaatttgggtaatgtttataaggagagaggacagctgcaagaggccatagaacattataggcacgccttaaggctgaagccagatttcatcgatgggtatattaatctggctgctgccctggtggcagcaggcgacatggagggcgctgttcaggcctatgtgagcgccctgcagtacaatcccgacctctattgtgtgcggtcagatctagggaatctcctgaaggccctgggcagattagaagaagccaaggcgtgctacttgaaagcaattgaaactcaacctaactttgccgtcgcttggtcaaacctggggtgtgtcttcaatgcacagggggagatctggctggcgatccaccattttgaaaaagcagtgactctagatcccaactttctggacgcttacatcaatctggggaacgtgctgaaagaggctaggatttttgatcgggctgtggctgcttatttgagagcgctgtctctgtcccctaatcatgctgttgttcatggtaacctcgcctgtgtttattatgaacaggggctaatagacctggccatcgatacgtatcgcagggctatcgagttgcaaccgcattttcccgatgcctactgcaacctggccaatgcactgaaggaaaagggctctgtcgcagaagcggaggattgctacaacacagcccttcggctttgcccaacccacgccgacagcttgaacaacttagctaatattaagagagaacagggaaatatagaggaggcagtacgcctgtacaggaaggccctggaagtgtttcctgagttcgctgcggctcattctaatctcgcgtccgtgctccagcagcagggaaagttacaggaggcccttatgcactataaagaggcgataagaatttcaccaacatttgcagatgcctactccaacatggggaatacccttaaggaaatgcaggacgttcagggggctctgcagtgctatactcgggctatacagattaatcctgcgttcgccgacgcacattctaaccttgcatctatacacaaagattcaggtaatattccagaggcgatcgcatcataccgaaccgctctcaagctcaagcctgactttcctgacgcttactgcaatctcgcacactgtctacagatcgtgtgtgattggacggactatgatgaacgtatgaagaagctggtgagcatcgtggccgatcaattagaaaaaaatcgactgcccagcgtgcatccacaccattccatgctgtatcccttgtcccacgggttccgtaaagcaatcgcagagcgtcacggcaatttgtgtctggataaaatcaatgtcctgcataaacccccatatgaacatccaaaggatctgaagctctctgatggcagacttagagtcggatacgtttcgagcgactttggcaaccatcccacttctcatctgatgcagtccatccccggtatgcataatcctgataagttcgaggttttttgctacgcgctgagtcctgatgacgggaccaacttccgtgtcaaggttatggcagaggccaatcacttcatcgatctgagtcaaatcccgtgcaacggtaaggctgctgaccggatccaccaggatggcatccacatcctcgtgaacatgaacggatacaccaagggagcacgaaacgaactctttgccctcagacctgcaccaatacaagctatgtggcttgggtacccagggacttcaggggctctgtttatggactatatcattactgatcaggaaacctctcccgcagaggtggctgagcaatactccgagaaactggcgtacatgcctcatactttttttattggcgaccatgcaaatatgtttccacatctcaagaagaaagccgtgatagacttcaagtccaatgggcacatctacgataatcgcattgttctcaacggaattgatctgaaggcattcttggactccctgcccgacgtcaaaattgtgaagatgaaatgccctgatggtggagacaacgccgattcgtctaacacggcgctgaatatgcctgtcatacccatgaacaccattgcagaggctgtcattgagatgatcaatcggggacagattcaaatcactatcaacggatttagcatctcaaacggcttagccacaacccagataaacaataaggccgctactggagaggaggttccacggacaatcatcgtgacaacgagatcacaatacggcctgccggaggacgccatcgtctattgtaactttaaccaactgtataagatcgaccccagcactctccagatgtgggccaatatcctgaagagggtgcctaattctgtcctgtggttactgcggtttcccgcagtgggcgagcccaatatccagcagtatgcgcagaacatgggattacctcaaaatcggattatttttagtcctgtcgccccaaaagaagaacacgttcgtcggggacagctggctgacgtgtgcttggacacgcctttgtgtaacggccacacgacaggcatggatgtgctgtgggccggaacacctatggtgacaatgcccggtgaaacgctcgccagcagggtagcggcatctcaactcacctgtctcgggtgtctggaactgatcgccaaaaacagacaggagtatgaagacatcgcagtaaaactgggtaccgacctcgaatacctcaagaaggtgcggggtaaggtgtggaagcaaaggattagtagccctctgttcaacactaagcagtatacaatggagctcgagcgattgtacctgcagatgtgggagcattacgccgcagggaataagcctgaccatatgataaaacccgtagaagtgacggagtctgcttag

SEQ ID NO: 255332 - DNA, 3141 bp, Artificial Sequence
  derived and/or modified sequence
atggccagcagcgtgggcaacgtggccgacagcaccgagcccaccaagagaatgctgagcttccagggcctggccgagctggcccacagagagtaccaggccggcgacttcgaggccgccgagagacactgcatgcagctgtggagacaggagcccgacaacaccggcgtgctgctgctgctgagcagcatccacttccagtgcagaagactggacagaagcgcccacttcagcaccctggccatcaagcagaaccccctgctggccgaggcctacagcaacctgggcaacgtgtacaaggagagaggccagctgcaggaggccatcgagcactacagacacgccctgagactgaagcccgacttcatcgacggctacatcaacctggccgccgccctggtggccgccggcgacatggagggcgccgtgcaggcctacgtgagcgccctgcagtacaaccccgacctgtactgcgtgagaagcgacctgggcaacctgctgaaggccctgggcagactggaggaggccaaggcctgctacctgaaggccatcgagacccagcccaacttcgccgtggcctggagcaacctgggctgcgtgttcaacgcccagggcgagatctggctggccatccaccacttcgagaaggccgtgaccctggaccccaacttcctggacgcctacatcaacctgggcaacgtgctgaaggaggccagaatcttcgacagagccgtggccgcctacctgagagccctgagcctgagccccaaccacgccgtggtgcacggcaacctggcctgcgtgtactacgagcagggcctgatcgacctggccatcgacacctacagaagagccatcgagctgcagccccacttccccgacgcctactgcaacctggccaacgccctgaaggagaagggcagcgtggccgaggccgaggactgctacaacaccgccctgagactgtgccccacccacgccgacagcctgaacaacctggccaacatcaagagagagcagggcaacatcgaggaggccgtgagactgtacagaaaggccctggaggtgttccccgagttcgccgccgcccacagcaacctggccagcgtgctgcagcagcagggcaagctgcaggaggccctgatgcactacaaggaggccatcagaatcagccccaccttcgccgacgcctacagcaacatgggcaacaccctgaaggagatgcaggacgtgcagggcgccctgcagtgctacaccagagccatccagatcaaccccgccttcgccgacgcccacagcaacctggccagcatccacaaggacagcggcaacatccccgaggccatcgccagctacagaaccgccctgaagctgaagcccgacttccccgacgcctactgcaacctggcccactgcctgcagatcgtgtgcgactggaccgactacgacgagagaatgaagaagctggtgagcatcgtggccgaccagctggagaagaacagactgcccagcgtgcacccccaccacagcatgctgtaccccctgagccacggcttcagaaaggccatcgccgagagacacggcaacctgtgcctggacaagatcaacgtgctgcacaagcccccctacgagcaccccaaggacctgaagctgagcgacggcagactgagagtgggctacgtgagcagcgacttcggcaaccaccccaccagccacctgatgcagagcatccccggcatgcacaaccccgacaagttcgaggtgttctgctacgccctgagccccgacgacggcaccaacttcagagtgaaggtgatggccgaggccaaccacttcatcgacctgagccagatcccctgcaacggcaaggccgccgacagaatccaccaggacggcatccacatcctggtgaacatgaacggctacaccaagggcgccagaaacgagctgttcgccctgagacccgcccccatccaggccatgtggctgggctaccccggcaccagcggcgccctgttcatggactacatcatcaccgaccaggagaccagccccgccgaggtggccgagcagtacagcgagaagctggcctacatgccccacaccttcttcatcggcgaccacgccaacatgttcccccacctgaagaagaaggccgtgatcgacttcaagagcaacggccacatctacgacaacagaatcgtgctgaacggcatcgacctgaaggccttcctggacagcctgcccgacgtgaagatcgtgaagatgaagtgccccgacggcggcgacaacgccgacagcagcaacaccgccctgaacatgcccgtgatccccatgaacaccatcgccgaggccgtgatcgagatgatcaacagaggccagatccagatcaccatcaacggcttcagcatcagcaacggcctggccaccacccagatcaacaacaaggccgccaccggcgaggaggtgcccagaaccatcatcgtgaccaccagaagccagtacggcctgcccgaggacgccatcgtgtactgcaacttcaaccagctgtacaagatcgaccccagcaccctgcagatgtgggccaacatcctgaagagagtgcccaacagcgtgctgtggctgctgagattccccgccgtgggcgagcccaacatccagcagtacgcccagaacatgggcctgccccagaacagaatcatcttcagccccgtggcccccaaggaggagcacgtgagaagaggccagctggccgacgtgtgcctggacacccccctgtgcaacggccacaccaccggcatggacgtgctgtgggccggcacccccatggtgaccatgcccggcgagaccctggccagcagagtggccgccagccagctgacctgcctgggctgcctggagctgatcgccaagaacagacaggagtacgaggacatcgccgtgaagctgggcaccgacctggagtacctgaagaaggtgagaggcaaggtgtggaagcagagaatcagcagccccctgttcaacaccaagcagtacaccatggagctggagagactgtacctgcagatgtgggagcactacgccgccggcaacaagcccgaccacatgatcaagcccgtggaggtgaccgagagcgcctag

SEQ ID NO: 255333 - protein, 1036 aa, Artificial Sequence
  derived and/or modified sequence
MASSVGNVADSTGLAELAHREYQAGDFEAAERHCMQLWRQEPDNTGVLLLLSSIHFQCRRLDRSAHFSTLAIKQNPLLAEAYSNLGNVYKERGQLQEAIEHYRHALRLKPDFIDGYINLAAALVAAGDMEGAVQAYVSALQYNPDLYCVRSDLGNLLKALGRLEEAKACYLKAIETQPNFAVAWSNLGCVFNAQGEIWLAIHHFEKAVTLDPNFLDAYINLGNVLKEARIFDRAVAAYLRALSLSPNHAVVHGNLACVYYEQGLIDLAIDTYRRAIELQPHFPDAYCNLANALKEKGSVAEAEDCYNTALRLCPTHADSLNNLANIKREQGNIEEAVRLYRKALEVFPEFAAAHSNLASVLQQQGKLQEALMHYKEAIRISPTFADAYSNMGNTLKEMQDVQGALQCYTRAIQINPAFADAHSNLASIHKDSGNIPEAIASYRTALKLKPDFPDAYCNLAHCLQIVCDWTDYDERMKKLVSIVADQLEKNRLPSVHPHHSMLYPLSHGFRKAIAERHGNLCLDKINVLHKPPYEHPKDLKLSDGRLRVGYVSSDFGNHPTSHLMQSIPGMHNPDKFEVFCYALSPDDGTNFRVKVMAEANHFIDLSQIPCNGKAADRIHQDGIHILVNMNGYTKGARNELFALRPAPIQAMWLGYPGTSGALFMDYIITDQETSPAEVAEQYSEKLAYMPHTFFIGDHANMFPHLKKKAVIDFKSNGHIYDNRIVLNGIDLKAFLDSLPDVKIVKMKCPDGGDNADSSNTALNMPVIPMNTIAEAVIEMINRGQIQITINGFSISNGLATTQINNKAATGEEVPRTIIVTTRSQYGLPEDAIVYCNFNQLYKIDPSTLQMWANILKRVPNSVLWLLRFPAVGEPNIQQYAQNMGLPQNRIIFSPVAPKEEHVRRGQLADVCLDTPLCNGHTTGMDVLWAGTPMVTMPGETLASRVAASQLTCLGCLELIAKNRQEYEDIAVKLGTDLEYLKKVRGKVWKQRISSPLFNTKQYTMELERLYLQMWEHYAAGNKPDHMIKPVEVTESA

SEQ ID NO: 255334 - DNA, 3111 bp, Artificial Sequence
  derived and/or modified sequence
atggcatccagtgtgggcaacgttgcagattcaactgggctggccgaattagcacaccgagaataccaggccggtgactttgaggctgcagagcggcactgcatgcagctatggaggcaagagcctgataatacaggtgtgctgctgctcctgagcagcatacacttccagtgcaggcgactagacagatcggctcacttcagcacgttagccattaaacagaaccctctgctggccgaggcctattctaatctaggaaatgtttataaagaacgtggacaacttcaagaggccatcgaacattacagacacgccctacgtttgaaaccagatttcattgacgggtatattaacctggcagcagccctcgttgccgctggagatatggaaggagcagttcaagcctatgtgagcgctctacagtacaatcccgacttatattgcgtcagatcagatctcggaaacttgctgaaagcacttggacggctagaagaagcaaaggcttgctaccttaaagccatcgagacccaacctaatttcgccgtggcttggtctaacctggggtgcgtgttcaacgcccagggggagatttggctggcaattcaccacttcgaaaaggccgtcaccctggacccaaattttttggacgcctatatcaatctaggaaatgtgcttaaggaggcaaggatctttgacagggccgtagcagcatatctgagggcactctctcttagtccgaatcacgccgttgttcacggcaaccttgcatgtgtatactacgagcaaggtctaattgatcttgcaatcgacacatacagacgtgctatagagcttcaacctcacttccctgatgcgtattgtaacttggccaacgctctgaaagagaaaggctccgtggccgaagccgaagattgttacaacacggcgctaagactttgccctacccacgcagacagtctcaataatttagccaacattaaacgagagcaaggcaatatagaagaggctgtacgactctaccggaaagcgctggaagtgttcccggagtttgccgcagcgcactccaatctcgcgagcgttcttcagcagcagggtaagcttcaggaggccctcatgcattataaggaggctatcaggataagcccaacgttcgcggatgcctattctaacatgggtaacacactgaaggagatgcaggatgtccagggagctttacaatgctatactagggctattcagattaaccctgcgtttgcggacgcgcactcaaacttggccagcatccacaaagatagtggtaacatccctgaagctatagctagctatcgtacggcgcttaagctcaaacccgatttcccagatgcctactgcaatctcgcccattgtcttcagatcgtttgcgattggacagattatgacgagaggatgaaaaaattagtgtctattgtggcagaccagctcgagaaaaataggctcccctcagtccatccccaccatagcatgctgtatcctctgagccatgggtttagaaaggcaatagctgagcggcacgggaacttgtgtctagacaaaatcaacgtcttgcataaacccccctacgaacatcctaaggatcttaagctctcagatggccgcctgagggtaggctatgtgtcctcggacttcggaaatcacccaacatcccacctcatgcagtcaatccccggcatgcacaacccagacaaattcgaggtgttttgttatgccctgtccccagacgatgggacaaacttcagagtgaaagtgatggcagaggctaaccattttatagacctaagtcagatcccctgcaacgggaaagccgcggatcggatccaccaggacggcatccacatcctcgtgaacatgaacgggtacacaaaaggggcacgcaacgagctctttgcactcaggcccgcccctattcaggcgatgtggctcggttatcctggaacctctggcgcactgttcatggactacattattaccgaccaagagacctcaccagcagaagtcgctgagcagtatagtgaaaagctcgcatatatgccccacactttcttcattggggatcatgctaatatgttccctcacctcaaaaaaaaggccgtcattgactttaagagtaatggacacatttatgacaacagaattgttttgaacggcattgatctgaaagcctttctggactctctccccgatgtgaagatcgtcaaaatgaaatgtccggatgggggggataatgctgattcttcaaatactgccctgaatatgccagtaataccgatgaacactatcgccgaagccgtgatagaaatgatcaacagggggcagatacagattactatcaatggattttctatctctaatggactcgccactacacagattaataacaaggctgcaaccggtgaggaagtgccaaggactatcatagttactactaggagtcagtacggtctccccgaagacgcgatcgtatattgcaattttaatcaactttacaagatcgatccttccactctgcagatgtgggcaaatatcttgaaaagggtgcccaacagtgtactgtggctgcttaggttcccagcagtgggcgaacccaatattcagcagtacgctcaaaacatgggtctaccccagaacaggattatcttctcccctgtggcccctaaggaggagcatgtgaggaggggacagctagccgacgtgtgcctcgacacaccgctgtgtaacggacatactaccgggatggacgttttgtgggccggcacccctatggtgactatgcctggggagactctcgcttcccgcgtggccgcttcccagcttacttgcctcggatgcctagagctaattgccaagaataggcaggagtacgaggacatcgcggttaaactcggcaccgatttggagtacttgaagaaggtgcgggggaaggtgtggaagcagcgtatatctagtcctcttttcaacacaaaacagtatacgatggagttggagaggctttacttgcagatgtgggagcattacgccgcaggtaacaaacctgaccacatgatcaaacccgtggaagtaaccgagagcgcttag

SEQ ID NO: 255335 - DNA, 3111 bp, Artificial Sequence
  derived and/or modified sequence
atggccagctctgtgggcaatgtggccgacagcacaggcctggccgagctggcccaccgggagtaccaggccggggactttgaagctgctgagcggcactgcatgcagctgtggaggcaggagccagacaacacaggagtgctgctgctgctgagcagcatccacttccagtgccggcggctggacagaagtgcccacttcagcaccctggccatcaagcagaaccccctgctggccgaggcctacagcaacctgggcaatgtgtacaaggagcggggccagctgcaggaggccatcgagcactacagacatgccctgcggctgaagccagacttcattgatggctacatcaacctggccgccgccctggtggccgccggggacatggagggcgctgtgcaggcctacgtgtctgccctgcagtacaacccagacctgtactgtgtgcggagtgacctgggcaacctgctgaaggccctgggccgcctggaggaggccaaggcctgctacctgaaggccatcgagacccagcccaactttgctgtggcctggagcaacctgggctgtgtgttcaatgcccagggcgagatctggctggccatccaccactttgagaaggctgtgaccctggaccccaacttcctggatgcctacatcaacctgggcaatgtgctgaaggaggcccgcatctttgacagagctgtggccgcctacctgcgggccctgagcctgagccccaaccacgctgtggtgcacggcaacctggcctgtgtgtactatgagcagggcctgattgacctggccatcgacacctacagaagagccatcgagctgcagccccacttcccagatgcctactgcaacctggccaatgccctgaaggagaagggctctgtggccgaggccgaggactgctacaacacagccctgcggctgtgccccacccatgctgacagcctgaacaacctggccaacatcaagcgggagcagggcaacatcgaggaggccgtgcggctgtacaggaaggccctggaggtgtttcctgagtttgctgctgcccacagcaacctggcctctgtgctgcagcagcagggcaagctgcaggaggccctgatgcactacaaggaggccatccgcatcagccccacctttgctgatgcctacagcaacatgggcaacaccctgaaggagatgcaggatgtgcagggcgccctgcagtgctacacccgggccatccagatcaacccagcctttgctgatgcccacagcaacctggccagcatccacaaggacagcggcaacatccctgaggccatcgccagctacagaacagccctgaagctgaagccagacttcccagatgcctactgcaacctggcccactgcctgcagatcgtgtgtgactggacagattatgatgagaggatgaagaagctggtgtccatcgtggccgaccagctggagaagaaccggctgcccagcgtgcacccccaccacagcatgctgtaccccctgagccacggcttcaggaaggccatcgccgagagacatggcaacctgtgcctggacaagatcaacgtgctgcacaagccaccctatgagcaccccaaggacctgaagctgagtgatggccgcctgcgggtgggctacgtgtccagtgactttggaaaccaccccaccagccacctgatgcagagcatccctggcatgcacaacccagacaagtttgaggtgttctgctacgccctgagcccagatgatggcaccaacttccgggtgaaggtgatggccgaggccaaccacttcatcgacctgagccagatcccctgcaatggcaaggctgctgaccgcatccaccaggacggcatccacatcctggtgaacatgaatggctacaccaagggggccagaaatgagctgtttgccctgcggcctgcccccatccaggccatgtggctgggctacccaggcaccagcggggccctcttcatggactacatcatcacagaccaggagaccagccctgctgaggtggccgagcagtacagcgagaagctggcctacatgccccacaccttcttcatcggggaccacgccaacatgttcccccacctgaagaagaaggctgtgattgacttcaagagcaatggccacatctatgacaaccgcatcgtgctgaatggaattgacctgaaggccttcctggacagcctgcctgatgtgaagatcgtgaagatgaagtgcccagatggaggagacaatgctgacagcagcaacacagccctgaacatgcctgtgatccccatgaacaccatcgccgaggccgtgattgagatgatcaacagaggccagatccagatcaccatcaatggcttcagcatcagcaatggcctggccaccacccagatcaacaacaaggccgccactggagaggaggtgcccaggaccatcatcgtgaccaccaggagccagtatggcctgcctgaagatgccatcgtgtactgcaacttcaaccagctgtacaagattgaccccagcaccctgcagatgtgggccaacatcctgaagagggtgcccaacagcgtgctgtggctgctgcgcttccctgctgtgggggagcccaacatccagcagtatgcccagaacatgggcctgccccagaaccgcatcatcttcagccctgtggcccccaaggaggagcacgtgagaagaggccagctggctgatgtgtgcctggacacccccctgtgcaatggccacaccaccggcatggatgtgctgtgggccggcacccccatggtgaccatgcctggagagaccctggccagccgggtggccgccagccagctgacctgcctgggctgcctggagctgattgccaagaaccggcaggagtatgaagatattgctgtgaagctgggcacagacctggagtacctgaagaaggtgcggggcaaggtgtggaagcagaggatcagcagccccctcttcaacaccaagcagtacaccatggagctggagcggctgtacctgcagatgtgggagcactacgccgccggcaacaagccagaccacatgatcaagcctgtggaggtgacagaaagtgcctag

SEQ ID NO: 255336 - DNA, 3111 bp, Artificial Sequence
  derived and/or modified sequence
atggccagcagcgtgggcaacgtggccgacagcaccggcctggccgaattggcccacagagaataccaggccggtgactttgaggcagccgaacgccactgcatgcaattgtggcgccaggagcctgataataccggcgtgctactgctgctttcttctatccacttccagtgtcggcgcttggatcgatcagcccattttagcaccctggccatcaagcagaatcccctcttggcggaagcctactctaacctgggcaacgtctacaaggaacgtggccagcttcaagaggcaatcgaacattatcggcacgctcttaggttgaaacccgacttcatagatggctacataaatctggccgccgccctggttgctgccggcgatatggaaggcgccgttcaggcctacgtgtctgctctgcagtataaccctgacctgtattgcgtcaggtcggatttaggaaatctgctaaaggcactcgggaggctggaggaggccaaggcttgttatcttaaagcaatcgagacccagccgaactttgccgtagcctggagtaacttggggtgcgtgttcaatgcgcaaggtgaaatttggttggccatacaccattttgaaaaggctgttacccttgaccccaatttcctggatgcctacattaatctcggaaatgtgttaaaggaagccagaatctttgaccgggcggtcgccgcatacctaagggcactctcgctgagccccaatcacgcagttgtgcacgggaatctagcatgtgtgtattatgagcagggcctgatagacttggccatcgatacttatcgtcgcgctatcgagcttcaaccccactttcctgacgcctactgtaacctggctaacgctctgaaagagaaaggttctgttgctgaagccgaggactgttacaatacagccttaagattgtgtccgacccatgctgactcattaaacaacctggctaacataaagcgggagcagggcaacatcgaggaggcagttcgcctctacagaaaggcccttgaggtgtttcccgagttcgccgcggcccattcaaacttggccagcgtattacaacagcagggaaaactgcaagaagcactaatgcactataaagaggccatacgtatctctcctacctttgctgatgcgtactctaacatgggaaacactctgaaagagatgcaagacgtgcagggcgccctccagtgctatactcgcgctattcagattaaccctgcctttgctgacgcacactctaatctcgcttccattcacaaggacagcggaaacattccagaggctattgcaagctataggaccgccttgaagctcaaacctgattttcctgacgcctactgtaatctcgcgcactgccttcagatcgtgtgcgactggaccgactatgacgagaggatgaaaaaacttgtgagtatcgttgccgatcagttagagaagaacagacttccatctgtccacccacatcactctatgctgtatcccctgagccacggtttcagaaaagcgattgccgaacgacacgggaatttgtgcctcgacaagattaatgtgctgcacaagccgccctatgagcacccaaaagacttgaagctctccgatggtaggctcagagtcggttacgtgtccagcgatttcggcaatcaccctacgtcccatctgatgcagtccataccgggaatgcacaaccccgataaattcgaagtcttttgttacgccctgtcacctgatgatggcactaatttcagggtgaaagtcatggctgaggccaaccacttcatcgaccttagccagattccatgtaacggtaaagccgccgatcggattcaccaggatggaattcacattctggttaatatgaatggatacacaaagggggcccgcaacgaactctttgccctgcgccctgcacctattcaagccatgtggctgggctatccggggacttccggggccctgttcatggactatattattaccgatcaggaaaccagccccgcagaggtggcagaacaatatagtgagaaactcgcctatatgccgcacactttcttcattggcgatcacgccaacatgtttccccatttgaaaaagaaagccgttatcgacttcaagagtaatgggcatatttacgataaccggatcgttcttaatggtatagacctgaaggcatttctcgatagcctccctgacgttaaaatcgtaaaaatgaaatgccccgatggcggcgataatgccgatagctccaatacggcactgaatatgcctgttatccccatgaacaccattgcagaggcagttatagaaatgatcaacagaggccagattcagatcactattaacggttttagtatcagcaatgggttggcaactactcaaatcaataataaagctgctactggcgaggaagtaccccgtactatcattgtgaccacgaggagtcagtatggcttgccagaggatgcaatcgtctactgtaatttcaaccagctgtacaagattgatccgtccaccctgcagatgtgggctaatatactcaagcgagtcccaaattcagtgctctggttattgcggttccctgctgtcggcgaacctaatatacagcaatacgcccaaaatatgggtctccctcagaatcggattatcttttctcctgtagcccccaaggaggagcatgtccgcagggggcagctggctgacgtgtgtctggacactcccttgtgtaatggacacacaacgggaatggatgtcttatgggcgggaacgcctatggttaccatgccaggagagactttagcctcacgcgtcgccgcttcccagctgacgtgtctgggctgtctggaactcattgccaaaaatcgtcaggaatatgaagacatagccgttaagctgggtacagatctggagtatcttaaaaaggtgcggggtaaggtgtggaagcagcgcatatcatcacctctattcaatacaaaacagtacacgatggagctagaaagactctatctccagatgtgggagcactacgccgccgggaataagcccgatcacatgattaagccagtggaagtaaccgagagtgcatag

SEQ ID NO: 255337 - DNA, 3310 bp, Artificial Sequence
  derived and/or modified sequence
tagatggtcaattagagttcccagggtttgaagcctgtaactgctgccgccgctcaagccctccagagcattgctacggctgctgcccttgtactactacctccaaatacgttcttgctggtagtggcggcagcaggaccaattacctcttttttgctctccctcgagaagctccagatggcgtcttccgtgggcaacgtggccgacagcacagggttagctgagttggcacatcgagaatatcaggcaggagattttgaggcagctgagagacactgcatgcagctctggagacaagagccagacaatactggtgtgcttttattactttcatctatacacttccagtgtcgaaggctggacagatctgctcactttagcactctggcaattaaacagaacccccttctggcagaagcttattcgaatttggggaatgtgtacaaggaaagagggcagttgcaggaggcaattgagcattatcgacatgcattgcgtctcaaacctgatttcatcgatggttatattaacctggcagccgccttggtagcagcgggtgacatggaaggggcagtacaagcttacgtctctgctcttcagtacaatcctgatttgtactgtgttcgcagtgacctggggaacctgctcaaagccctgggtcgcttggaagaagccaaggcatgttatttgaaagcaattgagacgcaaccgaactttgcagtagcttggagtaatcttggctgtgttttcaatgcacaaggggaaatttggcttgcaattcatcactttgaaaaggctgtcacccttgacccaaactttctggatgcttatatcaatttaggaaatgtcttgaaagaggcacgcatttttgacagagctgtggcagcttatcttcgtgccctaagtttgagtccaaatcacgcagtggtgcacggcaacctggcttgtgtatactatgagcaaggcctgatagatctggcaatagacacctacaggcgggctatcgaactacaaccacatttccctgatgcttactgcaacctagccaatgctctcaaagagaagggcagtgttgctgaagcagaagattgttataatacagctctccgtctgtgtcccacccatgcagactctctgaataacctagccaatatcaaacgagaacagggaaacattgaagaggcagttcgcttgtatcgtaaagcattagaagtcttcccagagtttgctgctgcccattcaaatttagcaagtgtactgcagcagcagggaaaactgcaggaagctctgatgcattataaggaggctattcgaatcagtcctacctttgctgatgcctactctaatatgggaaacactctaaaggagatgcaggatgttcagggagccttgcagtgttatacgcgtgccatccaaattaatcctgcatttgcagatgcacatagcaatctggcttccattcataaggattcagggaatattccagaagccatagcttcttaccgcacggctctgaaacttaagcctgattttcctgatgcttattgtaacttggctcattgcctgcagattgtctgtgattggacagactatgatgagcgaatgaagaagttggtcagtattgtggctgaccagttagagaagaataggttgccttctgtgcatcctcatcatagtatgctatatcctctttctcatggcttcaggaaggctattgctgagaggcacggcaacctgtgcttagataagattaatgttcttcataaaccaccatatgaacatccaaaagacttgaagctcagtgatggtcggctgcgtgtaggatatgtgagttccgactttgggaatcatcctacttctcaccttatgcagtctattccaggcatgcacaatcctgataaatttgaggtgttctgttatgccctgagcccagacgatggcacaaacttccgagtgaaggtgatggcagaagccaatcatttcattgatctttctcagattccatgcaatggaaaagcagctgatcgcatccatcaggatggaattcatatccttgtaaatatgaatggctatactaagggcgctcgaaatgagctttttgctctcaggccagctcctattcaggcaatgtggctgggataccctgggacgagtggtgcgcttttcatggattatattatcactgatcaggaaacttcgccagctgaagttgctgagcagtattccgagaaattggcttatatgccccacactttttttattggtgatcatgctaatatgttccctcacctgaagaaaaaagcagtcatcgattttaagtccaatgggcacatttatgacaatcggatagttctgaatggcatcgacctcaaagcatttcttgatagtctaccagatgtgaaaattgtcaagatgaagtgtcctgatggaggagacaatgcagatagcagtaacacagctcttaatatgcctgttattcctatgaatactattgcagaagcagttattgaaatgattaaccgaggacagattcaaataacaattaatggattcagtattagcaatggactggcaactactcagatcaacaataaggctgcaactggagaggaggttccccgtaccattattgtaaccacccgttctcagtacgggttaccagaagatgccatcgtatactgtaactttaatcagttgtataaaattgacccttctactttgcagatgtgggcaaacattctgaagcgtgttcccaatagtgtactctggctgttgcgttttccagcagtaggagaacctaatattcaacagtatgcacaaaacatgggcctgccccagaaccgtatcattttttcacctgttgctcctaaagaggaacacgtcaggagaggccagctggctgatgtctgcttggacactccactctgtaatgggcacaccacagggatggatgtcctctgggcagggacccccatggtgactatgccaggagagactcttgcttctcgagttgcagcatcccagctcacttgcttaggttgtcttgagcttattgctaaaaacagacaagaatatgaagacatagctgtgaagctgggaactgatctagaatacctgaagaaagttcgtggcaaagtctggaagcaaagaatatctagccctctgttcaacaccaaacaatacacaatggaactagagcggctctatctacagatgtgggagcattatgcagctggcaacaaacctgaccacatgattaagcctgttgaagtcactgagtcagcataaataaagactgcacaggagaatt

SEQ ID NO: 255338 - DNA, 3111 bp, Artificial Sequence
  derived and/or modified sequence
atggcctcatcagtgggcaacgttgctgacagtacagggcttgccgaactggcacaccgcgaatatcaagctggcgatttcgaggccgctgaacggcactgtatgcaactctggcgacaggagcctgataacaccggcgtgctgttgttactgtcctccatccattttcagtgccgcagactggatcggtctgcacacttctcaacgctggccataaagcaaaacccactgttagcagaagcgtatagcaaccttggcaacgtgtacaaggaaagaggacaattgcaggaggccatagagcactatcggcatgcacttcggctcaaaccagactttatcgacggctacattaaccttgctgccgcactggttgctgcgggagacatggagggcgctgtacaggcatatgtgtcggcattgcagtataaccctgacttatactgcgttcgaagcgatctaggcaacttactcaaggccctcgggaggttagaggaggcaaaggcatgctacctgaaggccatcgagactcagcccaattttgccgtagcatggtccaacctgggatgtgtgtttaacgcccagggagaaatttggctggctatccatcacttcgagaaggcggtgactctcgaccctaatttcctggatgcttatattaatctggggaacgtgcttaaggaagcacggattttcgatcgcgctgtggcagcctatttgagggctctcagtctgagccccaaccacgccgtcgtgcacggcaatctggcttgcgtatactacgaacagggcctcatcgacctggccattgacacatatagacgggctatcgagctccagcctcactttcctgatgcttattgcaatctggccaacgccctgaaggagaaaggaagtgttgctgaagctgaggattgctacaacacggccttgcggctgtgccccactcatgcagattctctgaataatctcgctaacatcaagagggaacaggggaacatagaggaagcagtcaggctatacaggaaagcactggaggtgtttccagaatttgccgcagcccactctaacttagcctcagtgctgcagcagcagggaaagctgcaggaggcactaatgcactacaaggaagcaatacgaatctccccgaccttcgccgacgcttattcaaacatgggcaatacgttgaaggaaatgcaggatgtccaaggcgcactgcagtgctacacaagggccattcagatcaatcccgcatttgccgacgcccactccaacctcgcctctatacacaaggattccgggaacatcccagaagccatcgccagctacaggactgctctgaaactgaaaccggatttccctgatgcatactgtaaccttgctcactgtctgcaaatcgtatgcgattggacagactacgacgagcgaatgaagaagttagtcagcattgtggccgatcaactcgagaaaaatagactaccctctgttcatccacaccatagcatgctgtaccccctcagccacggtttccgtaaagcaatcgccgaacgccatggtaacctatgcctggacaagatcaacgttctacataagccaccttatgagcaccccaaagacctgaagctctccgacggcagacttcgcgtaggttatgtatccagtgacttcgggaatcatccgactagtcacctgatgcagtctatccccggtatgcataatccagataagtttgaggtcttctgctacgccctcagtcctgacgacggtacaaattttagagtcaaggttatggccgaagcaaatcattttatcgatctcagtcagatcccgtgcaacggaaaggctgccgaccgcatccaccaggatggcatccatatccttgtcaatatgaacggttacacaaaaggggcacggaatgaactgttcgctttacggccagcccctatacaggcaatgtggttggggtatcccggaacaagcggcgcactttttatggactatattattaccgaccaggagacttcgcccgctgaggttgccgaacaatattccgagaaactggcctacatgccacacacgttctttatcggagaccatgccaatatgttcccccacctaaaaaagaaagctgtgattgattttaaatctaatggtcacatctatgataacagaattgttcttaatggcattgatcttaaagctttcctggatagtttgcccgacgtgaaaatagttaaaatgaaatgcccggacggcggagacaacgccgatagtagtaacactgccctcaatatgcccgtgatccccatgaatactatcgccgaggctgtgatagagatgatcaacagaggccagattcaaattactattaatggcttttccatcagtaacggtctcgctaccacacagatcaataataaagccgctaccggcgaggaggtgccaaggactatcattgtgacaactagatcgcagtatgggctgcccgaagatgctattgtatactgcaatttcaaccaactgtacaaaatagacccttctaccctccagatgtgggcaaacatcctcaagcgggtacccaattcggtgctatggcttttgaggttcccagcagttggcgaacccaatatccagcagtatgcccagaatatgggtttgccgcaaaatcgcatcatcttttcacctgtggctcctaaggaggaacacgttagacgtggacagttagccgatgtgtgtttggacacgccattgtgcaacggccacacaaccggcatggacgtactttgggcagggacacctatggtaactatgcccggagaaacactggctagccgtgttgcggctagccagctcacatgcttgggatgcctggaactcatcgccaaaaataggcaagaatacgaagacatcgccgtgaaactaggcaccgatctcgagtatcttaagaaggtgaggggcaaagtctggaagcagcgtatctccagccccctgtttaacacaaaacagtatacaatggagctagagaggctttaccttcaaatgtgggagcattacgcagctgggaacaagcccgaccacatgatcaagcctgtggaggtcacggagagtgcctag

SEQ ID NO: 255339 - DNA, 3111 bp, Artificial Sequence
  derived and/or modified sequence
atggccagcagcgtgggcaacgtggccgacagcaccggcctggccgagctggcccacagagagtaccaggccggcgacttcgaggccgccgagagacactgcatgcagctgtggagacaggagcccgacaacaccggcgtgctgctgctgctgagcagcatccacttccagtgcagaagactggacagaagcgcccacttcagcaccctggccatcaagcagaaccccctgctggccgaggcctacagcaacctgggcaacgtgtacaaggagagaggccagctgcaggaggccatcgagcactacagacacgccctgagactgaagcccgacttcatcgacggctacatcaacctggccgccgccctggtggccgccggcgacatggagggcgccgtgcaggcctacgtgagcgccctgcagtacaaccccgacctgtactgcgtgagaagcgacctgggcaacctgctgaaggccctgggcagactggaggaggccaaggcctgctacctgaaggccatcgagacccagcccaacttcgccgtggcctggagcaacctgggctgcgtgttcaacgcccagggcgagatctggctggccatccaccacttcgagaaggccgtgaccctggaccccaacttcctggacgcctacatcaacctgggcaacgtgctgaaggaggccagaatcttcgacagagccgtggccgcctacctgagagccctgagcctgagccccaaccacgccgtggtgcacggcaacctggcctgcgtgtactacgagcagggcctgatcgacctggccatcgacacctacagaagagccatcgagctgcagccccacttccccgacgcctactgcaacctggccaacgccctgaaggagaagggcagcgtggccgaggccgaggactgctacaacaccgccctgagactgtgccccacccacgccgacagcctgaacaacctggccaacatcaagagagagcagggcaacatcgaggaggccgtgagactgtacagaaaggccctggaggtgttccccgagttcgccgccgcccacagcaacctggccagcgtgctgcagcagcagggcaagctgcaggaggccctgatgcactacaaggaggccatcagaatcagccccaccttcgccgacgcctacagcaacatgggcaacaccctgaaggagatgcaggacgtgcagggcgccctgcagtgctacaccagagccatccagatcaaccccgccttcgccgacgcccacagcaacctggccagcatccacaaggacagcggcaacatccccgaggccatcgccagctacagaaccgccctgaagctgaagcccgacttccccgacgcctactgcaacctggcccactgcctgcagatcgtgtgcgactggaccgactacgacgagagaatgaagaagctggtgagcatcgtggccgaccagctggagaagaacagactgcccagcgtgcacccccaccacagcatgctgtaccccctgagccacggcttcagaaaggccatcgccgagagacacggcaacctgtgcctggacaagatcaacgtgctgcacaagcccccctacgagcaccccaaggacctgaagctgagcgacggcagactgagagtgggctacgtgagcagcgacttcggcaaccaccccaccagccacctgatgcagagcatccccggcatgcacaaccccgacaagttcgaggtgttctgctacgccctgagccccgacgacggcaccaacttcagagtgaaggtgatggccgaggccaaccacttcatcgacctgagccagatcccctgcaacggcaaggccgccgacagaatccaccaggacggcatccacatcctggtgaacatgaacggctacaccaagggcgccagaaacgagctgttcgccctgagacccgcccccatccaggccatgtggctgggctaccccggcaccagcggcgccctgttcatggactacatcatcaccgaccaggagaccagccccgccgaggtggccgagcagtacagcgagaagctggcctacatgccccacaccttcttcatcggcgaccacgccaacatgttcccccacctgaagaagaaggccgtgatcgacttcaagagcaacggccacatctacgacaacagaatcgtgctgaacggcatcgacctgaaggccttcctggacagcctgcccgacgtgaagatcgtgaagatgaagtgccccgacggcggcgacaacgccgacagcagcaacaccgccctgaacatgcccgtgatccccatgaacaccatcgccgaggccgtgatcgagatgatcaacagaggccagatccagatcaccatcaacggcttcagcatcagcaacggcctggccaccacccagatcaacaacaaggccgccaccggcgaggaggtgcccagaaccatcatcgtgaccaccagaagccagtacggcctgcccgaggacgccatcgtgtactgcaacttcaaccagctgtacaagatcgaccccagcaccctgcagatgtgggccaacatcctgaagagagtgcccaacagcgtgctgtggctgctgagattccccgccgtgggcgagcccaacatccagcagtacgcccagaacatgggcctgccccagaacagaatcatcttcagccccgtggcccccaaggaggagcacgtgagaagaggccagctggccgacgtgtgcctggacacccccctgtgcaacggccacaccaccggcatggacgtgctgtgggccggcacccccatggtgaccatgcccggcgagaccctggccagcagagtggccgccagccagctgacctgcctgggctgcctggagctgatcgccaagaacagacaggagtacgaggacatcgccgtgaagctgggcaccgacctggagtacctgaagaaggtgagaggcaaggtgtggaagcagagaatcagcagccccctgttcaacaccaagcagtacaccatggagctggagagactgtacctgcagatgtgggagcactacgccgccggcaacaagcccgaccacatgatcaagcccgtggaggtgaccgagagcgcctag

SEQ ID NO: 255340 - protein, 509 aa, Artificial Sequence
  derived and/or modified sequence
MLLSLPALHLQTSEHHPFFQLPHRRLGPWCSPTGSPAPLSCETGCGEGSWILVCRLLVPTQVSLLSMEEDIDTRKINNSFLRDHSYATEADIISTVEFNHTGELLATGDKGGRVVIFQREQESKNQVHRRGEYNVYSTFQSHEPEFDYLKSLEIEEKINKIRWLPQQNAAYFLLSTNDKTVKLWKVSERDKRPEGYNLKDEEGRLRDPATITTLRVPVLRPMDLMVEATPRRVFANAHTYHINSISVNSDYETYMSADDLRINLWNFEITNQSFNIVDIKPANMEELTEVITAAEFHPHHCNTFVYSSSKGTIRLCDMRASALCDRHTKFFEEPEDPSNRSFFSEIISSISDVKFSHSGRYIMTRDYLTVKVWDLNMENRPIETYQVHDYLRSKLCSLYENDCIFDKFECVWNGSDSVIMTGSYNNFFRMFDRNTKRDVTLEASRENSKPRAILKPRKVCVGGKRRKDEISVDSLDFSKKILHTAWHPSENIIAVAATNNLYIFQDKVN

SEQ ID NO: 255341 - DNA, 1332 bp, Artificial Sequence
  derived and/or modified sequence
atggaagaagatatagatacccggaagattaacaattcttttttgagggatcacagttacgctaccgaggcagatattatctcgacagtcgaatttaaccacacgggcgaactgctggctaccggggacaaggggggccgagtggtgatcttccagagggagcaagaaagtaaaaaccaggtccaccgtagaggcgagtataacgtttacagcacattccagtcacacgagcctgagttcgactacttgaaaagcctggaaattgaggagaagataaataaaatacgctggctgccgcaacagaatgcagcgtattttttactcagcaccaatgataaaactgtgaagctatggaaagtaagtgagagagataaaagaccagagggctataacttgaaagatgaggaagggaggctgcgggatccggccacgattacaacgctaagggtgcctgtcctgagacctatggacctcatggtcgaagctactcccagaagggtgttcgccaacgcgcacacctatcacatcaattctatcagtgtgaactctgactatgaaacttatatgtctgcagatgacctaaggattaatctttggaacttcgaaataactaatcagtcgttcaacatcgtggacattaaacccgctaatatggaggaactgaccgaagtgatcacagctgcagaatttcacccacatcactgcaataccttcgtatactcctcttcaaaagggacaataagactctgcgacatgcgcgctagcgcactgtgtgatcgccatactaagttcttcgaggagcctgaagatcccagcaacagatccttctttagtgagatcatatcaagcatatccgacgtcaagttcagtcatagcggcagatacattatgacacgagactacttaacagtgaaagtgtgggacctgaatatggaaaacagaccaatcgagacgtaccaggtgcatgattatctcaggtctaagctgtgttcactctacgaaaatgactgtatcttcgacaagtttgaatgtgtttggaacgggtctgactccgtgattatgactggctcttacaataatttctttagaatgttcgaccggaacacgaagagagacgtcactctcgaggcatctcgagagaactccaagcctagagctatccttaagccaagaaaagtttgcgttggagggaaacgccgcaaggacgaaatttctgtcgactccctcgatttttcaaaaaagattctccacaccgcgtggcatccatctgagaatataatagcagtggcagctactaataacctatatatcttccaggataaggttaactag

SEQ ID NO: 255342 - DNA, 1332 bp, Artificial Sequence
  derived and/or modified sequence
atggaagaggatattgacactaggaaaattaataactcatttctcagagatcacagttacgcaactgaggctgacatcatttctacagtcgagttcaaccacactggagaactgctcgcaaccggtgacaagggcggccgggtcgttatcttccagcgggagcaggaaagcaagaaccaggtccacaggaggggtgagtataacgtctattcgacctttcaaagtcatgagcccgagttcgactacctgaagtcactcgagatcgaggaaaagatcaacaaaataaggtggctacctcagcaaaacgctgcatactttctgctgagcaccaacgataaaaccgttaagctatggaaagtctccgaaagagacaagagacccgaggggtataatttgaaagacgaggagggccggctccgggatccggcaacgatcacgactctgcgcgtccccgttctgcgaccgatggacttgatggtggaggcgacgccccgcagggtgtttgctaacgcccatacctaccatataaactctatcagtgtgaatagtgactacgagacctacatgtctgcagacgatctgcgcatcaatctgtggaatttcgagatcaccaaccagtccttcaacatcgtagatatcaagcccgcaaatatggaggagttgactgaagtcatcacagccgccgagttccatccacaccactgtaatactttcgtgtactcctctagcaaagggactatacgcctctgcgacatgcgcgccagtgccctttgtgatcgtcacacgaagttctttgaggaacccgaagatccttccaaccgctctttcttcagcgagatcatcagcagcatatcggacgtcaagttctctcatagtggaagatacatcatgaccagggactacttaaccgtcaaagtttgggatttaaacatggagaataggccgatcgagacctaccaagtccatgactatctgcgcagcaagctctgttctttatacgaaaacgattgtattttcgacaaatttgagtgcgtttggaacggctcggattctgtgatcatgaccgggagctataacaacttctttcgcatgttcgacaggaatacaaaaagagacgtgacacttgaggcatcacgtgagaactcaaagcctcgagcaatcctgaagccgcgtaaggtatgcgtgggtggtaagagacgaaaggacgagatcagcgtggacagcctagacttctctaagaagattctgcacacggcgtggcacccctccgagaacataattgctgtggcagctacaaacaatctctacatctttcaggacaaggtcaactag

SEQ ID NO: 255343 - DNA, 1332 bp, Artificial Sequence
  derived and/or modified sequence
atggaagaggacatcgacacgcgcaagattaacaacagctttctgcgcgaccatagctatgcaaccgaggctgatatcatctcgactgtggaatttaaccatactggggagttactggccaccggagataaaggcgggagagttgtcatcttccaacgggagcaggagagcaagaatcaggtgcaccggagaggcgagtacaacgtatattccacttttcagagccatgagcccgagttcgactacctaaagtccctcgagatcgaggagaaaataaataaaatccgctggctgccgcagcagaacgcagcatactttctgctgagtaccaatgacaaaactgtaaagctctggaaagtatctgaaagggataaacgcccggagggatacaatctaaaggacgaggagggtcgactgagggaccctgccaccataactacgcttagggtacctgtcctgagacctatggatctaatggtcgaagcaactcctcgacgtgtctttgcaaacgcccacacctaccacataaattccatttcagttaactctgattatgagacctacatgtccgcagacgaccttcggatcaatttatggaacttcgagatcacaaaccagtctttcaacatcgtggacataaagcctgccaacatggaggagctgaccgaagtaatcaccgccgccgagtttcaccctcaccactgcaatacgttcgtgtactctagctctaaaggcaccatccgcctgtgtgacatgcgggcctctgcattgtgtgacaggcacacaaaattctttgaggaacccgaagatccatctaataggagcttcttttcagagatcatctcatccatctctgacgtgaagttttcgcacagtggcaggtacatcatgacgagagactacctaaccgtgaaagtttgggacctgaatatggagaaccgacctattgaaacatatcaggtccacgattatctccggtctaagctgtgcagtttgtatgagaacgactgtattttcgacaagtttgagtgtgtgtggaacggtagcgactcagtgatcatgacgggcagctataacaacttctttcgcatgtttgatcggaataccaagagagacgtcacactggaggcctctagggagaatagcaagcccagagctatactgaagcctaggaaagtttgcgttggcggcaagcgccggaaggacgagatctcagtggatagtctggatttctcgaagaagatcctgcacaccgcctggcacccatctgaaaatattatcgctgtcgcggcaactaataacttgtatattttccaagataaagtgaactag

SEQ ID NO: 255344 - DNA, 1530 bp, Artificial Sequence
  derived and/or modified sequence
atgttactgtctttgcccgctctgcacctacagacttcggaacaccacccattctttcagttaccacatcggcgcctgggtccctggtgtagccccaccggcagcccagccccactgtcttgtgaaactggctgcggcgagggttcttggattctggtgtgtaggttgctcgtacctactcaggtcagcctcctgagcatggaggaagatatcgacacccgaaagataaacaattctttcctgagggaccatagttatgcaaccgaagccgatattatttctaccgtcgaatttaaccatacaggggagttgctagccacaggagacaaagggggtagggtagtgatctttcaaagagaacaggaatcaaaaaatcaggtacacagacggggggaatacaacgtttacagcacttttcaatctcatgagccagaattcgactacttaaagtccctcgaaatagaggagaaaataaacaaaatacggtggctgccccaacagaatgctgcctacttcctactctcaacgaatgataagacagtgaaactctggaaggtgagtgaaagggacaagcgtccagaaggttataatcttaaggacgaagagggccgcctccgagaccccgccacgatcactaccctgagagtcccggtactccggcctatggacctgatggtcgaggccacgccacgaagggtgttcgcgaatgctcacacataccatattaactcgatcagcgtcaatagcgattacgaaacctacatgagcgcagatgaccttcgcattaatctctggaatttcgaaataaccaaccagagcttcaatattgtggacataaaacccgctaacatggaagagctgaccgaagtgattactgccgctgagtttcacccacaccactgcaatacattcgtgtatagctcctcaaagggaaccattagactttgcgacatgcgagcttctgcattgtgcgatcggcatactaaattcttcgaggagcctgaggatccgtccaaccggagcttctttagcgagatcatttctagtattagcgatgtcaaattctctcatagcggacgatacatcatgacaagggattacctgactgttaaggtatgggacctgaacatggaaaatcgccccatcgagacatatcaggttcacgattacctgcggtccaagctctgctctctgtacgagaacgactgtattttcgacaagttcgaatgcgtttggaacggatctgattccgtcattatgacaggcagttacaacaacttcttcaggatgtttgatcggaacactaagcgcgacgtgacgctcgaggcctcccgcgaaaactcaaagccaagggccatcctgaagcctagaaaagtctgcgttggcgggaagcgccgcaaagatgagatcagcgtcgactccctcgacttctctaagaaaatattacacacggcttggcacccatcagagaatatcatcgcagtggcagcaactaataacttatacatatttcaggacaaggtgaactag

SEQ ID NO: 255345 - DNA, 1332 bp, Artificial Sequence
  derived and/or modified sequence
atggaggaggatatcgatacaagaaaaatcaataacagttttttgagagaccactcatatgctacggaagcggatattatttccaccgttgagtttaatcatacaggagagctcttagcaacaggagataaaggcgggcgcgtagttatttttcagcgggaacaggagtccaaaaatcaggtccataggcggggcgaatacaacgtatactctacctttcagagtcatgagcccgagttcgattacctgaagagtctggaaatcgaagagaagatcaacaaaatccgttggctcccacagcaaaacgccgcttactttctactgtccacaaacgacaaaacagtcaagctctggaaggtgagcgagagggacaaacgtcctgaaggttacaatttaaaggacgaggaaggaaggctgcgtgatcccgctaccatcaccaccctgagggtgcccgtgctgagacccatggacctgatggttgaagctaccccccggcgagtgttcgcaaatgcccatacctatcacatcaactcaatatcggtaaatagtgactacgagacctatatgtctgctgatgatctgcgcataaatctgtggaatttcgagattactaatcagtcctttaatatagtggatatcaaaccggctaacatggaagaactcacggaagtcataacagccgcggagtttcacccccatcactgtaacacattcgtgtacagctcctccaaaggaactataagattatgtgatatgcgcgcttctgctctgtgcgatcgacatactaaatttttcgaggaacctgaggacccatccaaccggagtttctttagtgagataatttcatcaatctccgatgtgaaattcagccacagtggtagatatatcatgactcgcgactaccttaccgtgaaggtgtgggatctgaacatggaaaaccgtccaatcgagacatatcaggtgcatgactacctacggtctaaactctgtagcttgtacgaaaacgattgcatctttgataaatttgagtgcgtgtggaatgggtccgattcagtaattatgaccgggtcgtataacaactttttccggatgtttgacagaaataccaagagggacgtgacccttgaggcgtctagggagaacagcaagcctcgcgccatcctgaagccgcgaaaggtttgcgtgggaggtaaaagacgcaaggacgagatctctgtcgacagcttggatttttccaaaaaaatacttcacaccgcctggcatccgtctgagaatatcatcgccgtggccgcaaccaataatctgtatatattccaggacaaggtcaactag

SEQ ID NO: 255346 - DNA, 1332 bp, Artificial Sequence
  derived and/or modified sequence
atggaggaggacatcgacaccaggaagatcaacaacagcttcctgcgggaccacagctatgccacagaggccgacatcatcagcacagtggagttcaaccacactggagagctgctggccactggagacaagggcggccgggtggtgatcttccagcgggagcaggagagcaagaaccaggtgcacagaagaggagagtacaacgtgtacagcaccttccagagccatgagcctgagtttgactacctgaagagcctggagattgaggagaagatcaacaagatccgctggctgccccagcagaatgctgcctacttcctgctgagcaccaatgacaagacagtgaagctgtggaaggtgtctgagcgggacaagaggcctgagggctacaacctgaaggatgaggagggccgcctgcgggaccctgccaccatcaccaccctgcgggtgcctgtgctgcggcccatggacctgatggtggaggccaccccaagaagagtgtttgccaatgcccacacctaccacatcaacagcatctctgtgaacagcgactatgagacctacatgtctgcagatgacctgcgcatcaacctgtggaactttgagatcaccaaccagagcttcaacatcgtggacatcaagccagccaacatggaggagctgacagaggtgatcacagctgctgagttccacccccaccactgcaacacctttgtgtacagcagcagcaagggcaccatccggctgtgtgacatgagggccagcgccctgtgtgacagacacaccaagttctttgaggagcctgaggaccccagcaacagaagcttcttcagcgagatcatcagcagcatcagtgatgtgaagttcagccacagcggccgctacatcatgacccgggactacctgactgtgaaggtgtgggacctgaacatggagaaccggcccatcgagacctaccaggtgcatgactacctgcggagcaagctgtgcagcctgtatgaaaatgactgcatctttgacaagtttgaatgtgtgtggaatggaagtgacagcgtcatcatgacaggcagctacaacaacttcttcaggatgtttgacaggaacaccaagagagatgtgaccctggaggccagccgggagaacagcaagccccgggccatcctgaagcccaggaaggtgtgtgtgggcggcaagaggaggaaggatgagatctctgtggacagcctggacttcagcaagaagatcctgcacacagcctggcaccccagcgagaacatcatcgctgtggccgccaccaacaacctgtacatcttccaggacaaggtgaactag

SEQ ID NO: 255347 - DNA, 1530 bp, Artificial Sequence
  derived and/or modified sequence
atgctgctgagcctgcctgccctgcacctgcagaccagcgagcaccaccccttcttccagctgccccaccggcggctgggcccctggtgcagccccaccggcagccctgcccccctgagctgtgaaacaggctgtggggagggctcctggatcctggtgtgccgcctgctggtgcccacccaggtgtccctgctgtccatggaggaggacatcgacaccaggaagatcaacaacagcttcctgcgggaccacagctatgccacagaggccgacatcatcagcacagtggagttcaaccacactggagagctgctggccactggagacaagggcggccgggtggtgatcttccagcgggagcaggagagcaagaaccaggtgcacagaagaggagagtacaacgtgtacagcaccttccagagccatgagcctgagtttgactacctgaagagcctggagattgaggagaagatcaacaagatccgctggctgccccagcagaatgctgcctacttcctgctgagcaccaatgacaagacagtgaagctgtggaaggtgtctgagcgggacaagaggcctgagggctacaacctgaaggatgaggagggccgcctgcgggaccctgccaccatcaccaccctgcgggtgcctgtgctgcggcccatggacctgatggtggaggccaccccaagaagagtgtttgccaatgcccacacctaccacatcaacagcatctctgtgaacagcgactatgagacctacatgtctgcagatgacctgcgcatcaacctgtggaactttgagatcaccaaccagagcttcaacatcgtggacatcaagccagccaacatggaggagctgacagaggtgatcacagctgctgagttccacccccaccactgcaacacctttgtgtacagcagcagcaagggcaccatccggctgtgtgacatgagggccagcgccctgtgtgacagacacaccaagttctttgaggagcctgaggaccccagcaacagaagcttcttcagcgagatcatcagcagcatcagtgatgtgaagttcagccacagcggccgctacatcatgacccgggactacctgactgtgaaggtgtgggacctgaacatggagaaccggcccatcgagacctaccaggtgcatgactacctgcggagcaagctgtgcagcctgtatgaaaatgactgcatctttgacaagtttgaatgtgtgtggaatggaagtgacagcgtcatcatgacaggcagctacaacaacttcttcaggatgtttgacaggaacaccaagagagatgtgaccctggaggccagccgggagaacagcaagccccgggccatcctgaagcccaggaaggtgtgtgtgggcggcaagaggaggaaggatgagatctctgtggacagcctggacttcagcaagaagatcctgcacacagcctggcaccccagcgagaacatcatcgctgtggccgccaccaacaacctgtacatcttccaggacaaggtgaactag

SEQ ID NO: 255348 - DNA, 1332 bp, Artificial Sequence
  derived and/or modified sequence
atggaggaggacatcgacacccggaagatcaacaacagcttcctgagagaccattcttatgctacagaggccgacataatctcaactgtggagtttaatcacacaggtgaactcctggcgacgggtgataagggcggaagggttgttatttttcagcgcgaacaggaaagtaagaaccaggtgcacaggaggggagagtacaatgtgtactctacattccagtcacacgagccagagttcgattaccttaagtctttggagattgaagaaaaaattaacaagatcaggtggttaccacagcagaacgcggcatattttctcctgtctactaatgacaagaccgtgaagctctggaaagtatcagagagagacaagagaccagagggctataacctgaaggatgaagagggaaggctgcgtgaccccgctacaatcacaacactacgagtccccgtgcttcgcccgatggatctgatggttgaagcaacgccacgtcgcgtttttgccaatgctcacacctaccacattaacagcatctctgtaaattcggactacgaaacctacatgtctgccgacgatctgaggatcaacctatggaacttcgaaatcaccaaccagtcatttaacatagtggatatcaaacccgcaaacatggaggagttgacggaagtcatcaccgcagcggagtttcacccccaccattgcaatacgtttgtgtattcatcatccaagggcacgatacggctttgcgacatgagagccagcgccctgtgcgaccgtcacactaaattctttgaagagccagaagatccaagcaaccggtccttcttcagtgagataataagctctatctccgatgtaaagttcagtcactcgggccggtatattatgacacgggactacctgactgttaaggtgtgggacctaaacatggagaatcgcccaatcgaaacttatcaagttcatgattatttgagatcaaaactgtgttcactctacgagaatgactgtatcttcgataaattcgaatgcgtgtggaacggctccgatagcgtcatcatgacggggagttataacaattttttccggatgtttgacaggaacacaaaacgagacgttaccctggaggccagccgtgaaaatagcaagccccgggcaatcctgaagccccgaaaggtgtgtgtgggaggcaaaaggaggaaggacgaaatctctgttgatagcttggacttttccaaaaagattttacacactgcatggcatccaagtgagaacatcattgccgtagccgcaactaacaacctatatattttccaggataaggtgaactag

SEQ ID NO: 255349 - DNA, 1332 bp, Artificial Sequence
  derived and/or modified sequence
atggaggaggacatcgacacccggaagatcaacaacagcttcctgagagatcactcctacgctacagaagctgacattatctccacagtagaattcaatcacaccggggaactgttagctacaggtgacaaaggggggcgcgtggtcatatttcagcgagaacaagaatctaaaaaccaggtgcatcgccgaggggaatacaacgtgtattccacattccaatcccatgaacctgagttcgactatcttaaaagcctggagattgaggaaaaaattaataaaatccggtggctcccgcagcagaacgctgcctacttcctactgagtacaaacgataagactgtcaaactctggaaggtctccgagagagacaagaggcccgagggctacaatcttaaggatgaggaggggcgcctgagggatcctgccactattacaacacttagagtgcctgtgcttcggccaatggacctaatggttgaggctacaccacggagggtgttcgctaatgcacatacatatcatatcaacagcatctctgttaactccgactacgagacatacatgagtgccgatgacctacgtataaacctgtggaatttcgagatcacaaaccagagctttaatatagtggatatcaagcccgccaacatggaggagctgaccgaggtgattacagcagccgaattccatccccatcactgcaatacatttgtatattccagctccaaggggacaattaggttgtgtgatatgagggcttctgctttgtgcgatcgtcatacgaaattcttcgaagaaccagaggatccctctaaccggtctttttttagcgaaatcatcagctccatttccgacgtgaaattttctcatagcggtcgttacattatgacaagagattacctaactgtgaaagtctgggatctgaatatggagaataggcctattgaaacttatcaagtccatgactacctcaggtccaagctatgctcactgtacgaaaacgattgtatatttgataagttcgaatgcgtgtggaatggctcagacagcgtgattatgacaggatcatataataatttttttaggatgtttgaccgaaacactaagcgcgacgtgactctcgaggcatctcgcgagaatagcaaaccccgggcaatccttaagccacgcaaagtgtgtgtcggggggaaaagacgcaaggacgagatctccgtagacagcctggactttagcaaaaagatactccatacagcgtggcacccaagcgagaatatcatcgccgtggccgccaccaataacctgtatattttccaggacaaggtgaactag

SEQ ID NO: 255350 - DNA, 1332 bp, Artificial Sequence
  derived and/or modified sequence
atggaggaggacatcgacacccggaagatcaacaacagcttcctgcgcgaccattcctacgccaccgaagccgatatcatctcaacagtcgagtttaaccacactggcgaactgctggccaccggtgacaagggaggccgcgttgtgatatttcagcgggaacaggaatccaaaaatcaggtgcatcgaagaggcgagtacaacgtgtattctacattccaatcccatgagccagagtttgattatctgaaatcgctcgaaatcgaagagaagattaataaaattagatggctcccacagcagaatgctgcatatttcttgctgagtactaacgacaagaccgtgaaactgtggaaggtttcagagcgcgacaaaaggcccgagggatacaacctgaaggacgaggagggaagattacgggatccagctacaattactactttgagggtgccggtgctccgccctatggatctgatggtcgaagccacacctagacgtgtttttgccaacgcccacacataccatattaattctattagtgttaatagtgattatgaaacctatatgagtgcggacgacctgcgcatcaacctctggaacttcgagattacaaatcagagcttcaacattgtggacattaaacccgccaacatggaagagctgaccgaggtcatcacagccgccgagttccatcctcaccattgcaatacattcgtgtactcatccagtaagggaacaattcggctctgcgacatgcgggcatccgcactctgcgacagacacacgaagttcttcgaggaaccagaagatccttctaaccgcagtttcttctcagagatcatttcctccatcagcgatgtgaaattctcccactcagggaggtacattatgactagagattaccttactgtgaaggtctgggatcttaacatggagaatcggcccatagagacgtatcaggtacacgactacctgcgatccaaattgtgtagtctttatgagaacgactgcattttcgacaagtttgagtgcgtgtggaatggcagcgatagcgtcattatgacaggctcctacaataattttttccgaatgttcgataggaataccaagcgcgacgtcacgctggaggcctctcgagaaaattccaagcctcgagctattttgaaaccccggaaggtttgtgtgggaggtaaaagaagaaaggacgaaatctcggtcgacagcttagacttctctaaaaagatactgcacacagcctggcacccaagcgagaacatcattgcggtggctgccactaacaatctatacattttccaggacaaagttaactag

SEQ ID NO: 255351 - DNA, 1530 bp, Artificial Sequence
  derived and/or modified sequence
atgctgctgagcctgcccgccctgcacctgcagaccagcgagcaccacccattcttccagctccctcatcggagactgggcccttggtgctcccccacaggctcaccagcccctctatcatgcgagactggctgcggagagggttcctggatcctggtgtgcagacttctggtgcccactcaggtgtccctgctgtccatggaagaggacatcgataccagaaagatcaataacagcttcttgagagaccactcgtacgcaactgaggcagatatcataagcaccgtggaatttaatcataccggtgaattactggccacgggggacaagggtgggcgcgtggttatcttccaacgcgaacaggaatcaaaaaaccaggtgcatcgccgcggggagtacaatgtgtattcaacatttcagtcacatgaaccagagtttgactatctgaagtccctcgagattgaggaaaaaatcaataagatacgctggcttcctcaacaaaatgccgcctactttctgctgagtaccaacgacaagactgtgaaactctggaaggtgtccgagcgcgacaaaagaccggagggatataatttgaaagacgaagaaggaaggctgcgcgatccagccaccatcactaccctgcgggtgcctgtgctgcgccctatggacctgatggtcgaagccaccccccgaagagtatttgccaacgctcatacataccatatcaatagtatctctgtaaattccgactacgagacttatatgtccgctgacgacttgcggattaacttgtggaacttcgagattaccaaccaatcgttcaacatcgtagacataaagcctgcgaatatggaggagctgaccgaagtcattacggctgccgagtttcacccacatcactgcaatacatttgtgtacagctccagtaaggggaccatccgcctctgcgacatgagagcttctgcgctttgtgatagacacaccaaattttttgaagaacccgaagatccaagtaataggtctttcttctctgagattatctcaagcatatccgatgtcaagtttagtcactcgggaaggtatattatgacgagggactatctgaccgttaaagtctgggacctgaatatggagaatcgcccgattgaaacttatcaagtgcatgactatctccgatctaagctgtgctcattgtacgaaaatgactgcattttcgacaagtttgaatgcgtatggaatggttccgactctgtcataatgactggttcatacaacaactttttccgcatgttcgaccgaaatacaaagcgggatgtgactctcgaagccagtcgcgaaaattccaagcccagggctattctcaagccacgtaaggtctgtgttgggggaaagagaaggaaagacgagatatctgtcgatagccttgatttcagtaagaaaatcctacacaccgcctggcatccctcggaaaatattattgcagtcgcagctaccaataacctgtacattttccaggacaaggttaactag

SEQ ID NO: 255352 - DNA, 1332 bp, Artificial Sequence
  derived and/or modified sequence
atggaggaggacatcgacacccggaagatcaacaacagcttcctgcgtgaccattcatacgcaactgaagccgatatcatttctaccgtcgagttcaatcacacgggagagctgctggccaccggtgataaaggcgggagggtggtgatatttcagagggaacaagagagtaagaatcaggtccaccgtcgaggagagtacaacgtgtacagtacattccagagccatgagcccgagtttgactatctaaaaagtttggagattgaggagaagatcaataagattcgctggctgccccagcaaaatgccgcatatttcctgctctcaacgaatgacaagactgtgaagctctggaaggtcagtgagcgcgacaaacgacctgagggatataacctaaaagacgaggagggccgcctgagagatcctgccaccataactaccctgcgggtgccagtgttaaggcctatggaccttatggtggaggccacgccccgacgtgtattcgcaaacgcacacacatatcacataaactcgatctctgtgaatagtgactatgaaacgtacatgtccgctgatgatctgcggataaacctctggaatttcgagatcactaaccagagctttaatatagtggatataaaacccgccaatatggaagagctgaccgaagttatcaccgcagcagagttccatccacaccattgtaacactttcgtatactctagttcaaaaggcacaattcggctttgtgatatgcgggccagtgcactctgtgatcgccacactaaattttttgaggagccagaggatcctagtaaccggtccttctttagtgagattatatctagtataagtgatgttaagttctcccacagcggaagatacatcatgactcgtgactatctgaccgtaaaggtttgggacctgaatatggaaaatcgccctatcgaaacttaccaggttcatgattaccttagatcaaagctatgctctctgtacgaaaatgactgcatatttgataaatttgagtgcgtgtggaacggaagcgacagcgtaatcatgaccgggtcgtataacaacttcttcaggatgttcgacaggaataccaaaagagacgtgactttggaagcatccagggaaaattcaaaacccagagcaatcctcaagcctcggaaagtctgcgttggggggaagagacgcaaggatgaaattagcgtggactcccttgattttagcaaaaaaatcttgcatacggcctggcacccgagtgagaacatcattgccgtggcggctactaacaacctctatattttccaggataaggtcaactag

SEQ ID NO: 255353 - DNA, 1332 bp, Artificial Sequence
  derived and/or modified sequence
atggaagaggacatcgacacaagaaagatcaacaattcgtttctgagagatcatagctacgccactgaggcagatatcatttccaccgtggaatttaaccatactggtgaactgctagccaccggcgacaagggcggacgcgtcgtcatcttccagagggagcaggagtctaagaatcaggtgcacagaaggggcgagtacaatgtgtatagcacctttcagagccacgaacctgagttcgactatcttaaatctctggaaatcgaagagaagatcaacaaaatcagatggcttccgcagcagaacgccgcttactttttgctgtccactaacgataaaaccgtgaagctgtggaaagtgagcgagcgagataagagaccagagggctacaacctcaaggacgaggagggtcgcttgagagatcccgcaactatcactacccttcgggttccagtacttcggccaatggacctgatggttgaagccacaccccgtagagtctttgcaaatgcgcatacctatcacatcaattctatcagtgtaaattcagactacgagacatatatgtctgctgatgacctgaggattaacctttggaatttcgagatcaccaaccagagctttaatattgtcgacatcaaaccagccaacatggaagagctgaccgaggtgatcacggctgctgagttccatcctcaccactgcaacacatttgtgtacagctcgtcgaaaggcacgatacgactttgtgacatgagggccagtgcactgtgcgataggcacactaagtttttcgaagaaccggaggatccctcaaatagatctttcttttccgaaattatctcatctatctccgatgtgaaattttcacatagtggtaggtatattatgacgagagactatctcacggtgaaggtctgggatctgaacatggagaacagacctatcgaaacctaccaggtgcatgattacttgagatccaagctgtgtagcctgtacgagaatgattgcatttttgacaagttcgagtgtgtatggaacggttccgattctgtgatcatgaccggtagctataataacttcttccggatgttcgaccgtaatactaaacgcgacgtgactctggaagcctctcgagagaactctaagccaagagccattctgaaacccagaaaagtctgtgtgggcggtaagcgacgcaaggacgaaataagcgtggactcgttagacttttctaagaagattttgcatacagcatggcatccaagcgaaaatattatagccgtcgccgctactaataacctgtacatctttcaggacaaagttaactag

SEQ ID NO: 255354 - DNA, 1332 bp, Artificial Sequence
  derived and/or modified sequence
atggaagaagatattgacacacggaaaattaacaactctttcctgagggaccactcctacgcgactgaggccgacatcatttcaactgtggagtttaaccacacaggagaactgctcgcaactggagataagggcggtcgggtcgtgattttccaaagggagcaggaaagcaaaaaccaggttcataggcggggagagtataacgtgtactcaacgttccagtcacacgaacctgaatttgattacctgaagagcctggagattgaggaaaaaatcaataagatcagatggttaccccagcaaaacgcggcttactttctcctgtctaccaacgacaagacagtgaaactgtggaaggtcagcgaacgggacaaacggccagaaggttacaacctgaaggacgaagaagggcgattgagggatccagcaactatcacaacactgagggtgccagtgttaagacccatggatctgatggtcgaggccacaccacgtcgcgttttcgcgaacgcccacacctaccacattaacagcatcagcgtaaactcagactacgagacctacatgtccgctgacgaccttcgcattaatctgtggaacttcgaaattaccaatcaatcattcaacatcgtggacatcaaacctgctaatatggaggagttgactgaagttattaccgccgctgagtttcatccccatcattgcaataccttcgtttattccagctcaaaggggaccatcagactgtgcgacatgcgggcttccgccctgtgcgaccgtcacaccaaatttttcgaggagccagaggacccctccaacagatctttcttctcggagatcatcagctctatcagcgacgtgaaattcagccattccgggagatatattatgacgcgcgattatctcacagtgaaggtgtgggatcttaacatggaaaataggccaatcgagacgtaccaggttcacgattacctgaggtctaaactgtgttccttgtatgagaacgactgtattttcgacaagttcgagtgcgtttggaacggctcagacagcgtcattatgaccgggagctacaacaacttttttcggatgttcgataggaacacaaagagagacgtgactctcgaagcatccagagaaaatagcaaaccacgagcaatactgaagcctaggaaggtctgtgtcggaggtaaacgtagaaaggacgaaatttcagttgacagcctggactttagtaaaaaaattctgcacaccgcatggcatcctagcgagaacatcatagctgtggccgctacaaataacctgtacatctttcaagataaagtaaattag

SEQ ID NO: 255355 - DNA, 1332 bp, Artificial Sequence
  derived and/or modified sequence
atggaagaggatattgatacgcgtaagatcaacaacagcttccttcgcgatcattcttatgccactgaggctgacattatcagcactgtcgagtttaaccacaccggggagctgctggccacgggagataagggcggaagagtggtgatctttcaaagagaacaggagtctaagaatcaggtgcaccgcaggggagaatataacgtgtatagcacctttcagtcgcatgagcccgaatttgactacctgaagtccttggaaatagaggagaagatcaacaagattcgctggctgccacagcaaaatgcggcatactttctcctcagcaccaatgacaagacagtaaaactgtggaaagtgtcagagagagacaagcgacccgaggggtataacctgaaggatgaagaggggagattgagggatcctgcaactatcaccacactgcgggttccggtgctccggcctatggacttgatggttgaggctacccctcgacgcgtgttcgcaaacgcccatacctatcacatcaacagcatcagcgtcaactccgattacgaaacatatatgtcggcggatgatctgcgaattaacctatggaacttcgagattacaaatcagtcctttaatatcgtggacatcaagcccgctaacatggaagagctaactgaggtaatcacagctgcagaatttcatcctcatcactgcaacacttttgtttattcctccagtaaagggactatcagactgtgtgatatgcgagcttcagccctttgtgacaggcacaccaaatttttcgaagaacctgaggatccttcaaacaggagctttttcagcgagatcatctctagtattagcgacgtgaagtttagtcattctggacgctacatcatgacccgagattatctgacggtaaaggtctgggacctgaatatggagaatcgccctattgagacctatcaggtacatgattatttgagatcgaaattgtgtagtctttatgagaacgactgtatcttcgacaaatttgaatgcgtgtggaacggtagtgacagtgtgataatgaccggatcttacaacaacttcttccggatgtttgacagaaacaccaaacgcgacgtcacgctggaggcttcccgtgaaaattccaagccacgcgcaatcctgaagcctcgcaaggtgtgcgtgggaggcaagcgtcggaaggacgaaatatctgtggatagtcttgacttctccaagaagatattacacactgcgtggcatccatcagagaatatcatcgctgtagcagctaccaacaatctttatatttttcaagacaaggtcaactag

SEQ ID NO: 255356 - DNA, 1530 bp, Artificial Sequence
  derived and/or modified sequence
atgttactgtccttacccgctctgcacctgcagactagtgagcaccacccattcttccagctcccacaccgccgtctcggcccatggtgttctcctactggatcccccgctcccctgtcatgtgaaacaggttgcggggaaggcagctggattctggtctgtcgactcctggtcccaacacaggtgtcattgttaagcatggaagaagatatagatactcggaaaattaacaattcattcctccgcgaccactcctacgctacggaagcagacattatctctacagtcgagtttaatcacaccggagagttattggcaactggggataagggcggtcgtgtggtaatttttcaaagggagcaggaaagcaagaatcaggtacacagacgaggcgagtacaacgtctacagcacctttcaatcccacgagccagagtttgactatcttaagtcactggagatcgaggaaaaaatcaacaaaatccggtggttgccacagcaaaacgccgcttactttctgttatctaccaacgacaagaccgtcaagttatggaaggttagtgaaagggataaacgacccgagggatataacctgaaagacgaggaaggcaggctgagagaccccgctacaatcaccactttgcgagtgccagtcctgcggccaatggatctgatggtcgaggccaccccccgacgagtgtttgccaatgctcacacctatcatataaacagtattagcgtgaatagcgattacgaaacttatatgtcggccgacgatctgcgcatcaatctgtggaactttgagattaccaatcagtctttcaatatcgtggacattaaaccagctaatatggaggaactgactgaggtgattactgccgctgagtttcacccacaccactgtaatacgtttgtatattctagctctaagggcactatccgtctgtgcgacatgagagcctctgcattgtgtgaccgccacaccaagttcttcgaggaaccggaagacccatctaataggtcttttttttcggagatcatatctagcattagtgacgtgaagttcagtcattccggaaggtacatcatgactcgggattacttaactgtgaaggtttgggacttaaacatggagaacaggcctatcgagacatatcaggtgcacgactacctaaggtcgaagctgtgttctctctatgaaaacgactgcatcttcgataagtttgaatgtgtttggaatgggagtgactctgtgatcatgaccggatcctataacaatttttttaggatgtttgaccgtaacacaaaacgagatgtaactctcgaagcatcccgcgaaaattccaagcccagggcgatcctcaagccgcgtaaagtctgtgtgggcggtaagcggaggaaggatgaaatcagcgtggattcccttgacttctctaagaagatcctccatacagcgtggcacccttctgagaacatcattgccgtggccgctacgaataacctatatatctttcaggacaaggtgaactag

SEQ ID NO: 255357 - DNA, 1332 bp, Artificial Sequence
  derived and/or modified sequence
atggaggaagacattgatacgaggaagattaataattctttcctcagagatcacagctacgctacagaagcagacataatctctaccgtagagtttaatcacacaggggagctcctcgctaccggggacaagggtggaagagtggtgattttccagagggaacaggaatccaaaaaccaggtccaccgcagaggggaatacaacgtgtatagtacattccagagccacgaacccgaattcgactatttgaagtcgctggaaattgaggagaagatcaacaaaattcgctggctgcctcagcagaatgccgcatatttccttctgtctactaatgataaaaccgtaaagctgtggaaagtgtcagaaagggataagcggccagaggggtacaaccttaaagatgaagagggcaggcttagggatccagcgacaatcaccaccttgcgggttcctgtgctgagacccatggacttgatggtggaggccaccccacgtcgggtgttcgccaatgctcatacataccacatcaactccatttccgtcaatagcgactatgagacatacatgtccgcagacgatctgagaatcaatttgtggaatttcgagattacaaatcaaagcttcaatatagttgacattaaaccagctaacatggaggagctgactgaggtgattacagccgctgagttccatccccatcattgtaatacgttcgtctactcaagctctaagggcacaatcagactttgcgatatgcgagcctcggccctgtgtgatcggcataccaaattcttcgaggaacctgaggatccatccaaccggtctttcttttctgagattatttcatctatttcggatgtgaagtttagccacagtggcagatacatcatgacccgagattacctgaccgtgaaagtctgggatctgaatatggagaatcgcccaatcgaaacgtaccaggtccacgattacttgaggagcaaattgtgtagtctttacgagaacgactgcatcttcgataagttcgagtgcgtgtggaatggcagtgacagtgtaatcatgactggatcttataacaattttttccgaatgtttgatcggaacaccaaaagggacgtgactcttgaggcctcgagagaaaactccaagcctagagctatcctgaaaccccgtaaagtgtgtgtgggcggaaaacgccgaaaagatgagatctcggtggactcactcgattttagcaagaaaatattacacactgcttggcatccatcggagaatattattgctgttgccgctactaacaacctatatattttccaggacaaagtgaattag

SEQ ID NO: 255358 - DNA, 2367 bp, Artificial Sequence
  derived and/or modified sequence
atatcctgctggatttctcttgcgaaaagagaaactcaccacacgggaaaaggtagaggtttcaggcagagcatttcagcgtgtgtttacaggcaggactgacttactcagcaaatcctgttcagaggagcttcagccaatgaagaggctatatcccggcttgcttgggggcttctgagtttgagctgcatgcagaaatgtaaggcagtgcttcctggcgctgatggcaaaatgggacccatctccagttattcctcgggcaccccagctttgcaaatctgggaaagaacctacataaacatattggtgatgtagccagcttaaaaggccgagagaatccttatggattcaggagactgtttttttatttagatttttattttttatttggaagatgaaatgcttctctcgttacctgccttacatcttcagacctccgaacaccatcctttcttccagctgccacacagaaggctcggaccatggtgcagtcccactggctcccctgcccccctctcctgtgagactggctgcggggagggatcatggatacttgtctgccggcttctggttcccacgcaagtaagcctgctgtcaatggaggaggacattgatacccgcaaaatcaacaacagtttcctgcgcgaccacagctatgcgaccgaagctgacattatctctacggtagaattcaaccacacgggagaattactagcgacaggggacaaggggggtcgggttgtaatatttcaacgagagcaggagagtaaaaatcaggttcatcgtaggggtgaatacaatgtttacagcacattccagagccatgaacccgagttcgattacctgaagagtttagaaatagaagaaaaaatcaataaaataagatggctcccccagcagaatgcagcttactttcttctgtctactaatgataaaactgtgaagctgtggaaagtcagcgagcgtgataagaggccagaaggctacaatctgaaagatgaggagggccggctccgggatcctgccaccatcacaaccctgcgggtgcctgtcctgagacccatggacctgatggtggaggccaccccacgaagagtatttgccaacgcacacacatatcacatcaactccatatctgtcaacagcgactatgaaacctacatgtccgctgatgacctgaggattaacctatggaactttgaaataaccaatcaaagttttaatattgtggacattaagccagccaacatggaggagctcacggaggtgatcacagcagccgagttccacccccatcattgcaacaccttcgtgtacagcagcagcaaagggacaatccggctgtgtgacatgcgggcatctgccctgtgtgacaggcacaccaaattttttgaagagccggaagatccaagcaacagatcatttttctctgaaattatctcttcgatttcggatgtgaagttcagccacagtgggaggtatatcatgaccagggactacttgaccgtcaaagtctgggatctcaacatggaaaaccgccccatcgagacttaccaggttcatgactacctccgcagcaagctgtgttccctctatgaaaatgactgcatttttgataaatttgagtgtgtgtggaatgggtcagacagtgtcatcatgacaggctcctacaacaacttcttcaggatgttcgacagaaacaccaagcgtgatgtgacccttgaggcttcgagggaaaacagcaagccccgggctatcctcaaaccccgaaaagtgtgtgtggggggcaagcggagaaaagacgagatcagtgtcgacagtctggactttagcaaaaagatcttgcatacagcttggcatccttcagaaaatattatagcagtggcggctacaaataacctatatatattccaggacaaggttaactaggtggacaagttattacttaataatctcacatactgaatactagtcaaacaagtttttaaatgtttctttgggtcttcatttgatgcattgactttaatttccctatacaggaaatgattggaatagaattaaaaggagtccaacattcccagctccccagttctaagaaacttttgtcaaacccaataggtttgggacacttctgtttagaattgaaagctgccagctaacagtaattcttccatagttgacttgaacttctgatgcttttattgcccagttttctctggtgggtccagtgttttgttcctaggtgtctgctgcgataaaatgaggttgtctgtagtatttaaggagaaaagagataagttttttttaattaagcaattccatttgattgaaaaaaatcaacaaaaaataaacaccgtttactcttag

SEQ ID NO: 255359 - DNA, 3431 bp, Artificial Sequence
  derived and/or modified sequence
ggccaggcaagcctgaatcctgtccctgccatctcgccactgcagctcgggtccagaaaggcaccattttgtcgcggctgcccgctctcccagggggaggagggatcttttttgcattttggagcggctgccaaggaggggaacctgttgggcatctccccagacccgcttgtgagcgcctccggggcgggcgggcgggaccagacccctcggggcacggcgtatcttggcacccggaggcagcggaggcaggcgcagcatcctcgctgggaactggagctggagtgagcgcaccgcgcgggaggagccgccgcagcctcgcagaacccgagtggaggaggtgacagctccattgccgggtttttattttttttctctccgcctccccgtctcctcctcaggctcggaccatggtgcagtcccactggctcccctgcccccctctcctgtgagactggctgcggggagggatcatggatacttgtctgccggcttctggttcccacgcaagtaagcctgctgtcaatggaggaggacattgatacccgcaaaatcaacaacagtttcctgcgcgaccacagctatgcgaccgaagctgacattatctctacggtagaattcaaccacacgggagaattactagcgacaggggacaaggggggtcgggttgtaatatttcaacgagagcaggagagtaaaaatcaggttcatcgtaggggtgaatacaatgtttacagcacattccagagccatgaacccgagttcgattacctgaagagtttagaaatagaagaaaaaatcaataaaataagatggctcccccagcagaatgcagcttactttcttctgtctactaatgataaaactgtgaagctgtggaaagtcagcgagcgtgataagaggccagaaggctacaatctgaaagatgaggagggccggctccgggatcctgccaccatcacaaccctgcgggtgcctgtcctgagacccatggacctgatggtggaggccaccccacgaagagtatttgccaacgcacacacatatcacatcaactccatatctgtcaacagcgactatgaaacctacatgtccgctgatgacctgaggattaacctatggaactttgaaataaccaatcaaagttttaatattgtggacattaagccagccaacatggaggagctcacggaggtgatcacagcagccgagttccacccccatcattgcaacaccttcgtgtacagcagcagcaaagggacaatccggctgtgtgacatgcgggcatctgccctgtgtgacaggcacaccaaattttttgaagagccggaagatccaagcaacagatcatttttctctgaaattatctcttcgatttcggatgtgaagttcagccacagtgggaggtatatcatgaccagggactacttgaccgtcaaagtctgggatctcaacatggaaaaccgccccatcgagacttaccaggttcatgactacctccgcagcaagctgtgttccctctatgaaaatgactgcatttttgataaatttgagtgtgtgtggaatgggtcagacagtgtcatcatgacaggctcctacaacaacttcttcaggatgttcgacagaaacaccaagcgtgatgtgacccttgaggcttcgagggaaaacagcaagccccgggctatcctcaaaccccgaaaagtgtgtgtggggggcaagcggagaaaagacgagatcagtgtcgacagtctggactttagcaaaaagatcttgcatacagcttggcatccttcagaaaatattatagcagtggcggctacaaataacctatatatattccaggacaaggttaactaggtggacaagttattacttaataatctcacatactgaatactagtcaaacaagtttttaaatgtttctttgggtcttcatttgatgcattgactttaatttccctatacaggaaatgattggaatagaattaaaaggagtccaacattcccagctccccagttctaagaaacttttgtcaaacccaataggtttgggacacttctgtttagaattgaaagctgccagctaacagtaattcttccatagttgacttgaacttctgatgcttttattgcccagttttctctggtgggtccagtgttttgttcctaggtgtctgctgcgataaaatgaggttgtctgtagtatttaaggagaaaagagataagttttttttaattaagcaattccatttgattgaaaaaaatcaacaaaaaataaacaccgtttactcttagacaaattcttcttgttttgtgaaaaaccagaactagtcagtatctcctgcccctccaccatttttttttccattttccattttcctttgaacaatttcatttaagccagagatttattgcatgaagctgagaagaggatgcagaatgacaaggaaagggcacatcaaccctgctatgctctttttttgtaagctccatagaaacagcctgagaatttggctagggaacttgaatgcttcaggggacagaaagagagcactttcgacacagtgcttcccagagtgagcttggcagggccaggcggggccaaattccatctgctgccttgttactcttgctttttgtgctcttaaatggctccatataatcttctacttacatgttccttggcttttttctcttcaaccttttccagcttatttattccattgacttctaaaggccgagtcctgggtgcttattatctggtgttctaaatgaagcagtaagttggaagcagtgccaccacccctgagtccctgagaaaggctggtctgttctttttgggtgtttctcctaagcagcaccctcccctcctcctggttttggtaaccaaaagtaacaatccatcaacctccattgtacctagaacaaaaatagccaataaaaacgctgagttgtgaagtccaatcaggcacttctaactcaccccaagctcgccatctggaaaaacagaccagaaggctctcttctacagaaatgaactgtggggaaatcaagcagctgtgacatgaagtgaatgaagtccacttgaagctgtggaagatggttcatccttttccccagttgaggatccagatttataacttctagaaagccatttccagaaggttctatgtggcacacccctaggaaaggcactaaatgcatgcaaaggatttataaacttaggaaagtagatgggtggagtccagaaaactggttctgggttaatatctctacatctgtcttgatgactcatttctcctaactcccatttagtgcagggtaaatggtttgagatgagagtttttcaatgaaagggaaattttctttcagtttacagatgtattagaagtcctgactttcaagtgtaatttgctttggaggaggaaaaa

SEQ ID NO: 255360 - DNA, 2262 bp, Artificial Sequence
  derived and/or modified sequence
gcaaatcctgttcagaggagcttcagccaatgaagaggctatatcccggcttgcttgggggcttctgagtttgagctgcatgcagaaatgtaaggcagtgcttcctggcgctgatggcaaaatgggacccatctccagttattcctcgggcaccccagctttgcaaatctgggaaagaacctacataaacatattggtgatgtagccagcttaaaaggccgagagaatccttatggattcaggagactgtttttttatttagatttttattttttatttggaagatgaaatgcttctctcgttacctgccttacatcttcagacctccgaacaccatcctttcttccagctgccacacagaaggctcggaccatggtgcagtcccactggctcccctgcccccctctcctgtgagactggctgcggggagggatcatggatacttgtctgccggcttctggttcccacgcaagtaagcctgctgtcaatggaggaggacattgatacccgcaaaatcaacaacagtttcctgcgcgaccacagctatgcgaccgaagctgacattatctctacggtagaattcaaccacacgggagaattactagcgacaggggacaaggggggtcgggttgtaatatttcaacgagagcaggagagtaaaaatcaggttcatcgtaggggtgaatacaatgtttacagcacattccagagccatgaacccgagttcgattacctgaagagtttagaaatagaagaaaaaatcaataaaataagatggctcccccagcagaatgcagcttactttcttctgtctactaatgataaaactgtgaagctgtggaaagtcagcgagcgtgataagaggccagaaggctacaatctgaaagatgaggagggccggctccgggatcctgccaccatcacaaccctgcgggtgcctgtcctgagacccatggacctgatggtggaggccaccccacgaagagtatttgccaacgcacacacatatcacatcaactccatatctgtcaacagcgactatgaaacctacatgtccgctgatgacctgaggattaacctatggaactttgaaataaccaatcaaagttttaatattgtggacattaagccagccaacatggaggagctcacggaggtgatcacagcagccgagttccacccccatcattgcaacaccttcgtgtacagcagcagcaaagggacaatccggctgtgtgacatgcgggcatctgccctgtgtgacaggcacaccaaattttttgaagagccggaagatccaagcaacagatcatttttctctgaaattatctcttcgatttcggatgtgaagttcagccacagtgggaggtatatcatgaccagggactacttgaccgtcaaagtctgggatctcaacatggaaaaccgccccatcgagacttaccaggttcatgactacctccgcagcaagctgtgttccctctatgaaaatgactgcatttttgataaatttgagtgtgtgtggaatgggtcagacagtgtcatcatgacaggctcctacaacaacttcttcaggatgttcgacagaaacaccaagcgtgatgtgacccttgaggcttcgagggaaaacagcaagccccgggctatcctcaaaccccgaaaagtgtgtgtggggggcaagcggagaaaagacgagatcagtgtcgacagtctggactttagcaaaaagatcttgcatacagcttggcatccttcagaaaatattatagcagtggcggctacaaataacctatatatattccaggacaaggttaactaggtggacaagttattacttaataatctcacatactgaatactagtcaaacaagtttttaaatgtttctttgggtcttcatttgatgcattgactttaatttccctatacaggaaatgattggaatagaattaaaaggagtccaacattcccagctccccagttctaagaaacttttgtcaaacccaataggtttgggacacttctgtttagaattgaaagctgccagctaacagtaattcttccatagttgacttgaacttctgatgcttttattgcccagttttctctggtgggtccagtgttttgttcctaggtgtctgctgcgataaaatgaggttgtctgtagtatttaaggagaaaagagataagttttttttaattaagcaattccatttgattgaaaaaaatcaacaaaaaataaacaccgtttactcttagacaaa

SEQ ID NO: 255361 - DNA, 2088 bp, Artificial Sequence
  derived and/or modified sequence
gcatgcgccccactgcagcaaagagcagccgcagcctctgcctcggccaccactgctgctgggaaagagtcgtggggctgctgacgcggttgggaggagcctcgcctttaatgcaccagccgcctccagcctcctgcagcagcagcagcagcagcagcagcagcagctgcgagtgcgcgcgtgtgggtgtgagggctcggaccatggtgcagtcccactggctcccctgcccccctctcctgtgagactggctgcggggagggatcatggatacttgtctgccggcttctggttcccacgcaagtaagcctgctgtcaatggaggaggacattgatacccgcaaaatcaacaacagtttcctgcgcgaccacagctatgcgaccgaagctgacattatctctacggtagaattcaaccacacgggagaattactagcgacaggggacaaggggggtcgggttgtaatatttcaacgagagcaggagagtaaaaatcaggttcatcgtaggggtgaatacaatgtttacagcacattccagagccatgaacccgagttcgattacctgaagagtttagaaatagaagaaaaaatcaataaaataagatggctcccccagcagaatgcagcttactttcttctgtctactaatgataaaactgtgaagctgtggaaagtcagcgagcgtgataagaggccagaaggctacaatctgaaagatgaggagggccggctccgggatcctgccaccatcacaaccctgcgggtgcctgtcctgagacccatggacctgatggtggaggccaccccacgaagagtatttgccaacgcacacacatatcacatcaactccatatctgtcaacagcgactatgaaacctacatgtccgctgatgacctgaggattaacctatggaactttgaaataaccaatcaaagttttaatattgtggacattaagccagccaacatggaggagctcacggaggtgatcacagcagccgagttccacccccatcattgcaacaccttcgtgtacagcagcagcaaagggacaatccggctgtgtgacatgcgggcatctgccctgtgtgacaggcacaccaaattttttgaagagccggaagatccaagcaacagatcatttttctctgaaattatctcttcgatttcggatgtgaagttcagccacagtgggaggtatatcatgaccagggactacttgaccgtcaaagtctgggatctcaacatggaaaaccgccccatcgagacttaccaggttcatgactacctccgcagcaagctgtgttccctctatgaaaatgactgcatttttgataaatttgagtgtgtgtggaatgggtcagacagtgtcatcatgacaggctcctacaacaacttcttcaggatgttcgacagaaacaccaagcgtgatgtgacccttgaggcttcgagggaaaacagcaagccccgggctatcctcaaaccccgaaaagtgtgtgtggggggcaagcggagaaaagacgagatcagtgtcgacagtctggactttagcaaaaagatcttgcatacagcttggcatccttcagaaaatattatagcagtggcggctacaaataacctatatatattccaggacaaggttaactaggtggacaagttattacttaataatctcacatactgaatactagtcaaacaagtttttaaatgtttctttgggtcttcatttgatgcattgactttaatttccctatacaggaaatgattggaatagaattaaaaggagtccaacattcccagctccccagttctaagaaacttttgtcaaacccaataggtttgggacacttctgtttagaattgaaagctgccagctaacagtaattcttccatagttgacttgaacttctgatgcttttattgcccagttttctctggtgggtccagtgttttgttcctaggtgtctgctgcgataaaatgaggttgtctgtagtatttaaggagaaaagagataagttttttttaattaagcaattccatttgattgaaaaaaatcaacaaaaaataaacaccgtttactcttag

SEQ ID NO: 255362 - DNA, 1332 bp, Artificial Sequence
  derived and/or modified sequence
atggaggaggacatcgacaccagaaagatcaacaacagcttcctgagagaccacagctacgccaccgaggccgacatcatcagcaccgtggagttcaaccacaccggcgagctgctggccaccggcgacaagggcggcagagtggtgatcttccagagagagcaggagagcaagaaccaggtgcacagaagaggcgagtacaacgtgtacagcaccttccagagccacgagcccgagttcgactacctgaagagcctggagatcgaggagaagatcaacaagatcagatggctgccccagcagaacgccgcctacttcctgctgagcaccaacgacaagaccgtgaagctgtggaaggtgagcgagagagacaagagacccgagggctacaacctgaaggacgaggagggcagactgagagaccccgccaccatcaccaccctgagagtgcccgtgctgagacccatggacctgatggtggaggccacccccagaagagtgttcgccaacgcccacacctaccacatcaacagcatcagcgtgaacagcgactacgagacctacatgagcgccgacgacctgagaatcaacctgtggaacttcgagatcaccaaccagagcttcaacatcgtggacatcaagcccgccaacatggaggagctgaccgaggtgatcaccgccgccgagttccacccccaccactgcaacaccttcgtgtacagcagcagcaagggcaccatcagactgtgcgacatgagagccagcgccctgtgcgacagacacaccaagttcttcgaggagcccgaggaccccagcaacagaagcttcttcagcgagatcatcagcagcatcagcgacgtgaagttcagccacagcggcagatacatcatgaccagagactacctgaccgtgaaggtgtgggacctgaacatggagaacagacccatcgagacctaccaggtgcacgactacctgagaagcaagctgtgcagcctgtacgagaacgactgcatcttcgacaagttcgagtgcgtgtggaacggcagcgacagcgtgatcatgaccggcagctacaacaacttcttcagaatgttcgacagaaacaccaagagagacgtgaccctggaggccagcagagagaacagcaagcccagagccatcctgaagcccagaaaggtgtgcgtgggcggcaagagaagaaaggacgagatcagcgtggacagcctggacttcagcaagaagatcctgcacaccgcctggcaccccagcgagaacatcatcgccgtggccgccaccaacaacctgtacatcttccaggacaaggtgaactag

SEQ ID NO: 255363 - DNA, 1530 bp, Artificial Sequence
  derived and/or modified sequence
atgctgctgagcctgcccgccctgcacctgcagaccagcgagcaccaccccttcttccagctgccccacagaagactgggcccctggtgcagccccaccggcagccccgcccccctgagctgcgagaccggctgcggcgagggcagctggatcctggtgtgcagactgctggtgcccacccaggtgagcctgctgagcatggaggaggacatcgacaccagaaagatcaacaacagcttcctgagagaccacagctacgccaccgaggccgacatcatcagcaccgtggagttcaaccacaccggcgagctgctggccaccggcgacaagggcggcagagtggtgatcttccagagagagcaggagagcaagaaccaggtgcacagaagaggcgagtacaacgtgtacagcaccttccagagccacgagcccgagttcgactacctgaagagcctggagatcgaggagaagatcaacaagatcagatggctgccccagcagaacgccgcctacttcctgctgagcaccaacgacaagaccgtgaagctgtggaaggtgagcgagagagacaagagacccgagggctacaacctgaaggacgaggagggcagactgagagaccccgccaccatcaccaccctgagagtgcccgtgctgagacccatggacctgatggtggaggccacccccagaagagtgttcgccaacgcccacacctaccacatcaacagcatcagcgtgaacagcgactacgagacctacatgagcgccgacgacctgagaatcaacctgtggaacttcgagatcaccaaccagagcttcaacatcgtggacatcaagcccgccaacatggaggagctgaccgaggtgatcaccgccgccgagttccacccccaccactgcaacaccttcgtgtacagcagcagcaagggcaccatcagactgtgcgacatgagagccagcgccctgtgcgacagacacaccaagttcttcgaggagcccgaggaccccagcaacagaagcttcttcagcgagatcatcagcagcatcagcgacgtgaagttcagccacagcggcagatacatcatgaccagagactacctgaccgtgaaggtgtgggacctgaacatggagaacagacccatcgagacctaccaggtgcacgactacctgagaagcaagctgtgcagcctgtacgagaacgactgcatcttcgacaagttcgagtgcgtgtggaacggcagcgacagcgtgatcatgaccggcagctacaacaacttcttcagaatgttcgacagaaacaccaagagagacgtgaccctggaggccagcagagagaacagcaagcccagagccatcctgaagcccagaaaggtgtgcgtgggcggcaagagaagaaaggacgagatcagcgtggacagcctggacttcagcaagaagatcctgcacaccgcctggcaccccagcgagaacatcatcgccgtggccgccaccaacaacctgtacatcttccaggacaaggtgaactag

SEQ ID NO: 255364 - protein, 443 aa, Artificial Sequence
  derived and/or modified sequence
MEEDIDTRKINNSFLRDHSYATEADIISTVEFNHTGELLATGDKGGRVVIFQREQESKNQVHRRGEYNVYSTFQSHEPEFDYLKSLEIEEKINKIRWLPQQNAAYFLLSTNDKTVKLWKVSERDKRPEGYNLKDEEGRLRDPATITTLRVPVLRPMDLMVEATPRRVFANAHTYHINSISVNSDYETYMSADDLRINLWNFEITNQSFNIVDIKPANMEELTEVITAAEFHPHHCNTFVYSSSKGTIRLCDMRASALCDRHTKFFEEPEDPSNRSFFSEIISSISDVKFSHSGRYIMTRDYLTVKVWDLNMENRPIETYQVHDYLRSKLCSLYENDCIFDKFECVWNGSDSVIMTGSYNNFFRMFDRNTKRDVTLEASRENSKPRAILKPRKVCVGGKRRKDEISVDSLDFSKKILHTAWHPSENIIAVAATNNLYIFQDKVN

SEQ ID NO: 255365 - DNA, 2051 bp, Artificial Sequence
  derived and/or modified sequence
agcagcagcagcagcagctgcgagtgcgcgcgtgtgggtgtgagggtgagtgcgctggcgccggctgcagcgccctgcccagctccccgccagcttccctacccccgcctgccggagccgccctcccgtgggaccagcaccctcattccggccaggctcggaccatggtgcagtcccactggctcccctgcccccctctcctgtgagactggctgcggggagggatcatggatacttgtctgccggcttctggttcccacgcaagtaagcctgctgtcaatggaggaggacattgatacccgcaaaatcaacaacagtttcctgcgcgaccacagctatgcgaccgaagctgacattatctctacggtagaattcaaccacacgggagaattactagcgacaggggacaaggggggtcgggttgtaatatttcaacgagagcaggagagtaaaaatcaggttcatcgtaggggtgaatacaatgtttacagcacattccagagccatgaacccgagttcgattacctgaagagtttagaaatagaagaaaaaatcaataaaataagatggctcccccagcagaatgcagcttactttcttctgtctactaatgataaaactgtgaagctgtggaaagtcagcgagcgtgataagaggccagaaggctacaatctgaaagatgaggagggccggctccgggatcctgccaccatcacaaccctgcgggtgcctgtcctgagacccatggacctgatggtggaggccaccccacgaagagtatttgccaacgcacacacatatcacatcaactccatatctgtcaacagcgactatgaaacctacatgtccgctgatgacctgaggattaacctatggaactttgaaataaccaatcaaagttttaatattgtggacattaagccagccaacatggaggagctcacggaggtgatcacagcagccgagttccacccccatcattgcaacaccttcgtgtacagcagcagcaaagggacaatccggctgtgtgacatgcgggcatctgccctgtgtgacaggcacaccaaattttttgaagagccggaagatccaagcaacagatcatttttctctgaaattatctcttcgatttcggatgtgaagttcagccacagtgggaggtatatcatgaccagggactacttgaccgtcaaagtctgggatctcaacatggaaaaccgccccatcgagacttaccaggttcatgactacctccgcagcaagctgtgttccctctatgaaaatgactgcatttttgataaatttgagtgtgtgtggaatgggtcagacagtgtcatcatgacaggctcctacaacaacttcttcaggatgttcgacagaaacaccaagcgtgatgtgacccttgaggcttcgagggaaaacagcaagccccgggctatcctcaaaccccgaaaagtgtgtgtggggggcaagcggagaaaagacgagatcagtgtcgacagtctggactttagcaaaaagatcttgcatacagcttggcatccttcagaaaatattatagcagtggcggctacaaataacctatatatattccaggacaaggttaactaggtggacaagttattacttaataatctcacatactgaatactagtcaaacaagtttttaaatgtttctttgggtcttcatttgatgcattgactttaatttccctatacaggaaatgattggaatagaattaaaaggagtccaacattcccagctccccagttctaagaaacttttgtcaaacccaataggtttgggacacttctgtttagaattgaaagctgccagctaacagtaattcttccatagttgacttgaacttctgatgcttttattgcccagttttctctggtgggtccagtgttttgttcctaggtgtctgctgcgataaaatgaggttgtctgtagtatttaaggagaaaagagataagttttttttaattaagcaattccatttgattgaaaaaaatcaacaaaaaataaacaccgtttactcttagac

SEQ ID NO: 255366 - protein, 446 aa, Artificial Sequence
  derived and/or modified sequence
MKCFSRYLPYIFRPPNTILSSSCHTEADIISTVEFNHTGELLATGDKGGRVVIFQREQESKNQVHRRGEYNVYSTFQSHEPEFDYLKSLEIEEKINKIRWLPQQNAAYFLLSTNDKTVKLWKVSERDKRPEGYNLKDEEGRLRDPATITTLRVPVLRPMDLMVEATPRRVFANAHTYHINSISVNSDYETYMSADDLRINLWNFEITNQSFNIVDIKPANMEELTEVITAAEFHPHHCNTFVYSSSKGTIRLCDMRASALCDRHTKFFEEPEDPSNRSFFSEIISSISDVKFSHSGRYIMTRDYLTVKVWDLNMENRPIETYQVHDYLRSKLCSLYENDCIFDKFECVWNGSDSVIMTGSYNNFFRMFDRNTKRDVTLEASRENSKPRAILKPRKVCVGGKRRKDEISVDSLDFSKKILHTAWHPSENIIAVAATNNLYIFQDKVN

SEQ ID NO: 255367 - DNA, 1341 bp, Artificial Sequence
  derived and/or modified sequence
atgaagtgcttctcccgctacctgccatacatctttaggccacctaacactattttgagcagttcttgtcacacggaggctgatattattagcacggtggagttcaaccatactggtgaattgctggctacgggggacaaaggaggacgggtcgtgattttccagcgcgagcaggagtcgaagaaccaggtgcataggaggggcgagtacaatgtctactctaccttccagtctcatgaaccagagttcgactacctcaagtctctggaaattgaagagaagatcaacaagatccggtggcttcctcagcaaaacgccgcgtatttcctactgtctaccaatgataagaccgtcaaactctggaaggtgtccgagcgcgataaacggccagagggttataaccttaaagatgaagaggggaggctgagagacccggccacgattaccacgctgagagttccagtactgaggccaatggatctcatggtggaggcaacaccaagacgagtgtttgctaacgctcatacctaccacattaacagcatctccgtgaattctgattatgagacctacatgtcggccgacgacctgagaattaatctgtggaatttcgaaatcactaatcagtcatttaacatagtggacattaaacctgctaatatggaggagttaactgaggtgattactgcagccgaatttcatccgcaccactgcaacacatttgtgtacagctctagtaagggaacaatcaggttgtgtgacatgcgcgctagtgccctttgtgatcggcacaccaaattttttgaagagccagaggatccaagcaaccgcagctttttttcagagattatctcaagtatcagcgacgttaagtttagccactctgggaggtacataatgacgcgcgattatctgacagtcaaggtttgggatcttaacatggagaatcggcctatcgagacctaccaggtacatgattacctgaggtctaaactgtgtagcttgtacgagaacgactgtatttttgacaagtttgaatgcgtgtggaacggcagcgactctgtgataatgaccgggtcctacaacaacttcttcagaatgtttgacaggaataccaagagggatgttaccctcgaggcatctcgcgaaaactctaagccacgcgccatcctgaagcctcgcaaggtgtgtgtaggagggaaaaggcgaaaggatgagatcagtgttgattctttggattttagcaagaaaatcctacacaccgcctggcacccaagtgaaaatatcattgcggtggccgccaccaacaacttatatatcttccaagacaaggtcaactag

SEQ ID NO: 255368 - DNA, 1341 bp, Artificial Sequence
  derived and/or modified sequence
atgaagtgcttcagccgctacctgccctacatcttccggccccccaacaccatcctgagcagcagctgccacacagaagctgacatcatcagcacagtggagttcaaccacactggagagctgctggccaccggggacaagggcggccgggtggtgatcttccagcgggagcaggagagcaagaaccaggtgcaccggcggggggagtacaacgtgtacagcaccttccagagccatgagcctgagtttgactacctgaagagcctggagattgaggagaagatcaacaagatccgctggctgccccagcagaatgctgcctacttcctgctgagcaccaatgacaagacagtgaagctgtggaaggtgtctgagcgggacaagaggcctgagggctacaacctgaaggatgaggagggccgcctgcgggaccctgccaccatcaccaccctgcgggtgcctgtgctgcggcccatggacctgatggtggaggccaccccccggcgggtgtttgccaatgcccacacctaccacatcaacagcatctctgtgaacagcgactatgagacctacatgtctgcagatgacctgcgcatcaacctgtggaactttgagatcaccaaccagagcttcaacatcgtggacatcaagccagccaacatggaggagctgacagaggtgatcacagctgctgagttccacccccaccactgcaacacctttgtgtacagcagcagcaagggcaccatccggctgtgtgacatgagggccagcgccctgtgtgacagacacaccaagttctttgaggagcctgaggaccccagcaacagaagcttcttcagcgagatcatcagcagcatcagtgatgtgaagttcagccacagcggccgctacatcatgacccgggactacctgactgtgaaggtgtgggacctgaacatggagaaccggcccatcgagacctaccaggtgcatgactacctgcggagcaagctgtgcagcctgtatgaaaatgactgcatctttgacaagtttgaatgtgtgtggaatggaagtgacagcgtcatcatgacaggcagctacaacaacttcttcaggatgtttgacaggaacaccaagagagatgtgaccctggaggccagccgggagaacagcaagccccgggccatcctgaagcccaggaaggtgtgtgtgggcggcaagaggaggaaggatgagatctctgtggacagcctggacttcagcaagaagatcctgcacacagcctggcaccccagcgagaacatcatcgctgtggccgccaccaacaacctgtacatcttccaggacaaggtgaactag

SEQ ID NO: 255369 - DNA, 1341 bp, Artificial Sequence
  derived and/or modified sequence
atgaagtgcttcagccggtacctgccctacatcttccggccccccaataccattctgtccagcagttgccatactgaagctgatatcatctctaccgtggagtttaatcatacaggcgaactcctagcaacaggggataaagggggtcgtgtagtcatctttcaaagagaacaggagagtaagaaccaggtccaccgcaggggggagtacaatgtgtacagcacatttcagagtcacgagcctgagttcgattatttaaaatccctggaaattgaggagaaaatcaacaagatacgctggctgcctcagcagaacgccgcttatttcttgctaagcacaaatgataagaccgtgaaactgtggaaagtgtcagagagagataaacgcccagaaggatataatctcaaggatgaagaagggcggctgagggacccggccaccatcactacactacgagttccagtcttacgcccgatggacctaatggtagaggcaacccccagacgagttttcgctaacgcacacacatatcacattaacagcatctctgttaattcagattacgagacctacatgtcagctgacgacctgaggattaacctgtggaactttgagataaccaaccagtctttcaacatcgtggatattaaacctgccaacatggaggagctgacagaggtaattacagcagccgagtttcatccccaccattgcaataccttcgtgtatagtagtagtaagggcaccattcgactgtgcgacatgagggccagtgctctctgcgataggcatacgaagttctttgaggagcccgaggatcccagcaatcgatctttcttctccgaaattatctcatcgatttcagacgtaaagtttagccacagcgggaggtacatcatgacaagggactacctgaccgtgaaggtctgggacctcaacatggaaaaccgccccatagagacataccaggtgcacgactacctccgctcgaaactctgctcattgtacgagaatgattgcattttcgataagtttgaatgcgtatggaacgggagcgactccgtgataatgactggtagttacaataacttcttccgtatgttcgaccggaacacgaaacgtgatgtaactctcgaggcaagtcgtgagaatagcaagccacgcgccatcttgaaacccaggaaggtgtgcgtgggcgggaagcgtaggaaagatgaaatatcggtagactccctcgacttcagtaaaaagatcctgcacacggcctggcatcctagtgagaatatcatcgcagttgccgctactaacaatctgtacatctttcaggataaagtcaattag

SEQ ID NO: 255370 - DNA, 1341 bp, Artificial Sequence
  derived and/or modified sequence
atgaagtgcttcagccgatatttgccttatatctttaggccccctaatacaattctttcttcctcttgccacacggaggctgatatcatctcaaccgtagagtttaaccataccggcgaactcttggctacaggggataagggagggagagttgtgatctttcaaagagaacaggaaagtaagaatcaggtgcaccgccgaggcgaatacaatgtctattcaacttttcagagccatgagccagagtttgattatctcaaaagtctggagatcgaggaaaaaattaataaaatccggtggctgccccagcagaacgctgcgtatttcctgctgagcacaaatgacaaaaccgtgaagctctggaaggtaagcgagagagataaacggcctgagggatataacttaaaagatgaggagggaaggttgcgggaccctgccaccatcactactttacgtgtgcccgtgctgcgaccaatggacctgatggttgaggccacacctagaagggtctttgccaatgcccatacctatcatattaattctattagcgtaaattctgattatgagacctacatgtctgccgatgatctgagaattaatctgtggaatttcgagatcacgaaccaaagttttaacatcgtagacatcaaacccgctaacatggaggagctgacagaagtaattacggccgctgagtttcacccccaccattgcaacacttttgtttatagtagcagcaaaggcacaatacgcctctgcgatatgcgtgccagtgccctgtgcgataggcataccaagttctttgaagagccagaagacccatcgaatcgctccttcttcagcgagattatatcctctatatccgatgtcaaatttagccatagtggacgctacatcatgacccgtgactaccttaccgtgaaagtctgggacctcaatatggaaaataggcctatcgaaacctaccaagtgcacgactacctgaggtcaaagctctgtagcctgtacgaaaacgattgcatcttcgacaaattcgagtgtgtctggaatggttcggactctgtgattatgacaggctcatacaacaacttcttccggatgttcgatcgaaacactaaacgggatgtaacccttgaagctagtagagaaaactctaaaccacgggcaatcctgaagccacggaaggtctgcgtgggaggaaaaagaagaaaagacgaaatcagtgtcgatagcttagatttttctaaaaagatcctccacaccgcttggcacccaagtgagaacatcattgctgtggcggctacgaacaacctctatatctttcaggacaaagtcaactag

SEQ ID NO: 255371 - DNA, 2008 bp, Artificial Sequence
  derived and/or modified sequence
cttgggggcttctgagtttgagctgcatgcagaaatgtaaggcagtgcttcctggcgctgatggcaaaatgggacccatctccagttattcctcgggcaccccagctttgcaaatctgggaaagaacctacataaacatattggtgatgtagccagcttaaaaggccgagagaatccttatggattcaggagactgtttttttatttagatttttattttttatttggaagatgaaatgcttctctcgttacctgccttacatcttcagacctccgaacaccatcctttcttccagctgccacacagaagctgacattatctctacggtagaattcaaccacacgggagaattactagcgacaggggacaaggggggtcgggttgtaatatttcaacgagagcaggagagtaaaaatcaggttcatcgtaggggtgaatacaatgtttacagcacattccagagccatgaacccgagttcgattacctgaagagtttagaaatagaagaaaaaatcaataaaataagatggctcccccagcagaatgcagcttactttcttctgtctactaatgataaaactgtgaagctgtggaaagtcagcgagcgtgataagaggccagaaggctacaatctgaaagatgaggagggccggctccgggatcctgccaccatcacaaccctgcgggtgcctgtcctgagacccatggacctgatggtggaggccaccccacgaagagtatttgccaacgcacacacatatcacatcaactccatatctgtcaacagcgactatgaaacctacatgtccgctgatgacctgaggattaacctatggaactttgaaataaccaatcaaagttttaatattgtggacattaagccagccaacatggaggagctcacggaggtgatcacagcagccgagttccacccccatcattgcaacaccttcgtgtacagcagcagcaaagggacaatccggctgtgtgacatgcgggcatctgccctgtgtgacaggcacaccaaattttttgaagagccggaagatccaagcaacagatcatttttctctgaaattatctcttcgatttcggatgtgaagttcagccacagtgggaggtatatcatgaccagggactacttgaccgtcaaagtctgggatctcaacatggaaaaccgccccatcgagacttaccaggttcatgactacctccgcagcaagctgtgttccctctatgaaaatgactgcatttttgataaatttgagtgtgtgtggaatgggtcagacagtgtcatcatgacaggctcctacaacaacttcttcaggatgttcgacagaaacaccaagcgtgatgtgacccttgaggcttcgagggaaaacagcaagccccgggctatcctcaaaccccgaaaagtgtgtgtggggggcaagcggagaaaagacgagatcagtgtcgacagtctggactttagcaaaaagatcttgcatacagcttggcatccttcagaaaatattatagcagtggcggctacaaataacctatatatattccaggacaaggttaactaggtggacaagttattacttaataatctcacatactgaatactagtcaaacaagtttttaaatgtttctttgggtcttcatttgatgcattgactttaatttccctatacaggaaatgattggaatagaattaaaaggagtccaacattcccagctccccagttctaagaaacttttgtcaaacccaataggtttgggacacttctgtttagaattgaaagctgccagctaacagtaattcttccatagttgacttgaacttctgatgcttttattgcccagttttctctggtgggtccagtgttttgttcctaggtgtctgctgcgataaaatgaggttgtctgtagtatttaaggagaaaagagataagttttttttaattaagcaattccatttgattgaaaaaaatcaacaaaaaataaacaccgtttactctt

SEQ ID NO: 255372 - DNA, 1341 bp, Artificial Sequence
  derived and/or modified sequence
atgaagtgcttcagcagatacctgccctacatcttcagaccccccaacaccatcctgagcagcagctgccacaccgaggccgacatcatcagcaccgtggagttcaaccacaccggcgagctgctggccaccggcgacaagggcggcagagtggtgatcttccagagagagcaggagagcaagaaccaggtgcacagaagaggcgagtacaacgtgtacagcaccttccagagccacgagcccgagttcgactacctgaagagcctggagatcgaggagaagatcaacaagatcagatggctgccccagcagaacgccgcctacttcctgctgagcaccaacgacaagaccgtgaagctgtggaaggtgagcgagagagacaagagacccgagggctacaacctgaaggacgaggagggcagactgagagaccccgccaccatcaccaccctgagagtgcccgtgctgagacccatggacctgatggtggaggccacccccagaagagtgttcgccaacgcccacacctaccacatcaacagcatcagcgtgaacagcgactacgagacctacatgagcgccgacgacctgagaatcaacctgtggaacttcgagatcaccaaccagagcttcaacatcgtggacatcaagcccgccaacatggaggagctgaccgaggtgatcaccgccgccgagttccacccccaccactgcaacaccttcgtgtacagcagcagcaagggcaccatcagactgtgcgacatgagagccagcgccctgtgcgacagacacaccaagttcttcgaggagcccgaggaccccagcaacagaagcttcttcagcgagatcatcagcagcatcagcgacgtgaagttcagccacagcggcagatacatcatgaccagagactacctgaccgtgaaggtgtgggacctgaacatggagaacagacccatcgagacctaccaggtgcacgactacctgagaagcaagctgtgcagcctgtacgagaacgactgcatcttcgacaagttcgagtgcgtgtggaacggcagcgacagcgtgatcatgaccggcagctacaacaacttcttcagaatgttcgacagaaacaccaagagagacgtgaccctggaggccagcagagagaacagcaagcccagagccatcctgaagcccagaaaggtgtgcgtgggcggcaagagaagaaaggacgagatcagcgtggacagcctggacttcagcaagaagatcctgcacaccgcctggcaccccagcgagaacatcatcgccgtggccgccaccaacaacctgtacatcttccaggacaaggtgaactag

SEQ ID NO: 255373 - protein, 54 aa, Artificial Sequence
  derived and/or modified sequence
MAAVAAASAELLIIGWYIFRVLLQVFRYSLQKLAYTVSRTGRQVLGERRQRAPN

SEQ ID NO: 255374 - DNA, 165 bp, Artificial Sequence
  derived and/or modified sequence
atggccgctgtagccgctgcctccgccgagcttttgattatcgggtggtacatttttagggtgctgctccaggtatttcggtatagcttgcagaagctggcatacactgtgtcacggacggggcgtcaggttttaggagaacggagacagagagcccccaactag

SEQ ID NO: 255375 - DNA, 165 bp, Artificial Sequence
  derived and/or modified sequence
atggctgctgtggccgccgccagcgctgagctgctgatcatcggctggtacatcttccgggtgctgctgcaggtgttccgctacagcctgcagaagctggcctacacagtgtccaggacaggccggcaggtgctgggggagcggcggcagagggcccccaactag

SEQ ID NO: 255376 - DNA, 165 bp, Artificial Sequence
  derived and/or modified sequence
atggccgccgtggccgccgccagcgccgagctgctgatcatcggctggtatatttttagagtactgcttcaggtgtttcgttacagcctgcaaaagctggcatacacagtgagtcggactgggagacaggttctgggcgaacggagacagcgcgcaccgaattag

SEQ ID NO: 255377 - DNA, 1209 bp, Artificial Sequence
  derived and/or modified sequence
gtacttaaggcgcggccaccgcggctgcggcagtgcgcccaacagcggactccgagaccagcggatctcggcaaaccctctttctcgaccacccacctaccattcttggaaccatggcggcagtggcggcggcctcggctgaactgctcatcatcggctggtacatcttccgcgtgctgctgcaggtgttcaggtactccctgcagaagctggcatacacggtgtcgcggaccgggcggcaggtgttgggggagcgcaggcagcgagcccccaactgaggccccagctcccagccctgggcggccgtatcatcaggtgctcctgtgcatctcggccagcacgggagccagtgccgcgcaggaatgtggggtcccctgtgttccctcgccagaggagcacttggcaaggtcagtgaggggccagtagacccccggagaagcagtaccgacaatgacgaagataccagatcccttcccaacccctttgcaccggtcccactaaggggcagggtcgagagaggaggggggatagggggagcagacccctgagatctgggcataggcaccgcattctgatctggacaaagtcgggacagcaccatcccagccccgaagccagggccatgccagcaggccccaccatggaaatcaaaacaccgcaccagccagcagaatggacattctgacatcgccagccgacgccctgaatcttggtgcagcaccaaccgcgtgcctgtgtggcgggactggagggcacagttgaggaaggagggtggttaagaaatacagtggggccctctcgctgtcccttgcccagggcacttgcattccagcctcgctgcatttgctctctcgattcccctttcctcctcactgcctcccaagcccaccctactccaaaataatgtgtcacttgatttggaactattcaagcagtaaaagtaaatgaatcccacctttactaaaacactttctctgaaccccccttgcccctcactgatcttgcttttccctggtctcatgcagttgtggtcaatattgtggtaatcgctaattgtactgattgtttaagtgtgcattagttgtgtctccccagctagattgtaagctcctggaggacagggaccacctctacaaaaaataaaaaaagtacctcccctgtctcgcacagtgtcccaggaccctgcggtgcagtagaggcgcaccaaaa

SEQ ID NO: 255378 - DNA, 165 bp, Artificial Sequence
  derived and/or modified sequence
atggccgctgtggctgctgcgtccgcggagttgctgattattggctggtatatctttcgcgtcttattgcaagtgtttcgctattccttacagaagctggcttacactgtttccaggacagggaggcaggtcctgggagagcgcagacagcgggcacctaattag

SEQ ID NO: 255379 - DNA, 572 bp, Artificial Sequence
  derived and/or modified sequence
cttaccgcgtaggtcgctaaatgcctgggtgatcgtccgcagcggtcgcccgccgcgccccgagtctttgttccctggcaggcgcgggcgcactagggagggtcagcgcgaggaggacggcgcagggaatgggcagggggcgcgcggtgccggcagcggcacttgggcaggcaaggatcgcggcaatcggaataggacgggtccgggaagcggcaatcgcgacgcagtcttgcgggttctaggggcgcgagttgggaaccctctcccacccgaaaccccgtcagacttacctgcagcagcacgcggaagatgtaccagccgatgatgagcagttcagccgaggccgccgccactgccgccatggttccaagaatggatccctgctgccttggtgatcccgggctgacagccagagagcacagcggctcagctcctggagagtgagggttgaagaaagcggagggcagccgcctgcgcccgctggctcccattaggtcggttcctgcagcggtgcccggcagccttggtgaaggccctgcccggcagagatcatgtattgcctccagtggctg

SEQ ID NO: 255380 - DNA, 165 bp, Artificial Sequence
  derived and/or modified sequence
atggccgccgtggccgccgccagcgccgagctgctgatcatcggctggtacatcttcagagtgctgctgcaggtgttcagatacagcctgcagaagctggcctacaccgtgagcagaaccggcagacaggtgctgggcgagagaagacagagagcccccaactag

SEQ ID NO: 255381 - protein, 667 aa, Artificial Sequence
  derived and/or modified sequence
MAGASELGTGPGAAGGDGDDSLYPIAVLIDELRNEDVQLRLNSIKKLSTIALALGVERTRSELLPFLTDTIYDEDEVLLALAEQLGNFTGLVGGPDFAHCLLPPLENLATVEETVVRDKAVESLRQISQEHTPVALEAYFVPLVKRLASGDWFTSRTSACGLFSVCYPRASNAVKAEIRQQFRSLCSDDTPMVRRAAASKLGEFAKVLELDSVKSEIVPLFTSLASDEQDSVRLLAVEACVSIAQLLSQDDLETLVMPTLRQAAEDKSWRVRYMVADRFSELQKAMGPKITLNDLIPAFQNLLKDCEAEVRAAAAHKVKELGENLPIEDRETIIMNQILPYIKELVSDTNQHVKSALASVIMGLSTILGKENTIEHLLPLFLAQLKDECPDVRLNIISNLDCVNEVIGIRQLSQSLLPAIVELAEDAKWRVRLAIIEYMPLLAGQLGVEFFDEKLNSLCMAWLVDHVYAIREAATNNLMKLVQKFGTEWAQNTIVPKVLVMANDPNYLHRMTTLFCINALSEACGQEITTKQMLPIVLKMAGDQVANVRFNVAKSLQKIGPILDTNALQGEVKPVLQKLGQDEDMDVKYFAQEAISVVAQRLRKLEFPVKDSGEPSVPRADKNHFPRPTVPGEDMGKGPVYQLRGDTRDTLAQLGIAELVHFSQSTD

SEQ ID NO: 255382 - DNA, 2004 bp, Artificial Sequence
  derived and/or modified sequence
atggccggcgccagcgagctgggcaccggccccggcgccgccggcggcgacggcgacgacagcctgtaccccatcgccgtgctgatcgacgagctgagaaacgaggacgtgcagctgagactgaacagcatcaagaagctgagcaccatcgccctggccctgggcgtggagagaaccagaagcgagctgctgcccttcctgaccgacaccatctacgacgaggacgaggtgctgctggccctggccgagcagctgggcaacttcaccggcctggtgggcggccccgacttcgcccactgcctgctgccccccctggagaacctggccaccgtggaggagaccgtggtgagagacaaggccgtggagagcctgagacagatcagccaggagcacacccccgtggccctggaggcctacttcgtgcccctggtgaagagactggccagcggcgactggttcaccagcagaaccagcgcctgcggcctgttcagcgtgtgctaccccagagccagcaacgccgtgaaggccgagatcagacagcagttcagaagcctgtgcagcgacgacacccccatggtgagaagagccgccgccagcaagctgggcgagttcgccaaggtgctggagctggacagcgtgaagagcgagatcgtgcccctgttcaccagcctggccagcgacgagcaggacagcgtgagactgctggccgtggaggcctgcgtgagcatcgcccagctgctgagccaggacgacctggagaccctggtgatgcccaccctgagacaggccgccgaggacaagagctggagagtgagatacatggtggccgacagattcagcgagctgcagaaggccatgggccccaagatcaccctgaacgacctgatccccgccttccagaacctgctgaaggactgcgaggccgaggtgagagccgccgccgcccacaaggtgaaggagctgggcgagaacctgcccatcgaggacagagagaccatcatcatgaaccagatcctgccctacatcaaggagctggtgagcgacaccaaccagcacgtgaagagcgccctggccagcgtgatcatgggcctgagcaccatcctgggcaaggagaacaccatcgagcacctgctgcccctgttcctggcccagctgaaggacgagtgccccgacgtgagactgaacatcatcagcaacctggactgcgtgaacgaggtgatcggcatcagacagctgagccagagcctgctgcccgccatcgtggagctggccgaggacgccaagtggagagtgagactggccatcatcgagtacatgcccctgctggccggccagctgggcgtggagttcttcgacgagaagctgaacagcctgtgcatggcctggctggtggaccacgtgtacgccatcagagaggccgccaccaacaacctgatgaagctggtgcagaagttcggcaccgagtgggcccagaacaccatcgtgcccaaggtgctggtgatggccaacgaccccaactacctgcacagaatgaccaccctgttctgcatcaacgccctgagcgaggcctgcggccaggagatcaccaccaagcagatgctgcccatcgtgctgaagatggccggcgaccaggtggccaacgtgagattcaacgtggccaagagcctgcagaagatcggccccatcctggacaccaacgccctgcagggcgaggtgaagcccgtgctgcagaagctgggccaggacgaggacatggacgtgaagtacttcgcccaggaggccatcagcgtggtggcccagagactgagaaagctggagttccccgtgaaggacagcggcgagcccagcgtgcccagagccgacaagaaccacttccccagacccaccgtgcccggcgaggacatgggcaagggccccgtgtaccagctgagaggcgacaccagagacaccctggcccagctgggcatcgccgagctggtgcacttcagccagagcaccgactag

SEQ ID NO: 255383 - DNA, 2004 bp, Artificial Sequence
  derived and/or modified sequence
atggccggggcaagtgagctgggaactgggcctggtgcagcaggcggcgacggggacgattccctgtaccccatcgccgtcctgatagacgagctgaggaatgaagatgtgcagcttaggctgaattcaattaaaaaactctctaccatcgcactagcccttggagtggaaagaacaagaagtgaacttcttcctttcttaactgataccatctatgatgaggatgaggttctgctagcgttggccgagcaactgggaaactttactggcctagtgggtggacctgactttgcccactgcttgctgcccccgctggagaacttggccaccgtggaggagaccgtggtcagggataaggctgttgagtctcttcggcagatttcacaagagcacaccccagtggctctagaagcgtacttcgtgcctttagttaagaggcttgccagtggagattggtttacatcccgaacgtcggcttgcggtctgttcagcgtttgctatccccgcgcatctaacgccgttaaggctgagatccgccagcagtttcggtcactgtgctctgacgatacacccatggtgcgccgggctgccgccagcaagctgggggaatttgccaaggtgctcgaactggatagcgtgaagtctgagatagtccctctctttacctcattggccagtgacgaacaagattccgttcgtctgctggcagtcgaggcatgtgtgtctatcgctcagctgttgagccaagacgatcttgagaccctcgtgatgccgactctgagacaggccgctgaggataaatcttggcgggttaggtacatggtggctgaccgtttctcagagttgcaaaaggctatgggaccaaagatcacacttaacgacctgatcccagcctttcagaacttgctcaaagattgcgaggcggaggtccgggctgccgcggcccataaggttaaagagttaggagagaatcttcctattgaggatagggaaacgatcatcatgaaccaaatactgccttacattaaggaactagtgtctgacactaatcagcatgtgaagagcgcacttgcttctgtgatcatgggactgtccactatcttggggaaggaaaacacaatagagcatctgttgcccctcttcttagcgcagctgaaggatgagtgcccagacgtacggctgaatataatcagtaacctggactgtgttaacgaagtgataggtatcaggcagctgtcccagtcactgctgccggccatcgtggagctcgccgaagatgccaagtggcgggtgcggttagccattatcgaatacatgcccctcctcgccggacaactgggtgtggagttttttgacgagaagttaaacagtctctgcatggcctggcttgttgatcatgtgtacgctatccgcgaggccgcgaccaataacctgatgaagctagttcagaaattcggaacagaatgggcccaaaatacaatagtgccaaaagttcttgtaatggctaacgacccgaattacttacaccgcatgaccaccctgttttgtattaacgctttgagtgaagcttgcggccaggaaatcaccacaaagcagatgctgccaatcgtgcttaagatggcgggcgaccaagttgctaacgtgcgcttcaatgtggccaagagtctccagaaaatcggcccgattctagacactaatgcgctccagggggaggtgaagcctgttctccagaaattagggcaggatgaggacatggatgtcaagtacttcgcacaggaagcaatcagcgtggtggcacagaggctccgcaagctcgagttccctgtgaaagatagcggagagccctccgtccctagagcagacaagaatcattttccccgtcctactgtaccgggcgaagacatgggtaaagggccggtgtaccagctgcgtggggatacacgcgacaccctggcgcagctgggcatcgccgagctggtccattttagccagtctaccgactag

SEQ ID NO: 255384 - DNA, 2004 bp, Artificial Sequence
  derived and/or modified sequence
atggccggggccagcgagctgggcactggacctggagctgctggaggagatggagatgacagcctgtaccccatcgctgtgctgattgatgagctgagaaatgaagatgtgcagctgcggctgaacagcatcaagaagctgagcaccatcgccctggccctgggcgtggagaggaccaggtctgagctgctgcccttcctgacagacaccatctatgatgaagatgaggtgctgctggccctggccgagcagctgggcaacttcaccggcctggtgggcggccctgactttgcccactgcctgctgccccccctggagaacctggccaccgtggaggagaccgtggtgcgggacaaggctgtggagagcctgcggcagatcagccaggagcacacccctgtggccctggaggcctactttgtgcccctggtgaagaggctggccagcggggactggttcaccagcaggaccagcgcctgtggcctcttctctgtgtgctacccccgggccagcaatgctgtgaaggccgagatccggcagcagttccgcagcctgtgcagtgatgacacccccatggtgcggcgggctgctgccagcaagctgggggagtttgccaaggtgctggagctggacagcgtgaagtcagaaattgtgcccctcttcaccagcctggccagtgatgagcaggacagcgtgcggctgctggccgtggaggcctgtgtgtccatcgcccagctgctgagccaggatgacctggagaccctggtgatgcccaccctgcggcaggccgctgaggacaagtcctggagggtgcgctacatggtggccgaccgcttcagcgagctgcagaaggccatgggccccaagatcaccctgaatgacctgatcccagccttccagaacctgctgaaggactgtgaggccgaggtgcgggctgctgctgcccacaaggtgaaggagctgggggagaacctgcccatcgaggaccgggagaccatcatcatgaaccagatcctgccctacatcaaggagctggtgtctgacaccaaccagcacgtgaagagcgccctggccagcgtcatcatgggcctgagcaccatcctgggcaaggagaacaccatcgagcacctgctgcccctcttcctggcccagctgaaggatgagtgcccagatgtgcggctgaacatcatcagcaacctggactgtgtgaatgaggtgattggcatccggcagctgagccagagcctgctgcctgccatcgtggagctggctgaagatgccaagtggagggtgcggctggccatcatcgagtacatgcccctgctggccggccagctgggcgtggagttctttgatgagaagctgaacagcctgtgcatggcctggctggtggaccacgtgtatgccatccgggaggccgccaccaacaacctgatgaagctggtgcagaagtttggaacagagtgggcccagaacaccatcgtgcccaaggtgctggtgatggccaatgaccccaactacctgcacaggatgaccaccctcttctgcatcaatgccctgtctgaggcctgtggccaggagatcaccaccaagcagatgctgcccatcgtgctgaagatggccggggaccaggtggccaacgtgcgcttcaacgtggccaagagcctgcagaagattggccccatcctggacaccaatgccctgcagggcgaggtgaagcctgtgctgcagaagctgggccaggatgaggacatggatgtgaagtactttgcccaggaggccatctctgtggtggcccagaggctgaggaagctggagttccctgtgaaggacagcggggagcccagcgtgcccagggctgacaagaaccacttcccccggcccaccgtgcctggagaggacatgggcaaaggacctgtgtaccagctgcggggggacacccgggacaccctggcccagctgggcattgctgagctggtgcacttcagccagagcacagactag

SEQ ID NO: 255385 - DNA, 2004 bp, Artificial Sequence
  derived and/or modified sequence
atggccggcgccagcgagctgggcaccggccccggcgccgccggcggcgatggggatgactctctctatcccatagcagtgttgatagacgaattacgcaatgaggacgtacagctcaggctgaattctattaagaaattgagcacaattgcactggcgttgggcgtcgagcgcacccgatcggagttactgccctttttgactgatactatctacgacgaagatgaggtactattggcactcgctgagcagctgggtaactttaccggactcgtgggggggccggatttcgcccactgcctactgcctcccctggagaacctggctaccgtcgaagagaccgtggttagggacaaggcggttgaaagcctgcgccaaatcagtcaagaacacacccctgtcgcgctcgaggcctattttgtgcccctcgtgaaacgcttggcttcaggagactggtttacaagcaggaccagcgcctgcggcctgttctccgtatgctacccacgcgcaagcaacgccgtaaaggctgagattcgccagcagtttcgcagtctgtgcagtgatgacaccccaatggtgcgcagggctgcggcttctaaactgggagagtttgcgaaggttctcgagctcgactcagtgaagagcgaaattgttccgctattcacctcgctggcctctgatgaacaggatagtgtgagattacttgctgtcgaagcatgcgtcagcatcgcccagcttctgagtcaggatgacctggagaccctcgtgatgccaaccttgagacaggcagccgaggataagagttggcgggtgcggtacatggttgccgaccgtttctcagagctgcagaaagctatggggccgaagatcacactgaatgatttaatcccggcttttcagaacctgcttaaggattgtgaggctgaggtaagagcggcggccgctcacaaagtgaaagaattgggtgagaatcttcctatagaggaccgggagacaattatcatgaatcagattcttccatatatcaaggagctggtgtctgataccaaccagcatgtcaagtcagccctggccagcgtaattatgggattatctaccatcctggggaaggagaataccatcgagcacctcctgcccctgttcctcgcacagctgaaggatgaatgccccgatgtgagactgaacattattagcaatctagattgcgttaacgaggtaatagggattcggcaattatctcagtcgttactgccagccatcgtagagctcgccgaggacgctaaatggcgagtccggctcgctatcatcgaatatatgccgctgctcgctggtcagctgggagttgaattcttcgacgagaagttgaatagcctctgcatggcatggttggtcgatcatgtctatgctataagggaagccgctaccaacaacctcatgaagctggtacaaaaattcggaacagaatgggctcagaatactatcgttccaaaagttctggtcatggcgaatgacccaaactacctgcatcgcatgacgacactcttctgtatcaacgccttatcggaggcatgtggtcaggaaatcactactaagcagatgctgccaatcgtactcaaaatggccggagaccaagtcgccaacgtgcgcttcaacgtagcgaaaagtctccaaaagatcggccccatcctcgacactaacgccctgcagggagaggtgaagccagtgcttcaaaaactcggccaagacgaggatatggatgtcaaatactttgcccaagaggccattagcgtggtcgcacaacgccttcgtaaattggaatttcctgtgaaagactccggcgaacctagcgtcccccgagccgacaagaatcacttccctcgaccgacagtgcctggcgaggatatgggcaagggacctgtttatcaactgaggggcgatacccgggacaccctggcccagcttgggattgcagagttggtccacttctcacagtctaccgactag

SEQ ID NO: 255386 - DNA, 2004 bp, Artificial Sequence
  derived and/or modified sequence
atggccggagcaagcgaactgggaaccggccctggtgccgctggcggtgatggagatgattctctgtatcccattgccgtcctgattgacgagctgcggaacgaagacgtacagttgagacttaacagcatcaagaaactgagcacaatcgccttggcgctgggggtggaaagaacgcgctctgaactgcttcccttccttaccgatacaatttacgacgaggatgaagtgctcctggcgctggccgagcagctgggtaacttcacgggtctggtgggaggacccgactttgctcattgtttgctacccccacttgagaacctggccaccgtggaagaaaccgtggtgcgggataaggccgtcgaatcgctcagacagattagtcaggaacatacgcccgtagccctggaagcatattttgtgcccctcgttaagcgcctagcaagcggcgattggttcacaagcaggacatctgcctgcggactgtttagtgtttgctacccgagagcaagcaatgccgtaaaagctgagattcggcaacaattccgctctctctgttcagacgatacacctatggtgaggcgagccgctgcttcaaagcttggcgaatttgcaaaagtgcttgaacttgactctgtcaaatctgagatcgtacccctttttacaagcttggccagcgatgagcaggacagcgtcagactgctcgctgtggaggcctgcgtgtccatcgcccaactgttgtcccaagacgatctagaaaccttggtcatgcccacccttcgacaggccgctgaggataagagctggagagtgcggtatatggtcgctgatagattcagcgagctccagaaggcaatgggccctaagattaccctgaacgatctgatcccagccttccaaaatttgctcaaagactgcgaggccgaagtgagggctgccgctgctcacaaagtgaaagaactgggggagaatctccctatagaggacagagagaccattattatgaatcagattttgccgtatattaaggagttagtctcagacacgaatcagcacgtcaaaagcgccctggcatccgtgatcatggggctgtccacaattctgggaaaagagaataccattgagcatttgctccccctgttcttggctcagcttaaggacgagtgtcccgacgtccgactaaatataatttctaacctagattgcgtgaacgaggtcatcggtatacgccagctatctcaatctttattgcctgcaatcgtcgaactcgctgaagatgccaaatggcgcgtacggctggcaattatcgagtatatgcctctcctcgcaggtcaactgggtgtggaatttttcgatgagaagctgaacagcctctgcatggcatggcttgttgatcatgtgtatgctattcgcgaagcagccaccaacaatttgatgaagcttgtccaaaaatttgggaccgagtgggcccaaaatacgattgtgccaaaggttttagtgatggctaatgaccctaattatttgcatcgtatgaccaccctcttttgcattaacgcactaagtgaggcatgcggccaggaaatcactactaagcagatgctgcctatcgttctaaaaatggccggagatcaggttgccaatgtcaggtttaacgtagccaagagtctgcagaaaatcggacctattctcgataccaatgcactgcagggcgaggtgaagcccgtgctccagaaactaggccaggacgaggacatggatgttaagtatttcgcccaagaggcaataagcgtggtagcccagcggcttcggaagctggagtttcctgtcaaagactccggcgagccaagtgtgccccgagccgataaaaaccactttcccagacccactgtccccggagaggatatgggaaaagggcctgtttaccagctgcggggtgacacccgagatacacttgcccagctcggcatcgccgagctggtgcactttagccagtcgaccgactag

SEQ ID NO: 255387 - DNA, 2082 bp, Artificial Sequence
  derived and/or modified sequence
agcagcaggaggagaaagaacatggcgggcgcatcagagctcgggaccggcccaggagcagcgggtggagatggagatgattcgctatacccgatcgcggttttaatcgacgagctccgcaatgaagacgtgcagctccgactcaacagtattaagaagttatcaacaattgccctagcacttggagtagaaaggacccgaagtgaattgttgccatttcttacagatacaatttatgatgaagatgaggtactattagctcttgctgagcagctgggaaatttcactggcctagtgggaggtcctgactttgcccactgtctgctgcctcctttggaaaatctggcaactgtggaagagactgttgttcgtgacaaggctgtggagtccctgagacagatctcccaggagcatactcctgttgctctggaagcttattttgtacctctggtgaaacgcttagcaagtggggattggttcacctctcgcacatctgcatgtggtttgttcagcgtttgctatcccagggcatcaaatgctgttaaagcagaaatcagacagcaattccgttccttgtgctcagatgacacaccaatggtacgacgtgctgctgcttccaaattgggtgaatttgcaaaagttttggaattagacagtgtgaaaagtgaaattgttccactgttcactagtctagcttcagatgaacaggattcagtgcgcctccttgctgtggaagcttgtgtcagtattgcccagttattgtctcaggatgaccttgagactttggtgatgcctacacttcgacaagcagcagaagataaatcttggcgcgttcgctatatggtggctgacagattttcagagctccagaaagccatgggtcctaaaatcaccctaaatgacctcatccccgcctttcagaacctacttaaagactgtgaagctgaagtccgggcagctgctgcccacaaagtaaaagaacttggtgagaacttgcccattgaagatagagagaccataattatgaatcaaattctgccttatataaaggaattagtatccgataccaatcaacatgtcaaatcggctctagcttctgtaattatgggattgtctactattttgggcaaagaaaataccattgaacatcttctacctcttttcttagctcagttaaaggatgagtgtcctgacgttcgtttgaatatcatctccaatttggattgtgtaaatgaagtgattggaatccgtcagctctctcagtctctccttcctgccatagtggagctggcagaagatgccaaatggagggtccgcctggccatcattgagtatatgccgctgctggcaggccagctgggtgtggaattctttgatgaaaagctgaattctttatgtatggcttggctcgtggaccatgtatacgccatccgagaagctgccaccaacaacctcatgaaactagttcagaagtttggtacagagtgggcccaaaatactattgttcccaaagtgttagtaatggcaaatgatcctaattacttgcatagaatgaccactttattctgcattaatgcactgtctgaggcctgtggtcaggaaataactactaagcaaatgctgcccatcgtattaaaaatggcaggagaccaagtagcaaatgttcgcttcaatgtggccaaatctctacaaaagattggaccaattctagataccaatgctttacagggagaagtgaagccagtactacagaagttaggtcaagatgaagacatggatgtcaaatactttgcacaggaagctataagtgtggtggcacaaaggctgaggaagctagaatttcctgtgaaggacagtggagaacccagtgtccctcgggctgacaagaaccacttcccaagacccacagtgcctggagaggacatggggaagggaccagtgtatcagttgcgtggagatactagagacacacttgcccagctgggaattgcagagctagtgcatttctcccaaagcacagactaataccccagatttaaaaaaagaacataaaaaataaagtaccacacatattgcactttt

SEQ ID NO: 255388 - protein, 603 aa, Artificial Sequence
  derived and/or modified sequence
MAGASELGTGPGAAGGDGDDSLYPIAVLIDELRNEDVQPPLENLATVEETVVRDKAVESLRQISQEHTPVALEAYFVPLVKRLASGDWFTSRTSACGLFSVCYPRASNAVKAEIRQQFRSLCSDDTPMVRRAAASKLGEFAKVLELDSVKSEIVPLFTSLASDEQDSVRLLAVEACVSIAQLLSQDDLETLVMPTLRQAAEDKSWRVRYMVADRFSELQKAMGPKITLNDLIPAFQNLLKDCEAEVRAAAAHKVKELGENLPIEDRETIIMNQILPYIKELVSDTNQHVKSALASVIMGLSTILGKENTIEHLLPLFLAQLKDECPDVRLNIISNLDCVNEVIGIRQLSQSLLPAIVELAEDAKWRVRLAIIEYMPLLAGQLGVEFFDEKLNSLCMAWLVDHVYAIREAATNNLMKLVQKFGTEWAQNTIVPKVLVMANDPNYLHRMTTLFCINALSEACGQEITTKQMLPIVLKMAGDQVANVRFNVAKSLQKIGPILDTNALQGEVKPVLQKLGQDEDMDVKYFAQEAISVVAQRLRKLEFPVKDSGEPSVPRADKNHFPRPTVPGEDMGKGPVYQLRGDTRDTLAQLGIAELVHFSQSTD

SEQ ID NO: 255389 - DNA, 1812 bp, Artificial Sequence
  derived and/or modified sequence
atggccggcgccagcgagctgggcaccggccccggcgccgccggcggcgacggcgacgacagcctgtaccccatcgccgtgctgatcgacgagctgagaaacgaggacgtgcagccccccctggagaacctggccaccgtggaggagaccgtggtgagagacaaggccgtggagagcctgagacagatcagccaggagcacacccccgtggccctggaggcctacttcgtgcccctggtgaagagactggccagcggcgactggttcaccagcagaaccagcgcctgcggcctgttcagcgtgtgctaccccagagccagcaacgccgtgaaggccgagatcagacagcagttcagaagcctgtgcagcgacgacacccccatggtgagaagagccgccgccagcaagctgggcgagttcgccaaggtgctggagctggacagcgtgaagagcgagatcgtgcccctgttcaccagcctggccagcgacgagcaggacagcgtgagactgctggccgtggaggcctgcgtgagcatcgcccagctgctgagccaggacgacctggagaccctggtgatgcccaccctgagacaggccgccgaggacaagagctggagagtgagatacatggtggccgacagattcagcgagctgcagaaggccatgggccccaagatcaccctgaacgacctgatccccgccttccagaacctgctgaaggactgcgaggccgaggtgagagccgccgccgcccacaaggtgaaggagctgggcgagaacctgcccatcgaggacagagagaccatcatcatgaaccagatcctgccctacatcaaggagctggtgagcgacaccaaccagcacgtgaagagcgccctggccagcgtgatcatgggcctgagcaccatcctgggcaaggagaacaccatcgagcacctgctgcccctgttcctggcccagctgaaggacgagtgccccgacgtgagactgaacatcatcagcaacctggactgcgtgaacgaggtgatcggcatcagacagctgagccagagcctgctgcccgccatcgtggagctggccgaggacgccaagtggagagtgagactggccatcatcgagtacatgcccctgctggccggccagctgggcgtggagttcttcgacgagaagctgaacagcctgtgcatggcctggctggtggaccacgtgtacgccatcagagaggccgccaccaacaacctgatgaagctggtgcagaagttcggcaccgagtgggcccagaacaccatcgtgcccaaggtgctggtgatggccaacgaccccaactacctgcacagaatgaccaccctgttctgcatcaacgccctgagcgaggcctgcggccaggagatcaccaccaagcagatgctgcccatcgtgctgaagatggccggcgaccaggtggccaacgtgagattcaacgtggccaagagcctgcagaagatcggccccatcctggacaccaacgccctgcagggcgaggtgaagcccgtgctgcagaagctgggccaggacgaggacatggacgtgaagtacttcgcccaggaggccatcagcgtggtggcccagagactgagaaagctggagttccccgtgaaggacagcggcgagcccagcgtgcccagagccgacaagaaccacttccccagacccaccgtgcccggcgaggacatgggcaagggccccgtgtaccagctgagaggcgacaccagagacaccctggcccagctgggcatcgccgagctggtgcacttcagccagagcaccgactag

SEQ ID NO: 255390 - DNA, 1812 bp, Artificial Sequence
  derived and/or modified sequence
atggcaggcgctagcgagttagggaccggacccggcgctgccggaggggatggcgatgacagcctttaccctatcgccgtcctgattgacgaattaaggaatgaagatgtccagccccctctggagaatctcgctacagtagaggaaactgtggtccgagataaggcagtagagtcactgcgccagatcagccaagaacacacgcccgtggcactcgaggcatacttcgttcccctcgtcaagagactggcctcgggcgactggtttacaagcagaacttctgcatgcggcctgttctccgtatgctaccccagggctagcaacgctgtgaaagcagagatcagacaacagttcagatcactgtgcagtgacgatacgcctatggtgaggcgagccgcagccagcaagctgggagaattcgcaaaggtgctggagctcgatagcgttaaaagcgaaattgtccccctgtttacctcgctcgcttctgatgagcaggattctgttcgcctgctggctgtcgaagcatgcgtgtcaatagcccagcttctatcacaggatgaccttgaaactctggtgatgccaactctgaggcaggccgcggaagataaatcctggagagttcgttatatggtcgctgacagattctctgagctgcaaaaggctatgggtccaaagataacacttaatgatcttatcccggcctttcagaacctgttgaaagattgtgaggccgaggttcgcgctgctgccgctcataaggtgaaagagctcggtgaaaacctgcctattgaagaccgggagactattatcatgaatcagatactcccttatatcaaggagcttgtgagtgatacgaaccagcatgtgaaatcagccctcgcctcagtgatcatgggtctctccacaattttaggtaaggagaatactatcgaacatcttctccccctgttcttagcccagctgaaagacgagtgcccagatgtgcggttaaacatcatcagcaatttggactgcgtgaacgaagtgattggtatcaggcagctgagtcaatcacttctgcctgccatcgtggagcttgcagaggacgcaaaatggcgcgtgaggttagctataatcgaatacatgccgctgttggccggccagctcggtgtagagtttttcgatgaaaaactcaattctctatgtatggcatggctcgttgaccacgtgtatgccattcgggaagctgcgactaataatctgatgaaactcgtccagaagtttggaacagagtgggcccagaatacaattgtgcccaaagtgctcgtcatggctaacgatcctaattatttacataggatgaccacattgttttgtattaatgccctgagtgaggcgtgcggacaggagatcaccactaagcagatgctgcctattgttttgaagatggctggcgaccaagtcgctaacgttaggttcaacgtggccaaaagtcttcagaaaattgggcccatcctcgatacaaacgctctgcagggagaagtgaagcccgttctgcagaaattgggtcaggatgaagatatggatgtgaaatacttcgctcaggaagccatctctgtcgttgcacagcgattgcgcaaattggagttcccagtgaaagattccggtgaacccagcgtgccgcgggcagacaagaaccacttccctcgtccaaccgtccccggggaggatatgggaaagggaccagtgtaccagctccgcggcgacactagggatacgctcgctcagctggggattgcagaattggtccatttcagccagtcaacagactag

SEQ ID NO: 255391 - DNA, 1812 bp, Artificial Sequence
  derived and/or modified sequence
atggccggggccagcgagctgggcactggacctggagctgctggaggagatggagatgacagcctgtaccccatcgctgtgctgattgatgagctgagaaatgaagatgtgcagccccccctggagaacctggccaccgtggaggagaccgtggtgcgggacaaggctgtggagagcctgcggcagatcagccaggagcacacccctgtggccctggaggcctactttgtgcccctggtgaagaggctggccagcggggactggttcaccagcaggaccagcgcctgtggcctcttctctgtgtgctacccccgggccagcaatgctgtgaaggccgagatccggcagcagttccgcagcctgtgcagtgatgacacccccatggtgcggcgggctgctgccagcaagctgggggagtttgccaaggtgctggagctggacagcgtgaagtcagaaattgtgcccctcttcaccagcctggccagtgatgagcaggacagcgtgcggctgctggccgtggaggcctgtgtgtccatcgcccagctgctgagccaggatgacctggagaccctggtgatgcccaccctgcggcaggccgctgaggacaagtcctggagggtgcgctacatggtggccgaccgcttcagcgagctgcagaaggccatgggccccaagatcaccctgaatgacctgatcccagccttccagaacctgctgaaggactgtgaggccgaggtgcgggctgctgctgcccacaaggtgaaggagctgggggagaacctgcccatcgaggaccgggagaccatcatcatgaaccagatcctgccctacatcaaggagctggtgtctgacaccaaccagcacgtgaagagcgccctggccagcgtcatcatgggcctgagcaccatcctgggcaaggagaacaccatcgagcacctgctgcccctcttcctggcccagctgaaggatgagtgcccagatgtgcggctgaacatcatcagcaacctggactgtgtgaatgaggtgattggcatccggcagctgagccagagcctgctgcctgccatcgtggagctggctgaagatgccaagtggagggtgcggctggccatcatcgagtacatgcccctgctggccggccagctgggcgtggagttctttgatgagaagctgaacagcctgtgcatggcctggctggtggaccacgtgtatgccatccgggaggccgccaccaacaacctgatgaagctggtgcagaagtttggaacagagtgggcccagaacaccatcgtgcccaaggtgctggtgatggccaatgaccccaactacctgcacaggatgaccaccctcttctgcatcaatgccctgtctgaggcctgtggccaggagatcaccaccaagcagatgctgcccatcgtgctgaagatggccggggaccaggtggccaacgtgcgcttcaacgtggccaagagcctgcagaagattggccccatcctggacaccaatgccctgcagggcgaggtgaagcctgtgctgcagaagctgggccaggatgaggacatggatgtgaagtactttgcccaggaggccatctctgtggtggcccagaggctgaggaagctggagttccctgtgaaggacagcggggagcccagcgtgcccagggctgacaagaaccacttcccccggcccaccgtgcctggagaggacatgggcaaaggacctgtgtaccagctgcggggggacacccgggacaccctggcccagctgggcattgctgagctggtgcacttcagccagagcacagactag

SEQ ID NO: 255392 - DNA, 1812 bp, Artificial Sequence
  derived and/or modified sequence
atggccggcgccagcgagctgggcaccggccccggcgccgccggcggcgacggagacgatagcctgtacccaattgccgttcttatcgacgaactgcgaaacgaagatgtacagcccccgctggagaaccttgccactgtagaggagacagttgtcagggacaaggccgtggaatcacttcggcagatctcacaggagcacacgccggtcgccctggaggcctacttcgtgccacttgtgaaacgcttagcatccggcgactggttcacatctcggacatctgcgtgcggattattttcagtatgttatcccagagcttctaatgctgttaaagcagagatccgccagcagtttcgcagcctatgttcagatgataccccaatggtgcgtagagccgctgcctccaaactgggcgagtttgctaaggtgctcgaactggacagcgttaaatcagagatcgtaccgctgttcacatctcttgcttccgatgaacaggactcagtcaggctactcgccgtcgaagcttgtgtttctattgcccagttactgagccaggacgatctggagactctagtgatgcccactttgcgacaggccgccgaggacaaaagttggcgagtgcgctacatggtcgcggacagattttcagagttacagaaggctatgggcccaaaaattaccctcaatgacctcattcccgcctttcagaatctactcaaggattgcgaagcggaggtgcgggccgccgccgcgcacaaggtgaaggagctgggtgagaacctgcccattgaagatagggagacgatcatcatgaaccaaatcctcccctatatcaaagaactggtcagcgacaccaaccagcatgtcaagtcagcacttgcatctgtcattatgggactctctacaatactgggtaaggagaatacaattgagcacctgttgccactgtttttagcacaactcaaggacgagtgccctgacgtgcggttaaacatcatatccaacctcgattgtgtaaatgaggtaattggcattcgccagctaagccagtccctcctgcccgctatcgtcgagctcgcagaggatgcaaaatggcgggtacgtcttgccatcatcgaatatatgccccttcttgcaggtcaactcggcgtcgaatttttcgacgagaaactgaattctctatgcatggcctggctggtggatcacgtctacgcaattcgggaggctgccacaaataaccttatgaaattggtccaaaagttcggaactgaatgggcccagaatacgatcgtgcctaaggtgttggtgatggcaaacgaccccaactatctgcaccggatgaccaccctgttctgtattaacgctctcagcgaggcttgcggccaggaaatcaccaccaagcagatgttgcctatcgtgctcaaaatggccggagatcaggtggcaaacgtgcggtttaatgtggccaagagtttgcaaaaaatcggccctattctggacacaaatgccctgcaaggcgaggtgaagcctgtgttgcaaaaactgggacaagatgaggatatggatgtgaagtactttgcccaggaggctatttcggtagtcgctcagcgtctgcgcaagctggaatttcctgtgaaagattccggggaaccgagcgttccccgagccgacaagaaccatttcccgcgccctaccgttccgggggaggacatgggaaaaggtccggtttatcagctccgcggcgacacaagggacacactcgctcagcttgggattgccgaactagtgcactttagccagtctacggattag

SEQ ID NO: 255393 - DNA, 1812 bp, Artificial Sequence
  derived and/or modified sequence
atggcaggcgcttccgagctgggaaccggccctggtgccgctggcggtgatggggatgattctctttatcctatcgccgtgctaattgacgagctgcgcaacgaggatgtacagcccccactggaaaatcttgcaaccgtggaagagaccgttgtcagagataaggccgtggaatcgctgcgccagatctcacaggaacacacccccgttgcccttgaggcttacttcgtccctttggtgaagagactggcaagcggcgactggtttacatcacgtactagtgcatgcggcctgttctccgtgtgttacccccgtgcgagcaacgccgtaaaggccgagattcgccaacagtttcgctccttatgcagcgacgatacccctatggtgcggagagccgcagcttccaagctgggcgagttcgccaaggtactggaactggacagcgttaagtcggagattgtgcctcttttcacgagcctggcaagcgacgaacaggactcagtgagactgctagcggttgaagcttgtgtgagcattgcgcaactgctgtcccaagacgacctcgagaccctcgtgatgccaactctcaggcaggcagctgaagacaaatcctggcgagtgcgttacatggtggccgataggtttagcgagctccagaaggccatgggcccaaagatcacactcaacgatttgatcccagcattccagaacctgctgaaggactgcgaagccgaggtgcgcgcagccgctgcccataaggtcaaggaactcggggaaaatctgcctatcgaggacagggagacaataatcatgaaccagatcctgccttatataaaggagctcgtgagtgacacgaatcagcatgtgaagagcgccttggcaagtgtgattatgggcctctctacaattctaggaaaagagaacaccatcgagcacttactgcccttgttcctcgcccaattgaaggacgagtgccctgatgtgcgactgaacattatatccaatctcgattgcgtcaatgaagtgattggaatccgacagctgtcacagtccctactgccggcaatagtcgaactcgctgaggatgccaagtggagggtccggcttgcgatcatcgagtatatgcctctgctggcgggtcagctgggcgtcgaatttttcgacgagaaactaaattctttgtgtatggcctggttggtggatcacgtatatgccattagggaggctgcaactaacaaccttatgaagctggttcaaaaatttgggacggaatgggcccagaacactattgtgccaaaagtcttggtaatggccaatgaccccaactatctgcatagaatgaccacactgttctgtattaatgccttgtccgaagcttgtggtcaagagatcaccactaagcagatgttgcccatcgtgctgaaaatggcgggagatcaggtggcaaacgtccggtttaacgtggccaagtccctgcagaagattggacctatcttagatactaacgccctgcagggtgaagtgaaacctgtgctgcagaaactgggccaggacgaggatatggatgtgaagtacttcgcccaggaggccattagcgtggttgctcagaggctgcgaaagctcgaattccctgtaaaagactctggtgaaccctctgtcccaagggcggacaagaatcactttccacgcccaacagttccaggggaagatatggggaagggcccagtgtatcagctaaggggagacactagagatactctggcccagctcggcatcgctgagctcgtccatttttctcagagcaccgattag

SEQ ID NO: 255394 - DNA, 1888 bp, Artificial Sequence
  derived and/or modified sequence
gaccagcagcaggaggagaaagaacatggcgggcgcatcagagctcgggaccggcccaggagcagcgggtggagatggagatgattcgctatacccgatcgcggttttaatcgacgagctccgcaatgaagacgtgcagcctcctttggaaaatctggcaactgtggaagagactgttgttcgtgacaaggctgtggagtccctgagacagatctcccaggagcatactcctgttgctctggaagcttattttgtacctctggtgaaacgcttagcaagtggggattggttcacctctcgcacatctgcatgtggtttgttcagcgtttgctatcccagggcatcaaatgctgttaaagcagaaatcagacagcaattccgttccttgtgctcagatgacacaccaatggtacgacgtgctgctgcttccaaattgggtgaatttgcaaaagttttggaattagacagtgtgaaaagtgaaattgttccactgttcactagtctagcttcagatgaacaggattcagtgcgcctccttgctgtggaagcttgtgtcagtattgcccagttattgtctcaggatgaccttgagactttggtgatgcctacacttcgacaagcagcagaagataaatcttggcgcgttcgctatatggtggctgacagattttcagagctccagaaagccatgggtcctaaaatcaccctaaatgacctcatccccgcctttcagaacctacttaaagactgtgaagctgaagtccgggcagctgctgcccacaaagtaaaagaacttggtgagaacttgcccattgaagatagagagaccataattatgaatcaaattctgccttatataaaggaattagtatccgataccaatcaacatgtcaaatcggctctagcttctgtaattatgggattgtctactattttgggcaaagaaaataccattgaacatcttctacctcttttcttagctcagttaaaggatgagtgtcctgacgttcgtttgaatatcatctccaatttggattgtgtaaatgaagtgattggaatccgtcagctctctcagtctctccttcctgccatagtggagctggcagaagatgccaaatggagggtccgcctggccatcattgagtatatgccgctgctggcaggccagctgggtgtggaattctttgatgaaaagctgaattctttatgtatggcttggctcgtggaccatgtatacgccatccgagaagctgccaccaacaacctcatgaaactagttcagaagtttggtacagagtgggcccaaaatactattgttcccaaagtgttagtaatggcaaatgatcctaattacttgcatagaatgaccactttattctgcattaatgcactgtctgaggcctgtggtcaggaaataactactaagcaaatgctgcccatcgtattaaaaatggcaggagaccaagtagcaaatgttcgcttcaatgtggccaaatctctacaaaagattggaccaattctagataccaatgctttacagggagaagtgaagccagtactacagaagttaggtcaagatgaagacatggatgtcaaatactttgcacaggaagctataagtgtggtggcacaaaggctgaggaagctagaatttcctgtgaaggacagtggagaacccagtgtccctcgggctgacaagaaccacttcccaagacccacagtgcctggagaggacatggggaagggaccagtgtatcagttgcgtggagatactagagacacacttgcccagctgggaattgcagagctagtgcatttctcccaaagcacagactaataccccagatttaaaaaaagaacataaaaaataaagtaccacacatattgc

SEQ ID NO: 255395 - protein, 698 aa, Artificial Sequence
  derived and/or modified sequence
MAAAGAAVARSPGIGAGPALRARRSPPPRAARLPRLLVLLAAAAVGPGAGGAARLYRAGEDAVWVLDSGSVRGATANSSAAWLVQFYSSWCGHCIGYAPTWRALAGDVRDWASAIRVAALDCMEEKNQAVCHDYDIHFYPTFRYFKAFTKEFTTGENFKGPDRELRTVRQTMIDFLQNHTEGSRPPACPRLDPIQPSDVLSLLDNRGSHYVAIVFESNSSYLGREVILDLIPYESIVVTRALDGDKAFLEKLGVSSVPSCYLIYPNGSHGLINVVKPLRAFFSSYLKSLPDVRKKSLPLPEKPHKEENSEIVVWREFDKSKLYTVDLESGLHYLLRVELAAHKSLAGAELKTLKDFVTVLAKLFPGRPPVKKLLEMLQEWLASLPLDRIPYNAVLDLVNNKMRISGIFLTNHIKWVGCQGSRSELRGYPCSLWKLFHTLTVEASTHPDALVGTGFEDDPQAVLQTMRRYVHTFFGCKECGEHFEEMAKESMDSVKTPDQAILWLWKKHNMVNGRLAGHLSEDPRFPKLQWPTPDLCPACHEEIKGLASWDEGHVLTFLKQHYGRDNLLDTYSADQGDSSEGGTLARGEEEEKRLTPPEVSHGDRDTQSVRPPGALGPRPALPESLHHSLDGKLQSLDGPGAHKEVGGAAPFLGVDFSSLDMSLCVVLYVASSLFLMVMYFFFRVRSRRWKVKHHHPAV

SEQ ID NO: 255396 - protein, 315 aa, Artificial Sequence
  derived and/or modified sequence
MEEKNQAVCHDYDIHFYPTFRYFKAFTKEFTTGENFKGPDRELRTVRQTMIDFLQNHTEGSRPPACPRLDPIHVKPLRAFFSSYLKSLPDVRKKSLPLPEKPHKEENSEIVVWREFDKSKLYTVDLESGLHYLLRVELAAHKSLAGAELKTLKDFVTVLAKLFPGRPPVKKLLEMLQEWLASLPLDRIPYNAVLDLVNNKMRISGIFLTNHIKWVGCQGSRSELRGYPCSLWKLFHTLTVEASTHPDALVGTGFEDDPQAVLQTMRRYVHTFFGCKECGEHFEEMAKESMDSVKTPDQAILWLWKKHNMVNGRLA

SEQ ID NO: 255397 - DNA, 2097 bp, Artificial Sequence
  derived and/or modified sequence
atggccgccgctggggccgctgtggcgcgtagccccggcattggagctggtcccgctctgagagcccggcggagcccgcccccgcgggccgcaagactaccaaggttattggtgctgctggccgccgctgcagtgggcccaggcgcagggggtgccgctaggctgtacagggcaggcgaagatgcagtctgggtgctcgactccgggagcgtccgtggtgctactgccaattcatccgcagcctggctggtccaattttattcatcatggtgtggccattgtatcggctacgcacctacctggagagcgctggcaggggacgttagagactgggccagcgcaatcagggtcgccgcgctagattgcatggaggaaaaaaaccaagctgtctgccacgactatgacatccatttctacccaacgttcaggtattttaaggccttcaccaaagaatttacaaccggcgaaaatttcaaggggccagaccgggagctccgtactgtaaggcagactatgatcgatttcttgcagaatcatacggaaggatcccgtcctccggcatgcccaaggctggatccaatccaaccttccgacgtactgtctcttctcgacaataggggatcccactacgttgcaatagtgtttgagagtaactctagttatctcggcagggaagtcatcctggatctcattccttatgagagcatagttgtgacccgtgccctcgacggcgacaaggcattcctggagaagctgggggtgtctagtgttccatcatgctacttaatttatccaaatggctcccacggactgataaacgtggtgaaacccttgcgcgcattcttttcctcctacttgaagagtctgcccgacgtcagaaaaaaatcattacctttgccagagaaaccacacaaggaagagaacagtgaaatcgtggtttggcgggaattcgacaagagcaagctgtacaccgttgacctcgagtctggtctgcactaccttttgagagtggaattggcagcacacaaatcactcgcgggggccgagctgaagactctcaaggactttgtgaccgttctcgccaagttgtttcccggaaggcctcccgtgaaaaaactgctcgagatgctgcaggagtggctcgcatcactgcccctcgaccggatcccctacaatgccgtgctcgacctagtaaacaacaaaatgagaatatcaggtatttttctgaccaatcacataaagtgggtgggctgtcagggcagcaggtccgagttacgcggatacccttgctctctgtggaaactgttccacacgcttaccgtcgaggcctcgacccacccagacgcactggtgggaactggttttgaagatgatccccaggcagtattacagaccatgcgccgctatgtccacacgtttttcggatgtaaagagtgtggagaacacttcgaggagatggctaaagagtcgatggactcagtgaagacaccagaccaagctatcctgtggctgtggaagaaacacaatatggtgaatgggcggttagccggacacctgagcgaagacccgcgatttcccaagctgcagtggccaactcccgatctgtgcccagcctgtcacgaagaaattaaagggctggcctcttgggatgaagggcatgtcctgacattcttgaaacagcactacgggcgcgataacctccttgacacatacagtgcagatcaaggagacagctctgagggaggtacgctggcccgcggagaggaggaagagaagcggctgacgcctcccgaggtttcccatggggaccgcgacactcagagtgtgaggccaccgggcgcattggggccccgcccagcactgcccgagtcccttcaccacagcttagatggaaagctgcagtctctggacggcccaggagcacataaggaggtcggtggagcggcaccattcctgggagtagatttctcaagcctcgatatgagtctgtgtgtggtcctgtatgtggccagttctttattcttgatggtcatgtatttctttttcagagtacggtctcgtagatggaaggtgaaacatcatcacccagctgtgtag

SEQ ID NO: 255398 - DNA, 948 bp, Artificial Sequence
  derived and/or modified sequence
atggaagaaaagaatcaagcagtgtgtcacgattatgatatccatttttatcctacattccgctattttaaagcatttaccaaagaatttacaactggcgagaattttaaggggcccgacagggagctgcggactgtgagacagacaatgattgatttcttgcaaaaccacactgaggggagtcgacctcccgcatgcccaagactggatcccattcatgtgaaacccctgagggcttttttttcaagctacctcaaatcgcttccagacgtgcgcaagaagagcctcccccttcccgagaaaccccacaaggaagaaaattcagaaatcgtggtctggagagaattcgataaatctaaactttacacagtagacctcgagagcggattgcattacctgctgcgagtagaactcgcggcacataaatctctggccggagctgaattaaaaactcttaaagattttgttaccgtccttgccaaactgtttccagggcgcccccccgttaagaaattgctcgagatgttacaggaatggctggccagcctgcccttggaccgcattccttataatgccgttctggatctggtgaacaacaagatgcggataagtgggatattccttaccaatcatataaagtgggtgggttgtcaaggatctcgatctgaactgcgaggatatccctgttcactctggaaattattccacactttaaccgtggaagcctctacacaccctgacgcactggtcggtaccggattcgaggacgacccccaggcagtgctgcagacaatgaggagatatgttcacactttcttcggatgcaaagagtgtggcgagcactttgaagaaatggcgaaggaatctatggatagcgtcaagacacctgatcaggcgatcctgtggctgtggaagaagcacaacatggtgaatggaagacttgcttag

SEQ ID NO: 255399 - DNA, 2097 bp, Artificial Sequence
  derived and/or modified sequence
atggctgctgctggagctgctgtggcccggagccctggcatcggggccggccctgccctgcgggcccggcgcagccccccaccccgggccgcccggctgccccggctgctggtgctgctggccgctgctgctgtgggccctggagctggaggagctgcccggctgtaccgggccggggaggatgctgtgtgggtgctggacagcggctctgtgcggggggccacagccaacagcagcgctgcctggctggtgcagttctacagctcctggtgtggccactgcatcggctacgcccccacctggagggccctggccggagatgtgcgggactgggccagcgccatccgggtggccgccctggactgcatggaggagaagaaccaggccgtgtgccacgactatgacatccacttctaccccaccttccgctacttcaaggccttcaccaaggagttcaccaccggggagaacttcaagggccctgaccgggagctgaggacagtgcggcagaccatgattgacttcctgcagaaccacacagagggcagccggcccccagcctgcccccggctggaccccatccagcccagtgatgtgctgagcctgctggacaacagaggcagccactacgtggccatcgtgtttgagagcaacagcagctacctgggccgggaggtgatcctggacctgatcccctatgagagcatcgtggtgacccgggccctggatggagacaaggccttcctggagaagctgggcgtgtcctctgtgcccagctgctacctgatctaccccaacggcagccacggcctcatcaacgtggtgaagcccctgcgggccttcttcagcagctacctgaagagcctgcctgatgtgaggaagaagagcctgcccctgcctgagaagccccacaaggaggagaacagcgagatcgtggtgtggagggagtttgacaagagcaagctgtacacagtggacctggagagcggcctgcactacctgctgcgggtggagctggccgcccacaagagcctggccggggctgagctgaagaccctgaaggactttgtgacagtgctggccaagctgtttcctggccggccccctgtgaagaagctgctggagatgctgcaggagtggctggccagcctgcccctggaccgcatcccctacaatgctgtgctggacctggtgaacaacaagatgaggatcagcggcatcttcctgaccaaccacatcaagtgggtgggctgccagggcagccgctctgagctgcggggctacccctgcagcctgtggaagctgttccacaccctgactgtggaggccagcacccacccagatgccctggtgggcactggatttgaagatgacccccaggccgtgctgcagaccatgagaagatatgtgcacaccttcttcggctgcaaggaatgtggggagcactttgaggagatggccaaggagagcatggattctgtgaagaccccagaccaggccatcctgtggctgtggaagaagcacaacatggtgaatggccgcctggccggccacctgtctgaggacccccgcttccccaagctgcagtggcccaccccagacctgtgcccagcctgccacgaggagatcaagggcctggcctcctgggatgagggccacgtgctgaccttcctgaagcagcactacggccgggacaacctgctggacacctacagcgctgaccagggcgacagcagcgagggcggcaccctggcccggggggaggaggaggagaagaggctgaccccacctgaggtgtcccatggagaccgggacacccagagcgtgcggcccccaggggccctgggccccaggcctgccctgcctgagagcctgcaccacagcctggatggcaagctgcagagcctggatggccctggggcccacaaggaggtgggcggggccgcccccttcctgggcgtggacttcagcagcctggacatgagcctgtgtgtggtgctgtatgtggccagcagcctcttcctgatggtgatgtacttcttcttccgggtgcgcagccgccgctggaaggtgaagcaccaccaccctgctgtgtag

SEQ ID NO: 255400 - DNA, 948 bp, Artificial Sequence
  derived and/or modified sequence
atggaggagaagaaccaggccgtgtgccacgactatgacatccacttctaccccaccttccgctacttcaaggccttcaccaaggagttcaccaccggggagaacttcaagggccctgaccgggagctgaggacagtgcggcagaccatgattgacttcctgcagaaccacacagagggcagccggcccccagcctgcccccggctggaccccatccacgtgaagcccctgcgggccttcttcagcagctacctgaagagcctgcctgatgtgaggaagaagagcctgcccctgcctgagaagccccacaaggaggagaacagcgagatcgtggtgtggagggagtttgacaagagcaagctgtacacagtggacctggagagcggcctgcactacctgctgcgggtggagctggccgcccacaagagcctggccggggctgagctgaagaccctgaaggactttgtgacagtgctggccaagctgtttcctggccggccccctgtgaagaagctgctggagatgctgcaggagtggctggccagcctgcccctggaccgcatcccctacaatgctgtgctggacctggtgaacaacaagatgaggatcagcggcatcttcctgaccaaccacatcaagtgggtgggctgccagggcagccgctctgagctgcggggctacccctgcagcctgtggaagctgttccacaccctgactgtggaggccagcacccacccagatgccctggtgggcaccggctttgaagatgacccccaggccgtgctgcagaccatgaggcgctacgtgcacaccttcttcggctgcaaggaatgtggggagcactttgaggagatggccaaggagagcatggacagcgtgaagaccccagaccaggccatcctgtggctgtggaagaagcacaacatggtgaatggccgcctggcctag

SEQ ID NO: 255401 - DNA, 2097 bp, Artificial Sequence
  derived and/or modified sequence
atggccgccgccggcgccgccgtggcccggagccccggcatcggcgccgggccagctcttagagccaggaggtctcctcccccccgcgctgcccgtcttcccaggctgctggtcctgctggcggccgcagcagtgggtcctggcgccggcggagccgccaggctgtatagggccggggaggacgctgtatgggtgctggatagcggttcagtgaggggagcgacggccaattcttcagccgcctggctggtacagttctactctagttggtgtggccattgcatcggttacgcccccacgtggagagcccttgctggtgatgtgcgagactgggcctccgctataagagttgctgcattggattgcatggaagagaaaaatcaggctgtttgccatgactacgatatccatttctacccgacttttcgttatttcaaggcctttacaaaggagttcaccaccggtgagaatttcaagggccctgatcgagagctgcgcaccgtgaggcaaactatgatcgacttcctgcagaatcacacagagggctcccgtcctccagcatgtccccgtctggatccaatccaaccgtctgacgtgctgagcctgctcgacaatagagggagccactacgtggctatcgtattcgagtcaaattcatcataccttggcagagaagtgattttggatttgataccatatgaaagcatcgtcgtgactcgtgcactggacggggacaaggctttcctggaaaaactcggcgtcagttccgtgccctcttgttacctcatttaccctaatggaagtcacgggttgatcaatgtcgtaaaaccactgcgtgcctttttctcatcttatctgaaatcactgcccgacgttcgcaagaaatctcttccattgccagagaaaccacataaggaggaaaactccgagattgttgtgtggcgtgaattcgataagagcaagctctacacagttgatctcgaaagcggactgcactacttgttgcgtgtcgaactcgccgcacataaatcacttgcaggagcggaactgaagacccttaaagattttgtcacagtgctggctaagctgttccctgggcgaccacctgttaaaaaacttcttgagatgttacaggagtggttggcctcactaccattagaccggattccctataatgctgtgttagacctggtcaataataaaatgcgcataagtggaatatttctcacaaatcatatcaagtgggtgggatgccagggctctcgctcagagctgaggggttacccctgcagtctgtggaaactttttcatacattgacagtcgaggcctcgactcatccagatgcgctagtgggcaccggtttcgaggacgaccctcaagcagtgttgcagacaatgaggcgatacgtccatactttttttggttgtaaggagtgtggcgagcattttgaggaaatggcaaaagaatctatggacagcgtgaaaacacccgaccaggccattctctggttgtggaaaaagcataacatggtgaatggacgcttggccgggcacctgagtgaggatccaaggtttccgaagcttcagtggccgactccagacctgtgtccagcatgtcatgaggagatcaagggactcgctagctgggatgagggacatgtcctaacgtttctaaaacagcactacgggcgagacaaccttctggatacatacagcgcagaccagggggatagtagtgaaggtggcaccctagcccgtggcgaggaggaggaaaaaaggctcacccctcctgaggtgtctcacggagatagggatacacagagcgttcgcccccccggtgccctagggcctaggccagccctgccagaatcattgcatcatagtctcgatggcaagctgcaatcacttgatgggcctggggcacacaaggaagtagggggtgccgcaccatttctgggcgtggattttagctcactggacatgtccctttgcgtggtactatacgtggcctcctcactgttcttgatggtgatgtacttcttcttccgcgttaggagtagacgatggaaagtcaagcatcaccatcccgccgtgtag

SEQ ID NO: 255402 - DNA, 948 bp, Artificial Sequence
  derived and/or modified sequence
atggaggagaagaaccaggccgtgtgccacgactacgacatccacttctaccctacattccgctacttcaaagcctttaccaaggagttcaccaccggcgaaaacttcaagggcccagatagagaattgcgaaccgtccgccagacaatgatcgacttcttacagaatcataccgagggatccagaccccctgcttgtccaagactcgaccccatacatgtgaagcccctgcgggccttcttcagctcctatctcaagtctctccctgacgtgcggaagaagtcattgccattgcccgaaaagccccacaaagaagagaatagcgagatcgttgtgtggcgggaatttgataagagtaagctgtacactgtcgatttggaatctggcctgcactacctgcttagggtggaactggctgcacacaagagtctggcgggggctgagcttaagaccctaaaagactttgtgactgtcctcgctaaactgttccctggtcggccacctgtcaaaaagctgctcgaaatgcttcaagaatggttggccagtcttcccctggaccgaatcccatacaatgctgtgctggacctagtgaataacaagatgcggatctcaggaatctttttaactaatcatataaagtgggttgggtgtcagggatcacggagcgaactccgcggctacccatgtagcctgtggaagttgttccatacactgacggtcgaggcttccacccacccagatgctctcgtcgggaccggtttcgaggatgacccacaagctgtgctccagacaatgcgtcgctacgtgcacaccttcttcgggtgtaaagaatgcggcgagcatttcgaggagatggctaaggagagtatggacagcgtcaaaacgcctgatcaagctatactctggctgtggaaaaagcacaacatggtgaatgggcggctggcatag

SEQ ID NO: 255403 - DNA, 2097 bp, Artificial Sequence
  derived and/or modified sequence
atggccgctgctggcgctgccgtcgccagatccccaggtatcggggctgggcctgcccttcgtgcaaggagatcaccacctcctcgagccgctcgcctgcccagactcctggtcttattagcagctgcggctgtagggcctggtgcgggtggggcagcacgattgtatagggctggcgaggacgctgtttgggtgctggattcaggctcagtgcggggtgccactgctaactcctcagcagcgtggctcgtgcagttttattccagctggtgtgggcactgcatcggctacgccccaacttggcgcgctctggccggagatgtgagagattgggcctctgccattagggtagcagccctcgattgcatggaggaaaagaaccaagcagtctgtcatgattatgatatccatttttacccgacctttcgatacttcaaggctttcacaaaggagtttacaaccggtgagaattttaagggtccagaccgagagctgaggacagtgagacagacaatgatcgactttctgcagaaccacacagaaggctcacgtcccccagcctgccccagactcgatcccattcaaccttcggacgtgctgtctctcctggataatagagggtcacattacgtcgctatagttttcgagtctaattcctcatatctgggtagagaagtgattctcgatctgattccatacgaaagcatagtggtaacacgagcgttagacggagataaggctttcctggaaaaactcggcgtgtcttccgttccatcgtgttatctgatttatcctaacggcagccacggcctgatcaacgttgtaaaacccctcagagctttcttcagtagctatctcaaaagtctgccagatgtcagaaaaaaatccttgccccttccggagaaaccacataaggaagaaaactcagagatagtggtttggagagagttcgataagtccaagctctacaccgtggatctcgaatccgggctgcattacttgctgagagtggagctcgcagcacacaagtcacttgccggtgcggaactgaagacactcaaggactttgtaaccgtcctggctaagctctttcccggacggccacccgtaaagaagctcctggaaatgctccaggagtggctagcatccttgccactcgacagaatcccttataacgcagtactggacttggtgaataacaagatgaggatctctgggattttcctgaccaaccacattaagtgggtgggatgtcagggcagtcggagcgaactccgaggttatccatgcagtttgtggaagctgtttcacacactgaccgtggaggcgtccacacaccctgacgccctagttgggacaggcttcgaagatgatccccaggcggtactgcagactatgcggcgttatgtgcatacgtttttcggatgtaaagaatgtggcgaacacttcgaggagatggctaaggagtcaatggattccgtgaaaaccccggaccaggccatcctatggctgtggaagaagcataatatggtgaatggtcgcctagctggccacctatccgaggaccctcggttcccaaaactgcagtggccaaccccagatttgtgtcccgcatgccatgaagagataaaaggcctggcctcctgggacgagggtcacgtcctaacctttctcaaacagcactatggccgtgacaacctgctcgacacctactcagcagatcagggggacagttccgaaggaggcacactggccagaggggaggaggaagaaaagagattgactccaccagaggtcagccatggtgatcgggacacacagagcgtcagacctccaggagcactcgggcctcgccctgctctgcctgaatctctccaccattctctggacggaaaactgcaatctctggacgggcctggcgctcataaagaagtcggaggggcagctccattcctgggtgtcgacttcagcagcctggatatgtcattatgtgtggtgctgtacgtggcgagttcacttttcttgatggttatgtatttctttttcagagtacgcagccgacggtggaaagttaagcatcaccacccagccgtgtag

SEQ ID NO: 255404 - DNA, 948 bp, Artificial Sequence
  derived and/or modified sequence
atggaggagaaaaaccaagcagtgtgtcacgattacgatattcacttctaccctacgtttagatactttaaagccttcacaaaggaatttactactggagagaatttcaaagggccagatcgagagttgcggacggtcaggcagacaatgattgattttcttcagaatcatacagaagggtcacgcccacccgcttgccccaggctcgacccaattcacgtgaaaccgctgcgagcttttttctctagctacctgaagtcattgcccgacgtgagaaaaaaaagccttccccttcccgaaaagccccataaggaagagaactctgaaatagttgtatggcgcgagtttgataagagtaagctttatacagtggacctagaaagcggtttgcactacctgttgagggtcgaactagcggctcacaaaagtctagctggtgctgagctgaaaacactgaaggatttcgtaacggtcctggccaagctctttccgggaaggccgcctgtcaagaagctgcttgaaatgctgcaggaatggctggcttccctgcccctggaccgaattccatataatgccgtgctcgacctggttaataataagatgaggatctccggcatcttcttaacaaatcacataaagtgggtggggtgccaaggctcccgctccgagttaagaggctacccatgttctctttggaaactatttcatactctgactgtcgaggccagcacccatccagatgcccttgttggaacaggcttcgaggacgacccacaggctgtgctccagaccatgcggcgttacgtacacaccttcttcggatgtaaggagtgcggcgagcacttcgaggagatggccaaggaatcgatggacagcgtaaaaacaccagaccaggcaatcctatggttgtggaaaaaacataacatggtgaatgggaggctcgcatag

SEQ ID NO: 255405 - DNA, 4530 bp, Artificial Sequence
  derived and/or modified sequence
ccagggtgaaagttcagcgcgccggcggcacttccaacatggcggcggccggggcggcggtggcgcgcagcccgggaatcggagcgggacctgcgctgagagcccggcgctcgcccccgccgcgggccgcacggctgccgcggctgctagtgctgctagcggcggcggcggtggggccgggcgcgggcggtgcggcgcggctgtaccgcgcgggcgaggacgccgtgtgggtgctggacagcggcagcgtgcgcggggccaccgccaacagctcggccgcgtggctcgtgcagttctactcgtcgtggtgtggccactgcatcggctacgcgcccacttggcgggccctggctggggatgtgcgagactgggccagtgccattcgcgtcgcagctctggactgcatggaagagaagaaccaggccgtgtgccatgactacgacatccacttctaccccaccttccggtattttaaagcatttacaaaggagtttacaactggagaaaattttaaaggacctgaccgagagctgcgaacagtcagacagacgatgattgacttcctgcagaaccacacggaaggaagccggccccctgcctgcccgcgcctagaccccattcagcccagtgatgttctttcccttcttgacaaccgtggcagccattacgtggctattgtctttgaaagcaacagctcctaccttggacgggaggtgatcttagacctgatcccgtatgaaagcatcgtggtgacccgagcactggacggggacaaagcatttctggagaaacttggtgtttcttcagtcccttcgtgttacctgatctacccaaatgggtcgcatggattgattaacgtcgtgaagcctctgcgggccttcttttcgtcttatttgaagtcattgccggatgtgaggaaaaaatcgcttcccttgcctgaaaagccacacaaagaagaaaattcagaaatcgtggtttggagagaatttgacaagtcgaagctgtacacggtggacctggagtcagggctacactacctcctgcgggtggagctggcagcccacaagtccctggccggagcagagctgaagacgctcaaggactttgtgactgtcttggccaagctgttccctggacggccgccagtcaagaagctgttggagatgctgcaggagtggctggccagccttcccctggacaggatcccctacaacgccgtgcttgacctggtcaacaacaagatgcggatttctggaatattccttactaatcacataaagtgggttggatgtcaaggaagccgatctgagttgaggggttacccgtgttctctctggaaactgttccacactttgactgttgaagcctcgacccacccagatgcactggttggcacaggctttgaagacgacccccaggctgtgctgcagacaatgaggaggtacgttcacaccttctttgggtgtaaggaatgtggtgagcactttgaggaaatggctaaagaatccatggactcggtgaaaaccccagaccaagccatcctctggctgtggaagaagcataatatggtgaacggccgcctggcaggccatctgagtgaggatccccggtttccaaagcttcagtggcccactccggacctctgcccagcctgccatgaggaaattaagggcctggccagctgggatgaaggccacgtgctcacattcttgaagcagcactatggccgcgacaacctcttagacacgtattccgcagaccagggggattccagtgaaggaggaaccctggccaggggtgaggaagaggagaaaagactcactcccccagaggtgtcccatggagaccgagacacccagagcgtccgtccacctggtgcactgggccccaggcctgcccttccagagagcttgcatcacagcttggacgggaaactccagagtctggatgggcccggggcccacaaggaggtgggcggggccgcacccttcctcggggttgacttctccagcctggacatgagtctctgtgtcgtgctgtacgtggcttcatccctgttcctcatggtgatgtacttcttcttccgggtgaggtccaggcggtggaaggtcaagcaccaccacccggccgtgtgagtgcccgggtgctgccagccacggcggaagctcccttggaggcagccctgccccgtgccacctgcagctttaatatttatgatcagggattttataaacatgcgggcctggtttcacatcggatggcaccttttggcttcaaagtcctggttttacaaacgctcttctaacaagggaagaacacggggtaattttgtggggatatttgcattcctggcgtactcaagtctgttcatgctccttttgcaggtcttacagcaaaaagacttctgtatttttactcttctagatgtgaaaagagggtgcagagtccaggccagatagtcttccccacacactttcatctcgtttcctccactccgccccatcctgcagggccttgtttttgtatttggagaacctcgcccatcccccccgcggctcctggctcccccccactcccctcgctccccctccccccgctccccccacgccccctgctccaggctgccaagtgttttcctttagccgggcggggacagacagagccggaagcgcagtcggcctctgcagcccctccaagcaagtgctccagggactatcctgtgtttgtagctgcttccctagggcaggttcctgagggctctccttgttcctccgggtgttcgacaccagacgtggggatttcaacaggggaggagccaaggaattctgtggctgtgctgcgtttcagaaaataacccccagaggccttgggctgtggacctgggggttggaaggatgggggctcatttaaccctcagaggcagcgcctttgtctgtctatctggtgacaagagagagacaagtaaatgggggccgttgggacggcgggtgcctggagggcagctctgggctcagcgggcagtgcttagagcacaggcccctctgttgggggatggggaggagagcagtctgcccttgggagcgtaggccccagggagacttctaaagccccccctgtcgtctgctcttcacccagcaccacagaggcacctgctgcacacacaagcatctcactcggcccacggagggggccaggcttcctttgcctgaagctgttttgggaagggtctccacacaggcactgatctcccaagcttttgtcatgatgtcttttaccatttgataattttaaacattgtttttaaacccaaaacatttagtggtccgttgcctctgaagatgtaaacaaacaaatacactatttctgggaacatttatattgagattctttgtggctattggtgtgtctcacaggcaaaatttgatttggctaaaataggctcagatgtatttgtgtgcccgtgtgtgtgtgtgtgtgtgtgtgtgtgtgtgtgtgtgtatgagagagagagagactttgacggttgtagatattttttccgctttgcctactttatgttgtataatcatgtgtttactaacaagttgatgacatggatgtattcataagaccatgtaatattgatgtgattgttgtcgcttgagaaaaaaaggcaacagctgattctttcaacaactgtcacagaatggctgggctgagaacgctgcccagggccctgcagctggcgggagaggtgtctggtgggagcggtgtctggtgcgtcagcctgctgcttcgtgtctcactcgagagttgcttctggtttcacactttttaacccctctgtgctttagcagccgtgaccttgccttcattgcttcatccagtgcaggcctgggttattgaagacaccaaagtgtttctcttccagtttgaaaaccaggcaggtttacacgtgggtttcagtgtatttgcctttgaacccttcaaactaaactttagccttttggctggtgttgaatgtctttagctggggtgacctggagtgacctgggacggtgttgtggtttaccgtctccagcttcagcctttccagaaacccttgtggagggcagtgttggctgcaggtttcatcatattgcagtttgaggtcaccactatttggggaacaagcttgcgtcctgctgaggggcaggattttcagcagagcgtcggtggggctgggccgtcgtggaggtggccccaggagtcatatggccatactcagacacaccttgtgtggcctgctcagagctggatgccacctttaggcaatgtttagagtctattttctaaagttttaagtattttaagaggtattgagactaatgaatataatagttcagtaatttaaatgcttatttattttcagtggaaggatttttattaaaaagaagctaattgacatggaaatgtcagtgaaatttcttacctgcaaggaaagtgaacattttgtatttaagtaaactataatgtgcacattttaataaagaaatctgacatttgaaaaaa

SEQ ID NO: 255406 - DNA, 4287 bp, Artificial Sequence
  derived and/or modified sequence
ccagggtgaaagttcagcgcgccggcggcacttccaacatggcggcggccggggcggcggtggcgcgcagcccgggaatcggagcgggacctgcgctgagagcccggcgctcgcccccgccgcgggccgcacggctgccgcggctgctagtgctgctagcggcggcggcggtggggccgggcgcgggcggtgcggcgcggctgtaccgcgcgggcgaggacgccgtgtgggtgctggacagcggcagcgtgcgcggggccaccgccaacagctcggccgcgtggctcgtgcagttctactcgtcgtggtgtggccactgcatcggctacgcgcccacttggcgggccctggctggggatgtgcgagactgggccagtgccattcgcgtcgcagctctggactgcatggaagagaagaaccaggccgtgtgccatgactacgacatccacttctaccccaccttccggtattttaaagcatttacaaaggagtttacaactggagaaaattttaaaggacctgaccgagagctgcgaacagtcagacagacgatgattgacttcctgcagaaccacacggaaggaagccggccccctgcctgcccgcgcctagaccccattcacgtgaagcctctgcgggccttcttttcgtcttatttgaagtcattgccggatgtgaggaaaaaatcgcttcccttgcctgaaaagccacacaaagaagaaaattcagaaatcgtggtttggagagaatttgacaagtcgaagctgtacacggtggacctggagtcagggctacactacctcctgcgggtggagctggcagcccacaagtccctggccggagcagagctgaagacgctcaaggactttgtgactgtcttggccaagctgttccctggacggccgccagtcaagaagctgttggagatgctgcaggagtggctggccagccttcccctggacaggatcccctacaacgccgtgcttgacctggtcaacaacaagatgcggatttctggaatattccttactaatcacataaagtgggttggatgtcaaggaagccgatctgagttgaggggttacccgtgttctctctggaaactgttccacactttgactgttgaagcctcgacccacccagatgcactggttggcacaggctttgaagacgacccccaggctgtgctgcagacaatgaggaggtacgttcacaccttctttgggtgtaaggaatgtggtgagcactttgaggaaatggctaaagaatccatggactcggtgaaaaccccagaccaagccatcctctggctgtggaagaagcataatatggtgaacggccgcctggcaggccatctgagtgaggatccccggtttccaaagcttcagtggcccactccggacctctgcccagcctgccatgaggaaattaagggcctggccagctgggatgaaggccacgtgctcacattcttgaagcagcactatggccgcgacaacctcttagacacgtattccgcagaccagggggattccagtgaaggaggaaccctggccaggggtgaggaagaggagaaaagactcactcccccagaggtgtcccatggagaccgagacacccagagcgtccgtccacctggtgcactgggccccaggcctgcccttccagagagcttgcatcacagcttggacgggaaactccagagtctggatgggcccggggcccacaaggaggtgggcggggccgcacccttcctcggggttgacttctccagcctggacatgagtctctgtgtcgtgctgtacgtggcttcatccctgttcctcatggtgatgtacttcttcttccgggtgaggtccaggcggtggaaggtcaagcaccaccacccggccgtgtgagtgcccgggtgctgccagccacggcggaagctcccttggaggcagccctgccccgtgccacctgcagctttaatatttatgatcagggattttataaacatgcgggcctggtttcacatcggatggcaccttttggcttcaaagtcctggttttacaaacgctcttctaacaagggaagaacacggggtaattttgtggggatatttgcattcctggcgtactcaagtctgttcatgctccttttgcaggtcttacagcaaaaagacttctgtatttttactcttctagatgtgaaaagagggtgcagagtccaggccagatagtcttccccacacactttcatctcgtttcctccactccgccccatcctgcagggccttgtttttgtatttggagaacctcgcccatcccccccgcggctcctggctcccccccactcccctcgctccccctccccccgctccccccacgccccctgctccaggctgccaagtgttttcctttagccgggcggggacagacagagccggaagcgcagtcggcctctgcagcccctccaagcaagtgctccagggactatcctgtgtttgtagctgcttccctagggcaggttcctgagggctctccttgttcctccgggtgttcgacaccagacgtggggatttcaacaggggaggagccaaggaattctgtggctgtgctgcgtttcagaaaataacccccagaggccttgggctgtggacctgggggttggaaggatgggggctcatttaaccctcagaggcagcgcctttgtctgtctatctggtgacaagagagagacaagtaaatgggggccgttgggacggcgggtgcctggagggcagctctgggctcagcgggcagtgcttagagcacaggcccctctgttgggggatggggaggagagcagtctgcccttgggagcgtaggccccagggagacttctaaagccccccctgtcgtctgctcttcacccagcaccacagaggcacctgctgcacacacaagcatctcactcggcccacggagggggccaggcttcctttgcctgaagctgttttgggaagggtctccacacaggcactgatctcccaagcttttgtcatgatgtcttttaccatttgataattttaaacattgtttttaaacccaaaacatttagtggtccgttgcctctgaagatgtaaacaaacaaatacactatttctgggaacatttatattgagattctttgtggctattggtgtgtctcacaggcaaaatttgatttggctaaaataggctcagatgtatttgtgtgcccgtgtgtgtgtgtgtgtgtgtgtgtgtgtgtgtgtgtgtatgagagagagagagactttgacggttgtagatattttttccgctttgcctactttatgttgtataatcatgtgtttactaacaagttgatgacatggatgtattcataagaccatgtaatattgatgtgattgttgtcgcttgagaaaaaaaggcaacagctgattctttcaacaactgtcacagaatggctgggctgagaacgctgcccagggccctgcagctggcgggagaggtgtctggtgggagcggtgtctggtgcgtcagcctgctgcttcgtgtctcactcgagagttgcttctggtttcacactttttaacccctctgtgctttagcagccgtgaccttgccttcattgcttcatccagtgcaggcctgggttattgaagacaccaaagtgtttctcttccagtttgaaaaccaggcaggtttacacgtgggtttcagtgtatttgcctttgaacccttcaaactaaactttagccttttggctggtgttgaatgtctttagctggggtgacctggagtgacctgggacggtgttgtggtttaccgtctccagcttcagcctttccagaaacccttgtggagggcagtgttggctgcaggtttcatcatattgcagtttgaggtcaccactatttggggaacaagcttgcgtcctgctgaggggcaggattttcagcagagcgtcggtggggctgggccgtcgtggaggtggccccaggagtcatatggccatactcagacacaccttgtgtggcctgctcagagctggatgccacctttaggcaatgtttagagtctattttctaaagttttaagtattttaagaggtattgagactaatgaatataatagttcagtaatttaaatgcttatttattttcagtggaaggatttttattaaaaagaagctaattgacatggaaatgtcagtgaaatttcttacctgcaaggaaagtgaacattttgtatttaagtaaactataatgtgcacattttaataaagaaatctgacatttg

SEQ ID NO: 255407 - DNA, 2097 bp, Artificial Sequence
  derived and/or modified sequence
atggccgccgccggcgccgccgtggccagaagccccggcatcggcgccggccccgccctgagagccagaagaagccccccccccagagccgccagactgcccagactgctggtgctgctggccgccgccgccgtgggccccggcgccggcggcgccgccagactgtacagagccggcgaggacgccgtgtgggtgctggacagcggcagcgtgagaggcgccaccgccaacagcagcgccgcctggctggtgcagttctacagcagctggtgcggccactgcatcggctacgcccccacctggagagccctggccggcgacgtgagagactgggccagcgccatcagagtggccgccctggactgcatggaggagaagaaccaggccgtgtgccacgactacgacatccacttctaccccaccttcagatacttcaaggccttcaccaaggagttcaccaccggcgagaacttcaagggccccgacagagagctgagaaccgtgagacagaccatgatcgacttcctgcagaaccacaccgagggcagcagaccccccgcctgccccagactggaccccatccagcccagcgacgtgctgagcctgctggacaacagaggcagccactacgtggccatcgtgttcgagagcaacagcagctacctgggcagagaggtgatcctggacctgatcccctacgagagcatcgtggtgaccagagccctggacggcgacaaggccttcctggagaagctgggcgtgagcagcgtgcccagctgctacctgatctaccccaacggcagccacggcctgatcaacgtggtgaagcccctgagagccttcttcagcagctacctgaagagcctgcccgacgtgagaaagaagagcctgcccctgcccgagaagccccacaaggaggagaacagcgagatcgtggtgtggagagagttcgacaagagcaagctgtacaccgtggacctggagagcggcctgcactacctgctgagagtggagctggccgcccacaagagcctggccggcgccgagctgaagaccctgaaggacttcgtgaccgtgctggccaagctgttccccggcagaccccccgtgaagaagctgctggagatgctgcaggagtggctggccagcctgcccctggacagaatcccctacaacgccgtgctggacctggtgaacaacaagatgagaatcagcggcatcttcctgaccaaccacatcaagtgggtgggctgccagggcagcagaagcgagctgagaggctacccctgcagcctgtggaagctgttccacaccctgaccgtggaggccagcacccaccccgacgccctggtgggcaccggcttcgaggacgacccccaggccgtgctgcagaccatgagaagatacgtgcacaccttcttcggctgcaaggagtgcggcgagcacttcgaggagatggccaaggagagcatggacagcgtgaagacccccgaccaggccatcctgtggctgtggaagaagcacaacatggtgaacggcagactggccggccacctgagcgaggaccccagattccccaagctgcagtggcccacccccgacctgtgccccgcctgccacgaggagatcaagggcctggccagctgggacgagggccacgtgctgaccttcctgaagcagcactacggcagagacaacctgctggacacctacagcgccgaccagggcgacagcagcgagggcggcaccctggccagaggcgaggaggaggagaagagactgaccccccccgaggtgagccacggcgacagagacacccagagcgtgagaccccccggcgccctgggccccagacccgccctgcccgagagcctgcaccacagcctggacggcaagctgcagagcctggacggccccggcgcccacaaggaggtgggcggcgccgcccccttcctgggcgtggacttcagcagcctggacatgagcctgtgcgtggtgctgtacgtggccagcagcctgttcctgatggtgatgtacttcttcttcagagtgagaagcagaagatggaaggtgaagcaccaccaccccgccgtgtag

SEQ ID NO: 255408 - DNA, 948 bp, Artificial Sequence
  derived and/or modified sequence
atggaggagaagaaccaggccgtgtgccacgactacgacatccacttctaccccaccttcagatacttcaaggccttcaccaaggagttcaccaccggcgagaacttcaagggccccgacagagagctgagaaccgtgagacagaccatgatcgacttcctgcagaaccacaccgagggcagcagaccccccgcctgccccagactggaccccatccacgtgaagcccctgagagccttcttcagcagctacctgaagagcctgcccgacgtgagaaagaagagcctgcccctgcccgagaagccccacaaggaggagaacagcgagatcgtggtgtggagagagttcgacaagagcaagctgtacaccgtggacctggagagcggcctgcactacctgctgagagtggagctggccgcccacaagagcctggccggcgccgagctgaagaccctgaaggacttcgtgaccgtgctggccaagctgttccccggcagaccccccgtgaagaagctgctggagatgctgcaggagtggctggccagcctgcccctggacagaatcccctacaacgccgtgctggacctggtgaacaacaagatgagaatcagcggcatcttcctgaccaaccacatcaagtgggtgggctgccagggcagcagaagcgagctgagaggctacccctgcagcctgtggaagctgttccacaccctgaccgtggaggccagcacccaccccgacgccctggtgggcaccggcttcgaggacgacccccaggccgtgctgcagaccatgagaagatacgtgcacaccttcttcggctgcaaggagtgcggcgagcacttcgaggagatggccaaggagagcatggacagcgtgaagacccccgaccaggccatcctgtggctgtggaagaagcacaacatggtgaacggcagactggcctag

SEQ ID NO: 255409 - protein, 296 aa, Artificial Sequence
  derived and/or modified sequence
MTLNNVTMRQGTVGMQPQQQRWSIPADGRHLMVQKEPHQYSHRNRHSATPEDHCRRSWSSDSTDSVISSESGNTYYRVVLIGEQGVGKSTLANIFAGVHDSMDSDCEVLGEDTYERTLMVDGESATIILLDMWENKGENEWLHDHCMQVGDAYLIVYSITDRASFEKASELRIQLRRARQTEDIPIILVGNKSDLVRCREVSVSEGRACAVVFDCKFIETSAAVQHNVKELFEGIVRQVRLRRDSKEKNERRLAYQKRKESMPRKARRFWGKIVAKNNKNMAFKLKSKSCHDLSVL

SEQ ID NO: 255410 - protein, 93 aa, Artificial Sequence
  derived and/or modified sequence
MTLNNVTMRQGTVGMQPQQQRWSIPADGRHLMVQKEPHQYSHRNRHSATPEDHCRRSWSSDSTDSVISSESGNTYYRVVLIGEQGVGKSTLAN

SEQ ID NO: 255411 - DNA, 891 bp, Artificial Sequence
  derived and/or modified sequence
atgacattgaataacgttactatgaggcagggcacggtgggaatgcagcctcaacagcagcgctggtccatccctgcggacggacgccatctgatggtacaaaaagaacctcatcaatatagccacaggaatcgacatagcgcgacacctgaagaccactgtagacgaagttggtcttccgactccacagactccgtgatatcctctgaatctggaaatacctactaccgggtcgttcttattggggagcagggggttgggaaatctacccttgctaacattttcgccggtgtgcatgacagcatggatagtgactgtgaggtactcggggaggacacatacgagaggacccttatggtggacggcgagtcggcaactatcatcttactcgatatgtgggagaataagggggaaaatgaatggctgcatgatcactgcatgcaggtaggggatgcttacctgattgtctactctatcacagaccgagcctcatttgaaaaggcctcagaactgcgtatccaactgagaagggcccggcaaaccgaagatataccaatcattctcgtggggaacaagtcggacctggtacgttgcagagaggtgtctgtctctgagggccgggcatgtgccgtggtgttcgactgtaagttcatagagacctccgccgctgtgcagcataacgttaaagagctctttgaagggattgtcaggcaagtgcggttgcggagggactcaaaagaaaaaaatgaaagacggttagcgtaccagaaacgtaaagagagcatgcctaggaaggcgcggagattttggggcaagatagtagccaaaaacaacaaaaacatggctttcaagttaaagtccaaatcctgccatgatctgtcagtgttgtag

SEQ ID NO: 255412 - DNA, 891 bp, Artificial Sequence
  derived and/or modified sequence
atgaccctcaacaatgtcacgatgcgtcagggcacagtgggcatgcagccacagcagcagcgctggtccattccagccgatggaagacatctcatggtgcagaaagaaccgcatcaatattctcaccggaacagacactctgctactccagaggatcactgccggagaagctggtctagtgacagcacagactccgtgatttcttctgaatccgggaatacttattatagagttgtgctcatcggcgagcagggtgtgggtaagagcactttggctaacatcttcgccggagtgcatgactctatggactcagattgtgaggtgctgggtgaggacacttacgagcgcaccctcatggtggatggagagtccgccactatcattctgttagatatgtgggaaaacaagggcgagaatgagtggctccatgatcactgtatgcaagtaggcgacgcctaccttatcgtgtactccatcacagatcgcgcaagttttgagaaagccagtgagctgcgaattcagttacgccgggccagacagaccgaggatatccccatcattttggtgggtaacaaatccgacttggttagatgtcgtgaggtgtccgtgtccgaggggagggcctgcgccgtagtctttgactgcaaatttatagagacatctgcggcagtacagcacaatgttaaagagttattcgagggaatcgtgcggcaggttaggttgcgacgcgactctaaggaaaagaatgagaggagattggcatatcagaagcgcaaagaaagtatgcctcgtaaagcccgtcgtttttggggaaagatcgttgcaaaaaacaataaaaatatggcctttaaacttaagagcaagtcatgccacgatctgagtgtcctctag

SEQ ID NO: 255413 - DNA, 282 bp, Artificial Sequence
  derived and/or modified sequence
atgactctgaacaacgtcacaatgcgacagggcactgtgggcatgcaaccccagcaacagaggtggtcaattcccgcggacggacgtcatctcatggtacagaaggaaccacaccaatactcgcatcggaatagacactccgccacccctgaagatcactgcaggagatcatggagctcagattcaaccgattctgtgatttcctcagaatccgggaacacatactatcgggttgtcttgataggtgagcagggcgtgggaaagtccacactggctaactag

SEQ ID NO: 255414 - DNA, 2208 bp, Artificial Sequence
  derived and/or modified sequence
ataaaccgcccggccgcggcggctgcaggcggcgggcaaggacggcgggcacagcgcagcactccccgctcgttggcccgggtatcccagcgcggacccacgcgatacgctgacgccccgacgccgatccggccgagccaagtaagggggacggcccgagacggagaagggagagagtgggagtttcccagcccgcagaactttcgaagttgagaaaagaacccctggaacgtgcgctcagcactgggattttctggactcaacgatgactctgaataatgtcaccatgcgccagggcactgtgggcatgcagccacagcagcagcgctggagcatcccagctgatggcaggcatctgatggtccagaaagagccccaccagtacagccaccgcaaccgccattctgctacccctgaggaccactgccgccgaagctggtcctctgactccacagactcagtcatctcctctgagtcagggaacacctactaccgagtggtgctcataggggagcagggggtgggcaagtccactctggccaacatctttgcaggtgtgcatgacagcatggacagcgactgcgaggtgctgggagaagatacatatgaacgaaccctgatggttgatggggaaagtgcaacgattatactcctggatatgtgggaaaataagggggaaaatgaatggctccatgaccactgcatgcaggtcggggacgcatacctgattgtctactcaatcacagaccgagcgagcttcgagaaggcatctgagctgcgaatccagctccgcagggcccggcagacagaggacattcccataattttggttggcaacaaaagtgacttagtgcggtgccgagaagtgtctgtatcagaagggagagcctgtgcagtggtgtttgactgcaagttcatcgagacctctgcagctgtccagcacaacgtgaaggagctgtttgagggcattgtgcgacaggtgcgccttcggcgggacagcaaggagaagaatgaacggcggctggcctaccagaaaaggaaggagagcatgcccaggaaagccaggcgcttctggggcaagatcgtggccaaaaacaacaagaatatggccttcaagctcaagtccaaatcctgccatgacctctctgtactctaggaacccagggtcacccagatgtccctttgatggccgttgttgaaggccattgggaccaataatctatattagattgaatacttaagttagatgtggtttcccccattgtagcagggagctagcgtattagccttgtgggcaacatgatgcatgggaaatgaaagatttttgtaaaaagtcagtatttatttccaggaaaagcctgaccttgctatttgaacacccaagactctttagaggatgtgtttggtgttcacatgtgtttcttctattttggatagtagagaagtaaagcttacaaagaatgcctagaacaagaacttttcatcattaaaaatttttcccagtgttctgatatgtgactttgaggccaatgagtcataaacaaatataagaaagctgtcaatgagtttcttcaaaggagggaaaactttctacgaatctaagatccatggagctagaattgtagaactaggctcatcagaatcgtgactattattgctccatcaaactgtgaaaagaaatgatgtggaccttgctggaaacaaaggcttagcaaacaatttttgttcaatgcccaccaagacatatagaattgggaactgatacatgtgtcccttataggctcaaaaattatatcttacaatttcttatttagggggaaattatttgaatcagattctatttagtcaaaccaccttttatgttttattatttttgaattcatggagccatcataaaaatatttttaaaatcagaattattgataccctgtagtgcaaaatgtcaatttttaatgtataatcagaagtctgaatttttataaaacatatagcataaaaacttccagtactttggttgacccttgtatgtcacagctctgctctatttattattattttgcaaaataaccattttaacatttgataaagcatatttatgaacatatttcttaataagaaaaatatccattttattaccattttctatctttttcaaaatatgcaagtttttacctatatgtcttataataaaagaaataaaatatttga

SEQ ID NO: 255415 - DNA, 2103 bp, Artificial Sequence
  derived and/or modified sequence
tggttataaaccgcccggccgcggcggctgcaggcggcgggcaaggacggcgggcacagcgcagcactccccgctcgttggcccgggtatcccagcgcggacccacgcgatacgctgacgccccgacgccgatccggccgagccaagactcaacgatgactctgaataatgtcaccatgcgccagggcactgtgggcatgcagccacagcagcagcgctggagcatcccagctgatggcaggcatctgatggtccagaaagagccccaccagtacagccaccgcaaccgccattctgctacccctgaggaccactgccgccgaagctggtcctctgactccacagactcagtcatctcctctgagtcagggaacacctactaccgagtggtgctcataggggagcagggggtgggcaagtccactctggccaacatctttgcaggtgtgcatgacagcatggacagcgactgcgaggtgctgggagaagatacatatgaacgaaccctgatggttgatggggaaagtgcaacgattatactcctggatatgtgggaaaataagggggaaaatgaatggctccatgaccactgcatgcaggtcggggacgcatacctgattgtctactcaatcacagaccgagcgagcttcgagaaggcatctgagctgcgaatccagctccgcagggcccggcagacagaggacattcccataattttggttggcaacaaaagtgacttagtgcggtgccgagaagtgtctgtatcagaagggagagcctgtgcagtggtgtttgactgcaagttcatcgagacctctgcagctgtccagcacaacgtgaaggagctgtttgagggcattgtgcgacaggtgcgccttcggcgggacagcaaggagaagaatgaacggcggctggcctaccagaaaaggaaggagagcatgcccaggaaagccaggcgcttctggggcaagatcgtggccaaaaacaacaagaatatggccttcaagctcaagtccaaatcctgccatgacctctctgtactctaggaacccagggtcacccagatgtccctttgatggccgttgttgaaggccattgggaccaataatctatattagattgaatacttaagttagatgtggtttcccccattgtagcagggagctagcgtattagccttgtgggcaacatgatgcatgggaaatgaaagatttttgtaaaaagtcagtatttatttccaggaaaagcctgaccttgctatttgaacacccaagactctttagaggatgtgtttggtgttcacatgtgtttcttctattttggatagtagagaagtaaagcttacaaagaatgcctagaacaagaacttttcatcattaaaaatttttcccagtgttctgatatgtgactttgaggccaatgagtcataaacaaatataagaaagctgtcaatgagtttcttcaaaggagggaaaactttctacgaatctaagatccatggagctagaattgtagaactaggctcatcagaatcgtgactattattgctccatcaaactgtgaaaagaaatgatgtggaccttgctggaaacaaaggcttagcaaacaatttttgttcaatgcccaccaagacatatagaattgggaactgatacatgtgtcccttataggctcaaaaattatatcttacaatttcttatttagggggaaattatttgaatcagattctatttagtcaaaccaccttttatgttttattatttttgaattcatggagccatcataaaaatatttttaaaatcagaattattgataccctgtagtgcaaaatgtcaatttttaatgtataatcagaagtctgaatttttataaaacatatagcataaaaacttccagtactttggttgacccttgtatgtcacagctctgctctatttattattattttgcaaaataaccattttaacatttgataaagcatatttatgaacatatttcttaataagaaaaatatccattttattaccattttctatctttttcaaaatatgcaagtttttacctatatgtcttataataaaagaaataaaatatttgaaaaaa

SEQ ID NO: 255416 - DNA, 363 bp, Artificial Sequence
  derived and/or modified sequence
gttaaccgtatttgttttcccatgcaaatgatagtctgcctgaggagctggttactgacagtgtgggcagcatgactcaacgatgactctgaataatgtcaccatgcgccagggcactgtgggcatgcagccacagcagcagcgctggagcatcccagctgatggcaggcatctgatggtccagaaagagccccaccagtacagccaccgcaaccgccattctgctacccctgaggaccactgccgccgaagctggtcctctgactccacagactcagtcatctcctctgagtcagggaacacctactaccgagtggtgctcataggggagcagggggtgggcaagtccactctggccaacat

SEQ ID NO: 255417 - DNA, 891 bp, Artificial Sequence
  derived and/or modified sequence
atgaccctgaacaacgtgaccatgaggcagggcaccgtgggcatgcagccccagcagcagcgctggagcatcccagcagatggccgccacctgatggtgcagaaggagccccaccagtacagccacaggaacagacattctgccaccccagaggaccactgcagaagatcctggagcagtgacagcacagattctgtcatcagcagcgagagcggcaacacctactacagagtggtgctgattggagagcagggcgtgggcaagagcaccctggccaacatctttgctggggtgcatgacagcatggacagcgactgtgaggtgctgggggaggacacctatgaaagaaccctgatggtggatggagagagcgccaccatcatcctgctggacatgtgggagaacaagggggagaatgagtggctgcatgaccactgcatgcaggtgggagatgcctacctgattgtgtacagcatcacagaccgggccagctttgagaaggccagcgagctgcgcatccagctgcggcgggcccggcagacagaggacatccccatcatcctggtgggcaacaagagtgacctggtgcgctgccgggaggtgtctgtgtctgagggccgggcctgtgctgtggtgtttgactgcaagttcatcgagaccagcgctgctgtgcagcacaacgtgaaggagctgtttgagggcatcgtgcggcaggtgcggctgcggcgggacagcaaggagaagaatgaaagaaggctggcctaccagaagaggaaggagagcatgcccaggaaggcccggcgcttctggggcaagatcgtggccaagaacaacaagaacatggccttcaagctgaagagcaagagctgccacgacctgtctgtgctgtag

SEQ ID NO: 255418 - DNA, 282 bp, Artificial Sequence
  derived and/or modified sequence
atgaccctgaacaacgtgaccatgaggcagggcaccgtgggcatgcagccccagcagcagcgctggagcatcccagcagatggccgccacctgatggtgcagaaggagccccaccagtacagccacaggaacagacattctgccaccccagaggaccactgcagaagatcctggagcagtgacagcacagattctgtcatcagcagcgagagcggcaacacctactacagagtggtgctgattggagagcagggcgtgggcaagagcaccctggccaactag

SEQ ID NO: 255419 - DNA, 891 bp, Artificial Sequence
  derived and/or modified sequence
atgaccctgaacaacgtgaccatgcggcagggcaccgtgggcatgcagccccagcagcagaggtggagcattcccgctgatggtcgccacttaatggtgcaaaaagagcctcaccagtattctcatcgcaatagacactccgctactccggaggaccactgtcgacgaagctggtcatccgacagcacagattcagtgataagctccgaatccggaaacacttattaccgagtcgtgctgatcggcgaacagggcgtggggaaatccactctcgctaatatattcgccggcgtgcatgattccatggactctgactgtgaggtcctgggcgaagacacatacgaacggactctgatggtcgatggcgaatcggccacaataatcttactggacatgtgggagaataagggcgagaatgaatggcttcacgatcattgcatgcaagtgggtgatgcatatcttattgtttatagtatcaccgaccgtgcatctttcgagaaagcttccgaactaaggatccagctcaggagggcacgccagacagaggacattccgatcattctggtgggtaacaagtctgatctggtccgatgtcgggaggtctccgtgtccgagggtcgagcatgtgccgttgtgtttgactgcaagtttatcgagaccagcgctgcagtgcagcacaacgttaaggaactatttgaggggatcgttcgccaggtcaggctacgcagggacagcaaagagaaaaacgaacgcaggctggcctatcagaaaagaaaagagagtatgccgcgcaaggccaggcgtttttggggcaagatagtagccaaaaataacaaaaacatggccttcaaactcaagagcaaatcctgtcatgatctttcagtgctctag

SEQ ID NO: 255420 - DNA, 891 bp, Artificial Sequence
  derived and/or modified sequence
atgaccctgaacaacgtgaccatgcggcagggcaccgtgggcatgcagccacagcaacagcggtggtccattcctgcagacggccggcatctcatggtccagaaagaaccacatcaatactctcaccgaaatcgacattccgccactcccgaagatcactgtagacgcagctggtcatctgactcaaccgactcagtcatttcatcggaaagcgggaacacatattacagggtggtccttatcggcgagcagggcgtgggcaaatctactctggccaatatcttcgccggtgtccacgatagcatggatagtgattgcgaggtgttgggggaggatacttacgagcgcactttgatggtggacggggagtctgccaccatcattctcctcgacatgtgggagaacaaaggcgaaaacgagtggctgcatgatcactgtatgcaggtgggcgatgcctacctaatagtgtactcaattaccgatcgggccagctttgaaaaggcttccgaactgcgtatccagctgagacgcgcgcgacagacagaagatatccccattatcctagtgggtaacaagtctgacctggtgcgctgtagagaagtctctgtttctgaggggcgggcttgcgctgtcgtcttcgactgcaagtttatcgaaacatctgccgccgttcagcacaacgtcaaggaattgttcgagggtattgtcagacaggtgaggttaaggcgggacagtaaagagaaaaatgagagacgtcttgcctaccaaaagcgcaaagaaagtatgccccgtaaagccaggagattttgggggaaaatcgtggctaaaaataataaaaacatggcatttaagctcaagtctaaatcttgccatgacctctcagtgctttag

SEQ ID NO: 255421 - DNA, 282 bp, Artificial Sequence
  derived and/or modified sequence
atgaccctgaacaacgtgaccatgcggcagggcaccgtgggcatgcagccccaacagcagaggtggtccatccctgccgatgggcgacaccttatggttcagaaggaacctcaccagtactcccatcgaaatcgtcatagcgcaactcccgaagaccactgccgacgatcctggagctctgattccacagactctgtgattagctcggagtctgggaatacatactacagagtcgtgctgattggcgagcaaggcgtgggcaagagcacattagcgaattag

SEQ ID NO: 255422 - DNA, 891 bp, Artificial Sequence
  derived and/or modified sequence
atgaccctcaataatgtaacgatgcgccaagggaccgtcggaatgcaaccacagcagcagaggtggtcaattcctgccgatggacgccacctcatggtgcagaaggaaccacatcagtatagccaccggaaccggcattcggccactcccgaagaccattgccggcgttcctggtcatcagatagcacagattccgtgatctcttctgagagtggcaacacctactaccgagttgtactgattggggagcaaggggtcggcaagagtacattggcgaatatttttgctggcgttcatgattcaatggactccgattgtgaagtattgggcgaagatacatacgaacgcactttgatggtcgatggtgaatccgcaaccataattctactagacatgtgggaaaataagggagaaaacgagtggctccacgaccactgcatgcaggtaggcgacgcatacctgatagtgtactcaatcaccgatagagcctcatttgagaaggcgagtgaactacgtatccaactccgcagagcgaggcagaccgaggacatacccatcattctggtgggcaacaaatctgacttggtgagatgtcgcgaggtcagcgtgagcgaagggagggcatgcgctgtcgtctttgattgcaagtttatcgagacctctgccgctgtacagcataatgtgaaagaattgtttgaaggaattgtcagacaagtccgtttgagaagagattcaaaggaaaagaatgaacgcagactcgcataccagaaaaggaaagagtccatgccacggaaagcccgtaggttctgggggaaaattgttgccaaaaataacaagaacatggcttttaagctaaaatcaaagagctgccatgatctgagcgtcctctag

SEQ ID NO: 255423 - DNA, 891 bp, Artificial Sequence
  derived and/or modified sequence
atgacgctgaataacgtcacgatgcggcaaggcactgtgggcatgcagcctcaacagcaacgatggtcgattcccgctgatgggcgacacttgatggtgcaaaaggaaccacaccaatattcacacaggaatagacacagtgccaccccagaggatcattgccggagatcatggagttctgacagcactgattctgtcatatccagtgagtccggaaatacctactaccgggtggtgctgatcggcgaacagggcgtgggcaagtcaacacttgctaacattttcgccggtgtacacgatagcatggattctgactgtgaggtcctgggtgaagatacgtacgagcgcacactaatggtggacggagaaagtgccactattatactgctggacatgtgggagaacaagggggagaacgagtggctccacgatcattgtatgcaggttggagatgcctaccttatcgtgtattccattacagatagggcttcgtttgaaaaggcttcggagctgaggatccagctcaggagagccagacagacggaagatatcccaatcattctggtcggcaataagtcagatctggtacgttgtcgcgaggttagtgtcagcgaggggagagcatgcgccgtggtctttgattgtaagtttatagaaacctccgccgctgtccagcataatgtcaaagaactcttcgaagggatcgtaagacaggttcgattgaggcgtgacagcaaggagaagaacgagagaagactggcataccaaaaacggaaggagtctatgcccaggaaggcacgcagattctgggggaaaatcgtggcaaagaataataagaacatggcttttaaactgaagagcaagtcctgccacgacctttcagtgttgtag

SEQ ID NO: 255424 - DNA, 282 bp, Artificial Sequence
  derived and/or modified sequence
atgacattaaataacgtaaccatgcgtcagggcaccgtgggtatgcagccccagcagcaaaggtggagcatccccgcagacggcagacacctcatggtccagaaggagccccaccagtattctcaccgcaaccgtcactccgcaactcccgaggatcactgtagaagaagctggagcagtgattctaccgactctgtgatctcttctgaatctggcaatacgtactacagggttgtgctgataggcgaacagggggtagggaagagcacactggccaactag

SEQ ID NO: 255425 - DNA, 891 bp, Artificial Sequence
  derived and/or modified sequence
atgaccctgaacaacgtgaccatgagacagggcaccgtgggcatgcagccccagcagcagagatggagcatccccgccgacggcagacacctgatggtgcagaaggagccccaccagtacagccacagaaacagacacagcgccacccccgaggaccactgcagaagaagctggagcagcgacagcaccgacagcgtgatcagcagcgagagcggcaacacctactacagagtggtgctgatcggcgagcagggcgtgggcaagagcaccctggccaacatcttcgccggcgtgcacgacagcatggacagcgactgcgaggtgctgggcgaggacacctacgagagaaccctgatggtggacggcgagagcgccaccatcatcctgctggacatgtgggagaacaagggcgagaacgagtggctgcacgaccactgcatgcaggtgggcgacgcctacctgatcgtgtacagcatcaccgacagagccagcttcgagaaggccagcgagctgagaatccagctgagaagagccagacagaccgaggacatccccatcatcctggtgggcaacaagagcgacctggtgagatgcagagaggtgagcgtgagcgagggcagagcctgcgccgtggtgttcgactgcaagttcatcgagaccagcgccgccgtgcagcacaacgtgaaggagctgttcgagggcatcgtgagacaggtgagactgagaagagacagcaaggagaagaacgagagaagactggcctaccagaagagaaaggagagcatgcccagaaaggccagaagattctggggcaagatcgtggccaagaacaacaagaacatggccttcaagctgaagagcaagagctgccacgacctgagcgtgctgtag

SEQ ID NO: 255426 - DNA, 282 bp, Artificial Sequence
  derived and/or modified sequence
atgaccctgaacaacgtgaccatgagacagggcaccgtgggcatgcagccccagcagcagagatggagcatccccgccgacggcagacacctgatggtgcagaaggagccccaccagtacagccacagaaacagacacagcgccacccccgaggaccactgcagaagaagctggagcagcgacagcaccgacagcgtgatcagcagcgagagcggcaacacctactacagagtggtgctgatcggcgagcagggcgtgggcaagagcaccctggccaactag

SEQ ID NO: 255427 - protein, 104 aa, Artificial Sequence
  derived and/or modified sequence
MGRAVKVLQLFKTLHRTRQQVFKNDARALEAARIKINEEFKNNKSETSSKKIEELMKIGSDVELLLRTSVIQGIHTDHNTLKLVPRKDLLVENVPYCDAPTQKQ

SEQ ID NO: 255428 - DNA, 315 bp, Artificial Sequence
  derived and/or modified sequence
atgggcagagccgtgaaggtgctgcagctgttcaagaccctgcacagaaccagacagcaggtgttcaagaacgacgccagagccctggaggccgccagaatcaagatcaacgaggagttcaagaacaacaagagcgagaccagcagcaagaagatcgaggagctgatgaagatcggcagcgacgtggagctgctgctgagaaccagcgtgatccagggcatccacaccgaccacaacaccctgaagctggtgcccagaaaggacctgctggtggagaacgtgccctactgcgacgcccccacccagaagcagtag

SEQ ID NO: 255429 - DNA, 315 bp, Artificial Sequence
  derived and/or modified sequence
atggggagggctgtgaaagtcttgcagcttttcaaaacgcttcatcggacgcgtcagcaggtgttcaaaaatgatgctagggctctcgaagccgcccgcataaagatcaatgaggagttcaagaataacaagtccgagacctcctcgaagaaaatcgaagaacttatgaaaatcggctccgatgtggagctgcttttaaggaccagtgtcattcaggggatccacacagatcataatactctgaagctagtaccccggaaggatctgctcgtggagaatgtaccctactgcgacgctccaacccagaaacagtag

SEQ ID NO: 255430 - DNA, 6351 bp, Artificial Sequence
  derived and/or modified sequence
agcaaacgcctttagcaaacgcccgtttagcaaacgcctcctccgtcctttggaggagggcggggctaaaagggagatgctgcctagtgattcgttgtggcgcattagtaacgcgactacagggggctggaaacagttcagtctttgattggttgctgagaggcggggctactcgactgctctggaggtagcggccgcggtgaggagagccatgggacgggcagtcaaggttttacagctctttaaaacactgcacaggaccagacaacaagtttttaaaaatgatgccagagcattagaagcagccagaataaagataaatgaagaattcaaaaataataaaagtgaaacttcttctaagaaaatagaagagctaatgaaaataggttctgatgttgaattattactcagaacatctgttatacaaggtattcacacagaccacaatacactgaaactggtccctaggaaagaccttcttgtagaaaatgtgccatattgtgatgcaccaactcagaagcaatgagttttctagaatacaacaagtctttgtactttttaactttaaaatctacaactctggcaaaagtcctggaaatgcagacattttccctgaactggcatattgaaaatgaatgaattacagaatagcttcatatttaaatttcatgttaaaaggtcattactgagaactaaagaacataattaagtatttctaaaggaaattagataagaaaacatttcattttcattgaaaatcaaatttcataaagcaaagtaaatgcttagggagatatattcaatctttgaccttgatgagtatttgatcttaccatagctatttgagaatgtggtgcttttacaaattggtgagttttcctgccatgtgaaatgcaattattacatttaaattgttagattaaaatgatatttagtcctgaaaaatattaaattggtcaaaaaaatcacagtgtatgccagctctctacagaaagtggcctttgttttctaaagcactgggattatttctgtagctaatatataattgtacagtttctttttagagatagagagtatctctgtgttcttatgaagacattttttatcagttttctgaaaatagatgaataaaatattatagtcacctagggtcactatggaataaagaaatcctagtttaaagaggaaatagtggcccttgatcaaactatttaatatggccttagtagaattagctgtatttagacaaagttagactttagtgtgaaatgtaatcggtggctacattctcatcgttttaattaatgaaacttaaatggcttctcttcttccacatgtcctgtccttgacaagatgggcagtatcacaaaaggtcctggcattctaccatctaacactaggaactgtaaaatactgtttaatattcttcttgtttctcttttatctgtgtatctttgccattctattttctcagtgaatagtatgttttctcccattcactgataaattctctcatttgatgatgatacagggtttttaatttttgcaagattctcaatgcaagcattgttatgtatctagaaattatacctagagaaaaatgaaagtcgtttcaaatttgaaatttgcccttttaagagaatgctgaatgtcatcgcagtatataatcactatataaatgtgctgacttacagttattttagtgtctatatgacatattttgaggaaagttggctgacgttatttaaatttaatatatattctatattttagtgttattgaatattttatcactgagcttttttctttaacctgaattccctgttccatttttcattcatattaatttaaataactccagatttctttcttatagtcattattagtagcagatgagattaataattcacatgtttattaaagatagtggcttagaaattttaagatatattgatataggcccgggcgctgtggctcacacctgtaatcccgcactttgggaggctgaggcgggcagatcacaaggtcaggagttcgagaccagcctggccaatgtggtgaaaccccatctctactaaaaacacaaaaattagccaggtatggtggcgggcgcctgtagtcccagctactcgggaggctgaggcaggaaaatcacttgaacccgggaggtggaggttgcagtgaactgagattgtgccactgcactccagcctgggggacagagtgagactctgtctcaaaaaaaaaaaagaaaaaaaaaggaaaaaggaaaaaaaaaagatatattgatacagataggtagatatgatattgtactttcatgccataagactacacaataaagttcctgaaagttcctggctgggcgcagtggctcacgcctgtaatcccagcactttgggaggccgaggcaggcagatcacctgaggtcaggagttctagaccagcctgaccaacatggggaaaccctgtctctactaaaaaaaatacagaattagccaggtgtggtggcacatgtctgtaatcccagctactcgggagactgaggcaggagaattgcttgaacccaggagacggaggttgcagtgagccgagatcgcaccattgcactccagcctaggcaacaagagtgaaactccgtctcaaaaataaataaataaataaagttcctgtgaagtatataaacatgtcaacaacaggcttgactgtcacaaaattctgaaagatgtcgcactctattcttatatagcatatgctaatttatttatttattttttgagattgagttctgctgtgtcacccaggttggagtgcagtggcatggtcatggtccactaaagccttgacccctggggctcagcagttatgccaactaagcctcccaaatagctgagactagaggtatgcgccaccacacctagctattttttttatttttagtaaggacaaggtctcattatgttggccaggctggtctcaaattcctgagctcagttgatcctcccacctcagcctcccaaagtgctgggattacaggtgtaagccactgcaccctgcctattcttataatcatatatttatatttcaaatggattttaactggttatttaatagtttaattagataaagtaattcatggctgggtgtggtggctcacgcctgtaatcccagcactttggcaggctgaggcaggtggattacctgaggtcggaagttcgagaccagcccaaccaacgtggagaaaccccatctctattaaaaatgcaaaattagcaggacatggtgatacacacctgtaatcccagctagtcaggaggctgaggcaggagaattacttgagccagggaagcagaggttgtggtgagctaagattgtgccactgcactccagcctgagagaacaagactccgtctcaaaaaaagaaaaaaagaaaacttttttacacatgggtatctcaccatgttgcccaggctggagtgcagtagctattcataggcacagtcatagcacactgcagcctagaatttctgacctcaagcaatcatcctgcctcagcctcctaagtagctaggactacaggtgcataccaccataaccagctttaattaaatgttttttatttggttattttttttaagttttctgtattcacacaaggggttgcccaaatataattttgctttgactattgagatctagtgaaagtggggtatatgaattctaattgcaaatatccaggctcagaggcccagcaggactttctaacacaatcttttagcggaagttagaaatggtatatagcaggagagtcagatttgagaagcatatgtagattcgaagctgggggaatatggcaggtagtttgtacaacatctaattcagaacattaaaattaagattttagtcaaactgtgtttaagttagttcttattttcctgtagatgcatctcacagcatcagtacaataccaaaaaagcacacaagaataagaatatgtggaatttctatacctattgacaaagcacataatttaaccataaacacaaagccataggtcaacaaagaaatgaagattccagttctgaaggtgagttttctgaagccaaagtggatacatgcaaaattaatatagttttactgtatatcagttgtcaccaatcagaaatggaaaacagatcctatttataattgcaaacaaaactgtaaaatagactttttaaagtctgggaatagacttctaaaataagctataacacttaaaaaggagagatatactatgttcctagataggacaattgaaaattctggagatgacagtttttcaaaaatctattgaggccaggtgcagtggcccatgcctgtagttccagtactttgggaggcctaggtgggtggatcacctgaggttgggagtttgagaccagcctgaccaacatggagaaaccccgtctctactaaaaatacaaaattagccaggcgtggtggtgcatgcctgtaatcccagctactcgggaggctgaggcgtgagaatcgcttgaacccggtaggcagatgttgcagtgagccgagatcgcaccattgcactccagcctaggcaacaagagcgaaactccatctcaaaaatagaaaaaacatttatcgaaatcccaacaagttgacaaatatatccacataaaaatataaaacttctgtattctgtgaaagctactataaataaagtttagagaaagttatttgccacctatgtcatgattgaaatagttaattgatcctgtgaatcagttagcaaaacataactcaatggaaagataggcaaatgatacaaataagaaattcacaaaagaagaaatactaagtctctagtgatgagagaaatgtaaattaaaatgaaacatgtttgttcatcaagttgtcacaagttagacaatcatatccaatatttttaaaggttgtaagactataaggaaatagccactgtcatatcatttttaaaggaatataaattatagggccttttgtttctttgggttttttttttttagagacaagatctctccgtgttgtctaggctggactcaaacttctggactcaagcaatcctcgcaacatcattaatagctgagagtagagacttgagccaccacacctgactatagggcctttttgaaaggaaaattgacatcatcaaaattttaaatatattcagtctatttctcaaaaactcaaagaatactaataaatgtgtactcaggtatatgtacagaaattgctgtaacattataattttaaacaatttaaaacagactgagtttccaaagttagggtacaatgaaagaaaaggtggcttatttatactctggaatattttccaagagttgaaaaggatgaggatacacacacacacacacacacacacacacacacacacacacacacacagtttgggtatccctaatccagaaattcaaatgctccaaagtccaaaactttctgacccaccaacatgactgatgctcaaaggaaatggccactggaagatttcagattttcagatttggagtgctcaaccagtaagtatataatgcaaataatccaaaatacaaaaaaaaaaaaaaagaaatctgaaacacttctgatcccaagcatttcagaaaacggatgttcatttgtgtgtgtgtgtgtgtgtaagcaggtgttgctagaaattcacttatatacaagaaaactttttgtgtacatatttgcatatatatgtacaaatgggtagaaacgatacatgattaatcttaatcgggaaggaaaagagatttagggaaggaagcagtaagtgagaacttttattctatttactcctgcacgtttaaatattgtttacagtgagtatatcaacatgtaagtgttaaaagacaataagctactagtgatttttaatataaaattaactataaaatattttaaatattagcaaataatatagcacactcatgaacctaattcccacatttgatagttgttacattttgccatgtttgtttaaaggtctaagtcataaaatcttataaagctaaaccccacccttctctttctcctctctctccaggataattactgttttatagtttgtggatatcattcccttacttgtgtttatacttttaccaagtgtgtatgtattcaaaaaacagttgttttgtgattttaaaatgtaaatgaatggcgttatgctccatgtattctgcaacttttcatcatacattaggttttggcgatttagccataatttggcatgaattcaggtcttttaagttttattccattgtaagaataaacaagtttgttcattcatgtctc

SEQ ID NO: 255431 - DNA, 315 bp, Artificial Sequence
  derived and/or modified sequence
atgggccgggctgtgaaggtgctgcagctgttcaagaccctgcacaggacccggcagcaggtgttcaagaatgatgcccgggccctggaggccgcccgcatcaagatcaatgaggagttcaagaacaacaagtctgagaccagcagcaagaagattgaggagctgatgaagattggaagtgatgtggagctgctgctgcggaccagcgtcatccagggcatccacacagaccacaacaccctgaagctggtgcccaggaaggacctgctggtggagaatgtgccctactgtgatgcccccacccagaagcagtag

SEQ ID NO: 255432 - DNA, 315 bp, Artificial Sequence
  derived and/or modified sequence
atgggccgggccgtgaaggtgctgcagctgttcaagaccctgcacaggactcgccagcaagtctttaaaaacgatgcacgcgcgctagaggccgcacgcatcaagattaatgaggagttcaaaaataataaatccgaaactagcagtaaaaaaatcgaggaactgatgaaaattgggagcgatgtcgagctgcttctgcggacctccgttatccaaggtatccatacagaccacaatacactgaagcttgttccacgcaaggatctgctggttgaaaacgtgccatactgcgatgctcctacgcagaagcagtag

SEQ ID NO: 255433 - DNA, 315 bp, Artificial Sequence
  derived and/or modified sequence
atggggagagcagttaaggtcctgcagctgtttaagactcttcataggactagacagcaggtgttcaaaaatgacgctcgggcactcgaagccgctaggattaagataaatgaagagttcaagaataacaaatccgagacgtcttccaagaagatcgaagaattaatgaaaatcggcagtgatgttgagttacttctgagaaccagcgttattcagggaatacataccgatcacaatactctgaagctggttccaaggaaggatctgctggtcgagaatgtgccttactgtgatgccccaacgcagaaacagtag

SEQ ID NO: 255434 - protein, 236 aa, Artificial Sequence
  derived and/or modified sequence
MEASDGQGGEGDKPLEQVTNVSCLETSSSASPARDSLMRHAKGLDQDTFKTCKEYLRPLKKFLRKLHLPRDLPQKKKLKYMKQSLVVLGDHINTFLQHYCQAWEIKHWRKMLWRFISLFSELEAKQLRRLYKYTKSSQPAKFLVTFCASDAPERSLLADREDSLPKLCHAWGLHSNISGMKERLSNMQTPGQGSPLPGQPRSQDHVKKDSLRELSQKPKLKRKRIKEAPETPETEP

SEQ ID NO: 255435 - DNA, 950 bp, Artificial Sequence
  derived and/or modified sequence
cggctaggtcacagaagcagtgggtcagaagccagaggggacgtggggagtgccaccctggagcctaccggcacacctgctgagatggaggcctcagatgggcaagggggtgaaggggacaagccactagagcaggtgacaaatgtgtcatgcctggagacaagctccagcgccagccctgctagagactcgctcatgcgccatgccaagggcctggatcaggacaccttcaaaacttgtaaagaatacctaagaccgctgaagaagttcctgcgaaagttgcacctgcccagggaccttccccagaagaagaagctgaagtacatgaagcagagccttgtggtcctaggggaccacatcaacacctttctgcagcattactgccaagcctgggaaatcaaacactggagaaagatgctctggcggttcatctccctcttctcggagctggaagcaaagcagcttcgccgactttacaagtacaccaagagcagccagccggccaagttcctggtgacattctgcgcctcggatgcgccggagaggtccttgctggccgaccgggaagacagtctgcccaagctctgccatgcatgggggctgcacagcaacatcagcggcatgaaggagcggctgtccaacatgcagaccccaggtcaagggagccccctgcctgggcagccaagatcccaggaccatgtcaagaaagattctttaagggagctttctcaaaaaccaaaactcaagaggaagaggataaaggaagccccagaaactccagagactgaaccgtaagaagaccaactgggacaaagggcccgcttgtcctggctctcagagcacggggaatggagaccaaaaagggaaaagaattgtccttatcaaaaagattctcaggtcttaattaggaataaatgaggtgggaaataaacattcttatgacagttcta

SEQ ID NO: 255436 - DNA, 711 bp, Artificial Sequence
  derived and/or modified sequence
atggaggccagcgacggccagggcggcgagggcgacaagcccctggagcaggtgaccaacgtgagctgcctggagaccagcagcagcgccagccccgccagagacagcctgatgagacacgccaagggcctggaccaggacaccttcaagacctgcaaggagtacctgagacccctgaagaagttcctgagaaagctgcacctgcccagagacctgccccagaagaagaagctgaagtacatgaagcagagcctggtggtgctgggcgaccacatcaacaccttcctgcagcactactgccaggcctgggagatcaagcactggagaaagatgctgtggagattcatcagcctgttcagcgagctggaggccaagcagctgagaagactgtacaagtacaccaagagcagccagcccgccaagttcctggtgaccttctgcgccagcgacgcccccgagagaagcctgctggccgacagagaggacagcctgcccaagctgtgccacgcctggggcctgcacagcaacatcagcggcatgaaggagagactgagcaacatgcagacccccggccagggcagccccctgcccggccagcccagaagccaggaccacgtgaagaaggacagcctgagagagctgagccagaagcccaagctgaagagaaagagaatcaaggaggcccccgagacccccgagaccgagccctag

SEQ ID NO: 255437 - DNA, 711 bp, Artificial Sequence
  derived and/or modified sequence
atggaggcatccgacggacagggcggcgagggggacaaaccgttagagcaggttaccaacgtctcatgccttgaaacatcttcatccgcttcccctgcacgcgatagcctcatgagacacgccaaggggctcgatcaagacacttttaagacctgtaaggagtacctgaggcccctgaagaaatttctccggaaacttcacctgcctcgagatctgccccaaaaaaagaagcttaagtacatgaagcagtccctcgtggtattaggcgaccacatcaacactttcctgcagcactactgtcaggcgtgggaaattaagcattggcgcaagatgctgtggcgttttatatcattgtttagcgaattggaagccaaacagctacgccgactctataagtatacaaaaagctcacaacctgccaagtttctcgtcactttttgtgcatctgacgcacctgaaaggagcctgttggccgacagggaggatagcctgccaaaattatgccacgcttgggggttgcatagtaatattagcggtatgaaggagcggttgagtaacatgcaaacccctggacaggggagtcccctcccaggacaaccgaggtctcaagatcatgtgaagaaggattctctgagggaattatcgcaaaagccaaagctgaaaagaaagcggatcaaagaggcccccgagacccctgaaacggagccgtag

SEQ ID NO: 255438 - DNA, 711 bp, Artificial Sequence
  derived and/or modified sequence
atggaggccagtgatggccagggcggggagggggacaagcccctggagcaggtgaccaacgtgtcctgcctggagaccagcagcagcgccagccctgcccgggacagcctgatgagacatgccaagggcctggaccaggacaccttcaagacctgcaaggagtacctgcggcccctgaagaagttcctgaggaagctgcacctgccccgggacctgccccagaagaagaagctgaagtacatgaagcagagcctggtggtgctgggggaccacatcaacaccttcctgcagcactactgccaggcctgggagatcaagcactggaggaagatgctgtggaggttcatcagcctcttcagcgagctggaggccaagcagctgcggcggctgtacaagtacaccaagagcagccagcctgccaagttcctggtgaccttctgtgccagtgatgcccctgagaggagcctgctggccgaccgggaggacagcctgcccaagctgtgccacgcctggggcctgcacagcaacatcagcggcatgaaggagcggctgagcaacatgcagaccccaggccagggcagccccctgcccggccagcccaggagccaggaccacgtgaagaaggacagcctgcgggagctgagccagaagcccaagctgaagaggaagaggatcaaggaggcccctgagaccccagagacagagccctag

SEQ ID NO: 255439 - DNA, 711 bp, Artificial Sequence
  derived and/or modified sequence
atggaggccagcgacggccagggcggcgagggcgacaagcccctggaacaagtgactaatgtcagttgtctggaaactagctctagcgcctcacctgctcgcgacagcctgatgagacatgccaagggactggaccaggacaccttcaagacctgtaaggagtatttgcggccactcaagaagttcctgaggaaattacacctgcctagagatctgccccaaaagaagaaactcaagtacatgaaacagtccctggtagttcttggcgatcacattaacacttttttgcagcactactgccaggcatgggaaatcaagcactggcggaaaatgctgtggcgatttatttctctgtttagcgaactggaggcaaaacagcttagaaggctatataaatatactaagagttcccagcctgcgaagttcctcgtgactttctgcgctagtgacgcccctgagcgcagcttgctggcggacagagaggactcactgcccaaactgtgccatgcctggggtctccactcgaacataagcgggatgaaagaacgactttcaaacatgcaaactccaggccagggctctccactgccgggtcagccacggtcccaggatcacgtgaagaaggactccttgcgggagctgtctcaaaaacctaaacttaagcggaagaggattaaggaggcccccgagacgcccgaaaccgaaccatag

SEQ ID NO: 255440 - DNA, 711 bp, Artificial Sequence
  derived and/or modified sequence
atggaagccagcgacgggcaggggggagagggagacaagcctctggagcaggttaccaatgtgagctgcttggaaacctcaagcagcgcttcccctgcccgtgactcactaatgaggcatgcaaaaggcttagaccaggacacttttaagacatgcaaggagtatctccgcccactcaagaaattcctgcgtaaattgcatctgcccagggatctgccacagaaaaagaagcttaagtacatgaaacagagtctcgttgtgctgggtgaccacatcaatacatttctgcagcattactgccaggcttgggaaattaagcactggcggaagatgttgtggcgattcatttccctctttagtgaattggaagccaaacagctgcggagactatataaatatacgaaatcatcacagccagccaaattcctggttacattttgtgcttcagacgctcctgagcggagtctcttagcagaccgtgaggactctttgcccaagttgtgtcatgcatggggcttgcattcaaacataagcggcatgaaggaaagactgagtaacatgcagacgccagggcaggggtcacctctgccaggccagccgaggagccaggatcatgttaaaaaggactctctccgcgaactgtcccaaaagcctaaactgaagcggaagagaataaaagaggctccagagacacctgagacggagccttag

SEQ ID NO: 255441 - protein, 292 aa, Artificial Sequence
  derived and/or modified sequence
MAVPTELDGGSVKETAAEEESRVLAPGAAPFGNFPHYSRFHPPEQRLRLLPPELLRQLFPESPENGPILGLDVGCNSGDLSVALYKHFLSLPDGETCSDASREFRLLCCDIDPVLVKRAEKECPFPDALTFITLDFMNQRTRKVLLSSFLSQFGRSVFDIGFCMSITMWIHLNHGDHGLWEFLAHLSSLCHYLLVEPQPWKCYRAAARRLRKLGLHDFDHFHSLAIRGDMPNQIVQILTQDHGMELICCFGNTSWDRSLLLFRAKQTIETHPIPESLIEKGKEKNRLSFQKQ

SEQ ID NO: 255442 - DNA, 879 bp, Artificial Sequence
  derived and/or modified sequence
atggccgtgcccaccgagctggacggcggcagcgtgaaggagaccgccgccgaggaggagagcagagtgctggcccccggcgccgcccccttcggcaacttcccccactacagcagattccacccccccgagcagagactgagactgctgccccccgagctgctgagacagctgttccccgagagccccgagaacggccccatcctgggcctggacgtgggctgcaacagcggcgacctgagcgtggccctgtacaagcacttcctgagcctgcccgacggcgagacctgcagcgacgccagcagagagttcagactgctgtgctgcgacatcgaccccgtgctggtgaagagagccgagaaggagtgccccttccccgacgccctgaccttcatcaccctggacttcatgaaccagagaaccagaaaggtgctgctgagcagcttcctgagccagttcggcagaagcgtgttcgacatcggcttctgcatgagcatcaccatgtggatccacctgaaccacggcgaccacggcctgtgggagttcctggcccacctgagcagcctgtgccactacctgctggtggagccccagccctggaagtgctacagagccgccgccagaagactgagaaagctgggcctgcacgacttcgaccacttccacagcctggccatcagaggcgacatgcccaaccagatcgtgcagatcctgacccaggaccacggcatggagctgatctgctgcttcggcaacaccagctgggacagaagcctgctgctgttcagagccaagcagaccatcgagacccaccccatccccgagagcctgatcgagaagggcaaggagaagaacagactgagcttccagaagcagtag

SEQ ID NO: 255443 - DNA, 879 bp, Artificial Sequence
  derived and/or modified sequence
atggctgtaccaactgaattggatggagggtcagtcaaagaaaccgcagcggaagaggaatccagagtactcgccccaggggctgccccttttggtaattttccccattatagtcgcttccaccctcctgagcagcgactgagactcctcccccctgagctgctgcgccagttattccctgagtcccctgagaatggccccatcctgggattagacgttgggtgtaattctggtgatttgagcgtcgctctttataagcatttccttagcctcccggatggggagacctgctccgacgcctctcgcgaatttcggctgctttgttgtgatatcgaccccgtgctggtgaaacgcgcagagaaggaatgccctttcccggacgctctgaccttcatcaccctggattttatgaatcagaggactcgaaaagtgctcctgtcctcctttctatctcagtttggacggtccgtgttcgacatagggttttgcatgtccatcaccatgtggatccacctgaatcatggagaccacggactgtgggaattcctggcgcatctgagttcgttgtgtcactacctgcttgtcgagccacagccatggaaatgttacagagccgccgcaagacggttgcgcaaacttgggctgcatgacttcgaccacttccattcactcgctatccgtggcgatatgcctaatcagatcgtgcagatcctgactcaggatcacgggatggagctcatttgctgcttcgggaacactagctgggaccggtcgctgctgctcttccgcgccaagcagaccattgaaacgcatcccataccggagagtttaatcgaaaaaggaaaagagaagaatcggctatcctttcagaagcaatag

SEQ ID NO: 255444 - DNA, 879 bp, Artificial Sequence
  derived and/or modified sequence
atggctgtgcccacagagctggatggcggctctgtgaaggagacagctgctgaggaggagagccgggtgctggcccctggggccgccccctttggaaacttcccccactacagccgcttccaccccccagagcagaggctgcggctgctgcccccagagctgctgcggcagctgtttcctgagagcccagaaaatggccccatcctgggcctggatgtgggctgcaacagcggggacctgtctgtggccctgtacaagcacttcctgagcctgcctgatggagagacctgcagtgatgccagccgggagttccggctgctgtgctgtgacattgatcctgtgctggtgaagagagctgagaaggagtgccccttcccagatgccctgaccttcatcaccctggacttcatgaaccagaggaccaggaaggtgctgctgagcagcttcctgagccagtttggccgctctgtgtttgacatcggcttctgcatgagcatcaccatgtggatccacctgaaccacggggaccacggcctgtgggagttcctggcccacctgagcagcctgtgccactacctgctggtggagccccagccctggaagtgctacagagctgctgcccggcggctgaggaagctgggcctgcatgactttgaccacttccacagcctggccatccggggggacatgcccaaccagatcgtgcagatcctgacccaggaccacggcatggagctgatctgctgcttcggcaacacctcctgggacaggagcctgctgctcttccgggccaagcagaccatcgagacccaccccatccctgagagcctcatcgagaagggcaaggagaagaaccggctgtccttccagaagcagtag

SEQ ID NO: 255445 - DNA, 879 bp, Artificial Sequence
  derived and/or modified sequence
atggccgtgcccaccgagctggacggcggcagcgtgaaggagaccgctgctgaagaggagtcgcgcgtgctcgcccccggagctgcacctttcggaaattttccccactacagcagatttcacccacccgaacaaagactaaggctgcttcctccggagcttctgcgacagctgtttcccgaatcaccggaaaacggccctatcttgggcctcgacgtgggctgcaactccggtgacctgtccgtggcactctataagcacttcctgagtctgcccgacggcgagacgtgtagcgatgccagccgagaattcaggcttctgtgttgcgacatcgacccagtcctcgtcaagcgggcagagaaagagtgtccctttcccgacgcactcaccttcattacgctcgatttcatgaaccagcggactagaaaagtcctgttgtctagctttctcagtcaattcggccgctctgtctttgacatcggcttctgcatgagcatcactatgtggatacaccttaatcacggggatcatggactctgggaattcctggcccacctgtcctccctgtgtcattatctattggtagagcctcagccctggaaatgttacagggccgccgccaggaggctgaggaagctcggtctgcacgactttgatcattttcatagcctggctattcgcggcgacatgccaaaccagattgtgcagatccttacccaagatcacggtatggaactgatctgctgcttcgggaatacaagttgggatcggtccctgcttcttttcagagcaaagcagactattgaaacacacccgatcccagagtccctgatcgaaaaagggaaagaaaagaacaggctgagcttccagaaacagtag

SEQ ID NO: 255446 - DNA, 879 bp, Artificial Sequence
  derived and/or modified sequence
atggctgtccccaccgagctggacggaggatccgtgaaggagacggcagcagaggaggagtctcgcgttttagctcctggcgctgcccctttcggcaacttccctcattattcccgctttcacccccctgagcagcgattgaggctgctcccccctgagcttctgagacaactgttccctgaatccccggagaacggcccaatcctgggactcgacgttggttgcaatagtggtgatttgtcagtggctctgtacaagcactttctgtccctgcccgacggggaaacttgctcggacgcgtcccgcgaattcaggctgctttgctgcgacatcgaccctgtactggtcaagcgggctgagaaggagtgtccctttcccgacgcactcacgtttataactctagacttcatgaatcagcggacgagaaaggtgctcctgtctagctttttaagccagttcggcaggagcgtgtttgatataggcttttgtatgtcaattacaatgtggatacaccttaaccacggggatcacggattgtgggaattcctggcccatctctcgtccctttgtcactacctgttagtggaaccgcagccttggaagtgttaccgggctgccgctagacggctgaggaagctggggcttcacgactttgatcacttccactcgctggcaataaggggggatatgcctaaccagatcgtccagattctgacacaggatcacggtatggagctcatttgttgctttgggaatacctcttgggaccgttctcttctgttatttcgggcaaaacaaacaatcgaaactcatcctatccctgagagcctgattgagaaaggaaaagagaaaaaccgtcttagctttcagaaacagtag

SEQ ID NO: 255447 - DNA, 1502 bp, Artificial Sequence
  derived and/or modified sequence
ggcttccggttccgccacggcccagaggctgtgttgaggctaatggcggtgcccacggaactggatggagggagtgttaaggagaccgcagcggaagaggaatcgcgagttctggcacctggcgccgccccgttcggaaattttcctcattattctcgcttccaccctccggagcaacggctccgcctcctgcccccggagctgcttcgacagctctttcctgagagtcccgagaacgggccgattctggggctcgacgtggggtgtaactccggggatctgagtgtggctctatacaaacacttcctctccctacctgacggggaaacctgctcagatgcctcaagagaattccgtctcctctgctgcgacatagatccagtcctggtgaagcgagccgaaaaagaatgtccttttcctgatgccttgacttttatcaccctggacttcatgaatcaaaggacccggaaggttctcttgagctctttcttaagccaatttggacgttcagtttttgacattggcttctgcatgtcaataaccatgtggattcatctgaatcatggagaccatggcctatgggagttcctggcccatctttcctccctctgccactacctccttgtggagccccaaccctggaagtgttaccgggcagctgcaaggcgtctccgaaagctgggactccatgattttgaccacttccactcccttgccatccgaggtgacatgcccaatcagattgtgcagatcttgacccaggatcatggcatggaattaatatgttgctttggcaacaccagttgggacagaagccttctgctcttcagggcaaaacaaaccatagagactcatccaatccctgaatcactgatagaaaaagggaaagaaaagaacagattaagtttccagaagcagtgagatgggagggcaagaagaccaagaaagatattgaaagggttttatattgagaattatgttcattctccttaattccttaacaatcaggcagccgcaaaacctggcaggagcttttggtaaaatgtccaaggcacataattgaaagaatcagtatctgttccccattgtttggaacaaatcttgaggagaatgaatctgtggagtgatgagctaggatatctggattgagatggcctaggaaaagtggtcctggttatgggttatggagagggctgcttttggggattatttataaagatcagactaggctagtcttaaaatatgtcagttcctgggctctctgaatcctacctggtttcttcaggcttctggacttgctaggcctgcctttgggcaaaaccttagtaattcaggtctggaatggggcttaggaatctattttctgtttttttgtttgtttgtttttgcattcttctattgtaatatatacataaaatttaccattttaaccgtttttaagtacagtttttcagaacgtggaaatcccatcaaaaattggattaaaaaattaaaagataaat

SEQ ID NO: 255448 - protein, 395 aa, Artificial Sequence
  derived and/or modified sequence
MTLRRLRKLQQKEEAAATPDPAARTPDSEVAPAAPVPTPGPPAAAATPGPPADELYAALEDYHPAELYRALAVSGGTLPRRKGSGFRWKNLSQSPEQQRKVLTLEKEDNQTFGFEIQTYGLHHREEQRVEMVTFVCRVHESSPAQLAGLTPGDTIASVNGLNVEGIRHREIVDIIKASGNVLRLETLYGTSIRKAELEARLQYLKQTLYEKWGEYRSLMVQEQRLVHGLVVKDPSIYDTLESVRSCLYGAGLLPGSLPFGPLLAVPGRPRGGARRARGDADDAVYHTCFFGDSEPPALPPPPPPARAFGPGPAETPAVGPGPGPRAALSRSASVRCAGPGGGGGGGAPGALWTEAREQALCGPGLRKTKYRSFRRRLLKFIPGLNRSLEEEESQL

SEQ ID NO: 255449 - DNA, 1188 bp, Artificial Sequence
  derived and/or modified sequence
atgacgctgcggcgcctgcgtaagctgcagcagaaggaagaagcggcagccaccccagacccggccgctaggacacctgattcggaggtagcaccagccgcccccgtgccaactcccgggccccctgcagccgctgccactccgggtcctccagcagacgagttgtacgcagcactggaagattaccatcccgctgagctgtacagggcacttgccgtctccggcgggacccttcctcgcagaaagggctcaggctttcgttggaagaatctttcccaatccccggaacaacagagaaaggtgctcaccttggaaaaggaggacaatcagactttcggctttgaaattcagacctatggattgcaccatcgcgaggagcagcgggtcgaaatggtaacttttgtgtgtcgcgtacacgaatcaagtccggcgcaactggctgggctcaccccgggggacacaattgcctctgtcaacggcctcaatgtggagggaattcgtcaccgcgagatcgttgacatcattaaagcatctgggaacgtgctgcggctggaaactctatacggcacaagtattaggaaggctgagctcgaggctcggctccaatacttgaaacagacgctctacgaaaagtggggcgaatacaggagtttaatggtgcaggaacagaggctggtgcatggcctggtcgtaaaagaccctagcatctacgataccctggaatccgtgcggtcttgtttatacggcgctggcttgctgcccggctctctgcccttcgggcctctcctggccgtaccaggacgaccccgtgggggagcccggagggctaggggagatgccgatgatgcagtgtaccatacgtgcttctttggtgactcagagccccctgcattgccccccccgcctccccccgcacgggccttcggtcccggacccgctgaaactccagccgtagggcccggcccaggtcccagagctgccctgtctagaagtgccagtgttcgttgtgcaggtccaggaggcggtggcggaggaggcgcaccgggagctctttggactgaggcccgtgaacaggcgctgtgcggccctggcctaaggaagacaaaatatagatcgtttcgaagacggcttcttaagtttatccccggtctcaatcgctctcttgaagaggaggagagtcagctatag

SEQ ID NO: 255450 - DNA, 1933 bp, Artificial Sequence
  derived and/or modified sequence
ccggctggcatcccccagccgccgccagccccgccgaggggagccagcgccgtctctgaggggcgtccggcgccggagccatgaccctccgccgactcaggaagctgcagcagaaggaggaggcggcggccaccccggaccccgccgcccggactcccgactcggaagtcgcgcccgccgctccggtcccgaccccgggaccccctgccgcagccgccacccctgggcccccagcggacgagctgtacgcggcgctggaggactatcaccctgccgagctgtaccgcgcgctcgccgtgtccgggggcaccctgccccgccgaaagggctcaggattccgctggaagaatctcagccagagtcctgaacagcagcggaaagtgctgacgttggagaaggaggataaccagaccttcggctttgagatccagacttatggccttcaccaccgggaggagcagcgtgtggaaatggtgacctttgtctgccgagttcatgagtctagccctgcccagctggctgggctcacaccaggggacaccatcgccagcgtcaatggcctgaatgtggaaggcatccggcatcgagagattgtggacatcattaaggcgtcaggcaatgttctcagactggaaactctatatgggacatcaattcggaaggcagaactggaggctcgtctgcagtacctgaagcaaaccctgtatgagaagtggggagagtacaggtccctaatggtgcaggagcagcggctggtgcatggcctggtggtgaaggaccccagcatctacgacacgctggagtcggtgcgctcctgcctctacggcgcgggcctgctcccgggctcgctgcccttcgggcctctgctcgccgtgcccgggcgtccccgcggaggcgcccgacgggccaggggcgacgccgacgacgccgtctaccacacgtgcttcttcggggactccgagccgccggcgctgccgcccccgccgcccccggcccgcgccttcggcccgggccccgccgagacccctgccgtggggccgggccctgggccgcgggccgcgctgagccgcagcgccagtgtgcggtgcgcgggccctggcgggggcggaggcgggggcgcgccgggcgcgctctggactgaggctcgcgagcaggccctatgcggccccggcctgcgcaaaaccaagtaccgcagcttccgccggcggctgctcaagttcatccccggactcaaccgctccctggaggaggaggagagccagctgtaggggcgggggcgggcagggaggtatttatttatttattcgcaacagccagcgctaaaagagggggaggccgagccaagaggaccccaggagcccagagcagcgggagagggtccttcctagcctcggcccgccgggtcggttcctggctggtgtctgctgagggagtggggggcccagccccttctcttctcccccgccaaaccacagtgggagctggggcagggggagagccaggcaatcgggggccaaagatgggggtgctcgcctacagtctgcatctgtagtgccttgtggggtatccaggaacaccctcccagcaggggatgggaaccctgtcccatgaagccctctcctcagctttacttgctcccccgcccttagccttggggagaaatggcccgtggtgggctgaccccccaccctccacacacacagttccatgacccagcgggcccccaggggcatcaggtgctggtcctcctccctcctggcctcgacccctaagggcttcgcccctcccaggggcctgtaactaagtcgggtcctgccaggcagggggcctgtgttctgtgccccttgggagacaggaactggcgagttcaggtggggtggggacagcacagactgttccaccgttgtgcatattgttgcttctgaaccacaaa

SEQ ID NO: 255451 - DNA, 1688 bp, Artificial Sequence
  derived and/or modified sequence
gaggctccaggctgtggctgaatttcgggccttagctagtcagaaagtgctgacgttggagaaggaggataaccagaccttcggctttgagatccagacttatggccttcaccaccgggaggagcagcgtgtggaaatggtgacctttgtctgccgagttcatgagtctagccctgcccagctggctgggctcacaccaggtggggcctgagcccaggacacccaggtctgggaaggggatatgaccttactcccaagcaaagggggggacaccatcgccagcgtcaatggcctgaatgtggaaggcatccggcatcgagagattgtggacatcattaaggcgtcaggcaatgttctcagactggaaactctatatgggacatcaattcggaaggcagaactggaggctcgtctgcagtacctgaagcaaaccctgtatgagaagtggggagagtacaggtccctaatggtgcaggagcagcggctggtgcatggcctggtggtgaaggaccccagcatctacgacacgctggagtcggtgcgctcctgcctctacggcgcgggcctgctcccgggctcgctgcccttcgggcctctgctcgccgtgcccgggcgtccccgcggaggcgcccgacgggccaggggcgacgccgacgacgccgtctaccacacgtgcttcttcggggactccgagccgccggcgctgccgcccccgccgcccccggcccgcgccttcggcccgggccccgccgagacccctgccgtggggccgggccctgggccgcgggccgcgctgagccgcagcgccagtgtgcggtgcgcgggccctggcgggggcggaggcgggggcgcgccgggcgcgctctggactgaggctcgcgagcaggccctatgcggccccggcctgcgcaaaaccaagtaccgcagcttccgccggcggctgctcaagttcatccccggactcaaccgctccctggaggaggaggagagccagctgtaggggcgggggcgggcagggaggtatttatttatttattcgcaacagccagcgctaaaagagggggaggccgagccaagaggaccccaggagcccagagcagcgggagagggtccttcctagcctcggcccgccgggtcggttcctggctggtgtctgctgagggagtggggggcccagccccttctcttctcccccgccaaaccacagtgggagctggggcagggggagagccaggcaatcgggggccaaagatgggggtgctcgcctacagtctgcatctgtagtgccttgtggggtatccaggaacaccctcccagcaggggatgggaaccctgtcccatgaagccctctcctcagctttacttgctcccccgcccttagccttggggagaaatggcccgtggtgggctgaccccccaccctccacacacacagttccatgacccagcgggcccccaggggcatcaggtgctggtcctcctccctcctggcctcgacccctaagggcttcgcccctcccaggggcctgtaactaagtcgggtcctgccaggcagggggcctgtgttctgtgccccttgggagacaggaactggcgagttcaggtggggtggggacagcacagactgttccaccgttgtgcatattgttgcttctgaaccacaaactgtataaatggatggttttttg

SEQ ID NO: 255452 - DNA, 1188 bp, Artificial Sequence
  derived and/or modified sequence
atgaccctgcggcggctgaggaagctgcagcagaaggaggaggccgccgccaccccagaccctgctgcccggaccccagacagcgaggtggccccagctgcccctgtgcccaccccaggccccccagctgctgctgccaccccaggccccccagcagatgagctgtatgctgccctggaggactaccaccctgctgagctgtaccgggccctggccgtgtctgggggcaccctgcccaggaggaagggcagcggcttccgctggaagaacctgagccagagccctgagcagcagaggaaggtgctgaccctggagaaggaggacaaccagaccttcggctttgagatccagacctacggcctgcaccaccgggaggagcagagggtggagatggtgacctttgtgtgccgggtgcatgagagcagccctgcccagctggccggcctgacccctggggacaccatcgcctctgtgaatggcctgaatgtggagggcatccgccaccgggagatcgtggacatcatcaaggccagcggaaatgtgctgcggctggagaccctgtatggcaccagcatcaggaaggccgagctggaggcccggctgcagtacctgaagcagaccctgtatgagaagtggggcgagtaccgcagcctgatggtgcaggagcagaggctggtgcacggcctggtggtgaaggaccccagcatctatgacaccctggagagcgtgcgcagctgcctgtatggagctggcctgctgcccggcagcctgcccttcggccccctgctggccgtgcccggccggccccggggcggggcccggcgggcccggggagatgctgatgatgctgtgtaccacacctgcttcttcggggacagcgagcccccagccctgcccccacctcctcctccagcccgggccttcggccctggccctgctgagaccccagctgtgggccctggccctggcccccgggccgccctgagccgcagcgcctctgtgcgctgtgccggccctgggggcggcggcggcggcggggcccctggggccctgtggacagaggcccgggagcaggccctgtgtggccctggcctgaggaagaccaagtaccgctccttcagaagaaggctgctgaagttcatccctggcctgaacagaagcctggaggaggaggagagccagctgtag

SEQ ID NO: 255453 - DNA, 1188 bp, Artificial Sequence
  derived and/or modified sequence
atgaccctgcggcggctgcggaagctgcagcagaaggaggaggccgcggcaactcccgaccctgcagcccggactcctgattccgaagttgctcctgccgcacctgtgccaacacccggcccccccgcggcagctgcaacccccggtcccccagccgatgaactgtatgccgctctagaagattatcatcccgcggagctgtaccgagctctggccgtgtccggtggaaccctccctaggagaaaagggagcggatttcgatggaaaaacctctctcagtccccagaacagcagcggaaggtgcttacattagaaaaagaagacaaccagacatttgggttcgaaattcagacttacgggcttcatcacagagaagaacagagggtagagatggtgaccttcgtatgccgcgtgcacgaatccagccctgctcagttggccggcctcacccctggtgacacgatcgccagcgttaatgggctcaatgtggagggtattcggcatagggagattgtcgacatcataaaggctagcggcaatgtcctgcgcctagagacattatacggaacaagcattcgtaaagccgaactggaagcaagattgcagtatctgaaacagactttgtatgaaaaatggggcgagtataggtcgttaatggtgcaggagcagcggttggtacacggtctggtagtcaaggaccctagcatctacgacactttggaaagcgtgcggagttgcctttacggtgcaggcctgctgccaggatcccttccattcggccctctgctagccgtgcccggccggcccagagggggcgcacgccgcgccaggggggacgcagatgacgccgtgtatcatacatgcttcttcggcgacagcgaaccacctgcccttcccccccctccgccgcctgctcgcgcattcggtcccggtccagccgagacaccagccgtgggccctggacctggaccgagggccgccctgtccagaagcgcaagcgtgagatgcgccgggccaggcgggggtgggggtggtggtgccccaggggccttatggaccgaagcgcgtgaacaggctttgtgtggccccggcttgcggaagacaaagtatcgttcttttagaagaagattactcaagtttattcctggtctgaataggtctttggaagaggaagagagtcagctctag

SEQ ID NO: 255454 - DNA, 1188 bp, Artificial Sequence
  derived and/or modified sequence
atgactcttcgccgtctacgtaaactgcaacagaaagaggaggccgcagcgacgcccgatcccgctgcacggacgccagattctgaagttgcgccagccgctccagtgccgacccctggccctcctgctgccgctgcgacacctggacctccagccgacgagctctacgcagctttggaagattatcaccccgctgagctctaccgggctttagccgtgtcgggtggcaccctacccagacgcaaaggatctggattcagatggaagaacctatcccagagcccagagcagcaaaggaaagttctgacacttgagaaggaagacaatcagacattcggctttgaaattcagacctacgggctgcaccatcgggaagagcagcgagtggaaatggtaacatttgtctgtagagtccacgaatcttcccccgctcagttagcaggccttacaccaggtgacactatagcatcggtcaatggacttaacgtcgaaggcatacgtcatcgcgagatcgtcgacataattaaggcttcaggcaacgtgttgaggctagagaccctgtacggaacgagtattcgcaaggccgagcttgaggcgaggctccagtacctgaagcagaccttatatgaaaagtggggggagtacaggagcttgatggtgcaggagcagcgcttagtgcatggactcgtggtaaaggatccttcgatctacgacacactggagagtgttcgctcgtgtctatacggcgctggattattgccgggttcactgcctttcggtccactgctcgcagtcccaggcagacctagaggaggcgctcggagagctcggggagatgcagatgatgcagtataccatacgtgcttcttcggcgatagcgagccacccgctctgccccctccccctcccccagcgcgtgcattcggcccaggtccagccgagaccccagccgttgggcctgggcctggtccccgtgccgctctgtcacgctcggcctcggttcggtgtgccggacccggtggcggtgggggaggaggtgctcctggggcactgtggaccgaggcacgagaacaagctctctgcggccctggcctgaggaaaactaaataccgaagcttcaggcggagactgctgaaattcatccccggactgaatagatctcttgaggaagaggagtcgcagttatag

SEQ ID NO: 255455 - DNA, 1188 bp, Artificial Sequence
  derived and/or modified sequence
atgaccctgagaagactgagaaagctgcagcagaaggaggaggccgccgccacccccgaccccgccgccagaacccccgacagcgaggtggcccccgccgcccccgtgcccacccccggcccccccgccgccgccgccacccccggcccccccgccgacgagctgtacgccgccctggaggactaccaccccgccgagctgtacagagccctggccgtgagcggcggcaccctgcccagaagaaagggcagcggcttcagatggaagaacctgagccagagccccgagcagcagagaaaggtgctgaccctggagaaggaggacaaccagaccttcggcttcgagatccagacctacggcctgcaccacagagaggagcagagagtggagatggtgaccttcgtgtgcagagtgcacgagagcagccccgcccagctggccggcctgacccccggcgacaccatcgccagcgtgaacggcctgaacgtggagggcatcagacacagagagatcgtggacatcatcaaggccagcggcaacgtgctgagactggagaccctgtacggcaccagcatcagaaaggccgagctggaggccagactgcagtacctgaagcagaccctgtacgagaagtggggcgagtacagaagcctgatggtgcaggagcagagactggtgcacggcctggtggtgaaggaccccagcatctacgacaccctggagagcgtgagaagctgcctgtacggcgccggcctgctgcccggcagcctgcccttcggccccctgctggccgtgcccggcagacccagaggcggcgccagaagagccagaggcgacgccgacgacgccgtgtaccacacctgcttcttcggcgacagcgagccccccgccctgccccccccccccccccccgccagagccttcggccccggccccgccgagacccccgccgtgggccccggccccggccccagagccgccctgagcagaagcgccagcgtgagatgcgccggccccggcggcggcggcggcggcggcgcccccggcgccctgtggaccgaggccagagagcaggccctgtgcggccccggcctgagaaagaccaagtacagaagcttcagaagaagactgctgaagttcatccccggcctgaacagaagcctggaggaggaggagagccagctgtag

SEQ ID NO: 255456 - protein, 259 aa, Artificial Sequence
  derived and/or modified sequence
MKDVDNLKSIKEEWVCETGSDNQPLGNNQQSNCEYFVDSLFEEAQKVSSKCVSPAEQKKQVDVNIKLWKNGFTVNDDFRSYSDGASQQFLNSIKKGELPSELQGIFDKEEVDVKVEDKKNEICLSTKPVFQPFSGQGHRLGSATPKIVSKAKNIEVENKNNLSAVPLNNLEPITNIQIWLANGKRIVQKFNITHRVSHIKDFIEKYQGSQRSPPFSLATALPVLRLLDETLTLEEADLQNAVIIQRLQKTASFRELSEH

SEQ ID NO: 255457 - protein, 206 aa, Artificial Sequence
  derived and/or modified sequence
MKDVDNLKSIKEEWVCETGSDNQPLGNNQQSNCEYFVDSLFEEAQKVSSKCVSPAEQKKQVDVNIKLWKNGFTVNDDFRSYSDGASQQFLNSIKKGELPSELQGIFDKEEVDVKVEDKKNEICLSTKPVFQPFSGQGHRLGRVSHIKDFIEKYQGSQRSPPFSLATALPVLRLLDETLTLEEADLQNAVIIQRLQKTASFRELSEH

SEQ ID NO: 255458 - DNA, 621 bp, Artificial Sequence
  derived and/or modified sequence
atgaaggacgtggacaacctgaagagcatcaaggaggagtgggtgtgcgagaccggcagcgacaaccagcccctgggcaacaaccagcagagcaactgcgagtacttcgtggacagcctgttcgaggaggcccagaaggtgagcagcaagtgcgtgagccccgccgagcagaagaagcaggtggacgtgaacatcaagctgtggaagaacggcttcaccgtgaacgacgacttcagaagctacagcgacggcgccagccagcagttcctgaacagcatcaagaagggcgagctgcccagcgagctgcagggcatcttcgacaaggaggaggtggacgtgaaggtggaggacaagaagaacgagatctgcctgagcaccaagcccgtgttccagcccttcagcggccagggccacagactgggcagagtgagccacatcaaggacttcatcgagaagtaccagggcagccagagaagcccccccttcagcctggccaccgccctgcccgtgctgagactgctggacgagaccctgaccctggaggaggccgacctgcagaacgccgtgatcatccagagactgcagaagaccgccagcttcagagagctgagcgagcactag

SEQ ID NO: 255459 - DNA, 780 bp, Artificial Sequence
  derived and/or modified sequence
atgaaagatgttgataacctgaagtctatcaaggaagaatgggtttgcgaaacgggctcagataaccagcctttgggaaataatcagcagagcaattgtgaatatttcgttgactcattgttcgaagaagcacagaaggtgtcatctaaatgcgtctccccagcggaacagaagaagcaggtcgacgtgaatattaaattgtggaaaaatggtttcactgttaatgacgacttccggagctactcagacggcgcttctcagcagttcctcaatagcattaagaaaggcgagttaccatccgaactgcagggcatctttgacaaagaagaggtggacgtaaaggtggaggataagaagaacgaaatatgcctgagtacaaagccggtattccaacccttctcagggcaaggccacaggttggggtccgcaacccctaagattgtgtccaaggcaaagaatatagaggtggagaataaaaataacctctctgctgtgccattgaacaacctcgaacctatcactaatatccagatttggctggccaatggaaagcggatagtgcagaagtttaatataacccatagagtttcgcatattaaggactttatcgagaaataccagggcagtcagaggagccccccattcagcctggcaactgctctacccgtactccgcctcctggatgagactctgactctagaagaggcagacctgcagaacgccgtcattattcagcggcttcaaaagacagcctcatttcgagaactaagcgaacattag

SEQ ID NO: 255460 - DNA, 780 bp, Artificial Sequence
  derived and/or modified sequence
atgaaggacgtggataatctgaagagtatcaaagaagagtgggtctgcgaaaccggctccgacaaccagcccctgggtaataatcagcaaagtaattgtgagtacttcgttgatagcctcttcgaggaagcccaaaaggtctcttcaaagtgcgttagcccagccgaacagaaaaaacaggttgatgttaatatcaagctgtggaagaacggttttacagtgaacgacgatttcaggagctactcagacggagcatcccagcaatttctgaattctattaagaaaggcgaactgccctcggagcttcagggcatattcgacaaagaagaggttgatgttaaggtggaagacaagaagaacgaaatctgtctgtcaacaaagccggtgtttcagcccttttctggccagggacatagactagggagtgccaccccaaaaatcgtctcaaaggctaaaaacatcgaagtggagaataaaaataacctgagcgctgtgccgctgaacaatcttgagcctatcaccaatatccagatttggctcgccaatggcaagagaatcgtacagaagttcaacatcactcatagggtctcccacataaaggactttatagagaaataccagggttcacaacgctccccccctttcagcctcgccaccgcacttcccgttctgaggctgctagatgaaaccctgacacttgaggaggcggacctccaaaatgccgtcattatccagcggttgcagaagaccgctagtttccgcgaactgagcgaacattag

SEQ ID NO: 255461 - DNA, 621 bp, Artificial Sequence
  derived and/or modified sequence
atgaaggatgttgataacctgaaaagtatcaaagaagagtgggtgtgtgagactggttctgataatcagcccctgggcaacaaccaacagtccaattgtgagtactttgtggactccctcttcgaggaggctcagaaggtctcgagtaagtgcgtaagccctgctgagcagaaaaaacaggttgacgtcaacattaaactgtggaagaacggcttcacagtgaacgacgattttcggtcctacagcgacggcgcttctcaacagtttctgaacagcatcaagaagggcgaactcccaagtgagttgcagggcattttcgacaaagaagaagtggacgtcaaggtggaggacaaaaaaaacgagatctgtctttctactaagcccgttttccagccgttcagcggccagggccatagattagggcgcgttagccatattaaggatttcattgagaaataccaagggtcgcaaagatctccgcccttctcactggctacagctctgcctgttctaagattactcgacgaaaccctgacacttgaggaggccgacctgcaaaacgccgtgatcatccagagactgcagaagactgcgagtttcagagaactgtccgaacactag

SEQ ID NO: 255462 - DNA, 780 bp, Artificial Sequence
  derived and/or modified sequence
atgaaggatgtggacaacctgaagagcatcaaggaggagtgggtgtgtgagaccggcagtgacaaccagcccctgggcaacaaccagcagagcaactgtgagtactttgtggacagcctgtttgaggaggcccagaaggtgagcagcaaatgtgtgtccccagctgagcagaagaagcaggtggatgtgaacatcaagctgtggaagaatggcttcaccgtgaatgatgacttccgcagctacagtgatggagccagccagcagttcctgaacagcatcaagaagggggagctgcccagcgagctgcagggcatctttgacaaggaggaggtggatgtgaaggtggaggacaagaagaatgagatctgcctgagcaccaagcctgtgttccagcccttcagcggccagggccaccggctgggcagcgccacccccaagatcgtgtccaaggccaagaacatcgaggtggagaacaagaacaacctgtctgctgtgcccctgaacaacctggagcccatcaccaacatccagatctggctggccaacgggaagagaattgtgcagaagttcaacatcacccaccgggtgagccacatcaaggacttcatcgagaagtaccagggcagccagaggagcccccccttcagcctggccacagccctgcctgtgctgcggctgctggatgagaccctgaccctggaggaggccgacctgcagaatgctgtgatcatccagaggctgcagaagacagccagcttccgggagctgtctgagcactag

SEQ ID NO: 255463 - DNA, 621 bp, Artificial Sequence
  derived and/or modified sequence
atgaaggatgtggacaacctgaagagcatcaaggaggagtgggtgtgtgagaccggcagtgacaaccagcccctgggcaacaaccagcagagcaactgtgagtactttgtggacagcctgtttgaggaggcccagaaggtgagcagcaaatgtgtgtccccagctgagcagaagaagcaggtggatgtgaacatcaagctgtggaagaatggcttcaccgtgaatgatgacttccgcagctacagtgatggagccagccagcagttcctgaacagcatcaagaagggggagctgcccagcgagctgcagggcatctttgacaaggaggaggtggatgtgaaggtggaggacaagaagaatgagatctgcctgagcaccaagcctgtgttccagcccttcagcggccagggccaccggctgggccgggtgagccacatcaaggacttcatcgagaagtaccagggcagccagaggagcccccccttcagcctggccacagccctgcctgtgctgcggctgctggatgagaccctgaccctggaggaggccgacctgcagaatgctgtgatcatccagaggctgcagaagacagccagcttccgggagctgtctgagcactag

SEQ ID NO: 255464 - DNA, 780 bp, Artificial Sequence
  derived and/or modified sequence
atgaaggacgtggacaacctgaagagcatcaaggaggagtgggtgtgtgagaccggttccgataatcagcctttaggtaacaaccagcagtccaactgtgagtattttgtggacagcttgtttgaagaagcccagaaggtgtcaagcaagtgcgtttctcctgctgaacagaagaagcaggtcgatgtgaacatcaaattgtggaagaatggcttcacagttaacgacgactttaggtcttactctgacggcgcttcacagcagttcttgaattccataaagaagggagaattgcccagtgagctccagggaatctttgataaagaagaagtcgacgttaaggtcgaggataaaaaaaatgagatctgcctcagcaccaagccagtgtttcagcccttcagtggccaaggacatcgcctcgggagcgccaccccaaagattgtttccaaagccaaaaatattgaggtagagaacaagaacaacttgtccgccgtgcccctgaataacctagaacctatcactaatattcagatctggctcgcaaacggtaagcgaattgtccagaagtttaatataacacacagggtgtctcatattaaggacttcatagagaaataccaagggagtcagcgtagcccccccttttccctggccaccgccctgcccgtgcttagactgcttgatgagaccttgacccttgaggaggccgatctacagaatgccgtaatcatccaaagactacaaaagacggccagttttcgcgagctgagtgaacattag

SEQ ID NO: 255465 - DNA, 780 bp, Artificial Sequence
  derived and/or modified sequence
atgaaggacgtggacaacctgaagagcatcaaggaggagtgggtgtgtgaaaccggcagcgataaccagcccctggggaacaaccaacaatcaaactgcgagtatttcgtggattcgttgttcgaagaagctcagaaagtctcctctaagtgcgtgagtcccgccgagcagaagaagcaggtggatgtcaacattaaactgtggaaaaatggttttacggtgaatgatgacttccggtcatattccgacggggcaagccaacaattcctgaattccatcaagaagggcgagctgccttccgagcttcagggaatcttcgataaggaggaagtcgacgtaaaggttgaggacaagaagaacgagatatgcctgagtacaaagcccgtgttccagccattctcgggccagggtcatagactcggctcggcaaccccgaagatcgtctcgaaagccaaaaatatcgaggtggaaaataagaataacctcagcgcagtgcctttgaacaaccttgaaccgattacgaatattcagatttggctcgcaaacggcaagcgaatcgtacagaagtttaatataactcaccgtgtcagccacatcaaggacttcatagaaaaataccagggaagtcagaggagcccaccattttcactggctactgcactgcctgtactgcggctcctagacgagacattgaccctcgaagaagctgatttacaaaacgctgtgattatccagcgcctacaaaagactgccagctttagggagttaagcgaacactag

SEQ ID NO: 255466 - DNA, 1557 bp, Artificial Sequence
  derived and/or modified sequence
gaccagaaaagccagactaatcaggacgagttcgggcgtggaattgggcctgaagccctcatgcccagccaggcctgaatgccccagaccccaccgtcacccccgtggcctggatggagcaggggacggccggcgaaggcgcggggtggaaggggagcggcgacgaaggcgcgaggagctgactgggaatccccaagctacccgaggcaagacactgaacttgagtcgcacttttcatgcctgtagaaatgagaatgacagctgtgataaaaaaaaaattcatctgggcggtatctggaacttggcggtggatgaggagggctgctcgctggctgcggctgaggctcggtcaccgtgtagagaggcccagggagagctgcttcactcaagtcctgtcaagtcaaggcagccgggatttgtccacatctaaggcgaaagagaatgaaagacgtagataacctcaaaagtataaaagaagaatgggtttgtgaaacaggatctgataatcaacctcttggtaataatcaacaatcaaattgtgaatattttgttgatagcctttttgaggaagctcagaaggttagttccaaatgtgtgtctcccgctgaacagaagaaacaggtagatgtaaatataaaattatggaaaaacggattcaccgtcaacgacgatttcagaagttattccgatggtgccagtcagcagtttttgaactccatcaaaaagggggaattaccttcagaattacagggaatttttgataaagaagaggtggacgttaaagttgaagacaagaaaaatgaaatatgtttgtctacgaagcctgtgttccagcccttttcaggacagggtcacagactaggaagtgccacaccaaaaattgtttctaaagcaaagaatattgaagttgaaaataaaaataatttgtctgctgttccactgaacaacttggaacccattactaatatacagatctggttggccaatggaaaaaggattgtccagaaatttaacattactcatagagtaagccatatcaaagacttcattgaaaaataccaaggatctcaaagaagtcctccgttttccctggcaacagctcttcctgtcctcaggttgctagatgagacactcacactggaagaagcagatttacagaatgctgtcatcattcagagactccaaaaaactgcatcttttagagaactttcagagcactgatttttgatagactaagtggaaaatttgcagagaaatgatggttgtaagtggacatgcaaaccaaaattggggattggagaagtcagactcactagacttttggttcgagtactattgaactctctcctgatgagaagatgtttagataagtacaagttaagaaagtagcatatgactggaaactatattcagtgcactttctccaaaagactacccagaaaaatagacttattttcaaataccagttatcaagatatattaaatagctgtattgtttagaatcttaatatggtataaattagcatatgtattcacaatattcattcagacatcatt

SEQ ID NO: 255467 - DNA, 621 bp, Artificial Sequence
  derived and/or modified sequence
atgaaggacgtggacaacctgaagagcatcaaggaggagtgggtgtgcgagactgggagcgataatcagccgttgggcaacaaccagcagagtaattgtgagtacttcgtggattccctatttgaggaagcccaaaaagtgagctctaaatgtgtgtctcccgcagaacagaaaaagcaggtagatgtgaacatcaagctatggaaaaacgggttcactgtgaacgacgattttcgtagctactctgatggagctagtcaacagtttttaaatagcatcaagaagggcgagctgccttctgagctgcaaggcatttttgataaggaggaggttgacgttaaagtggaggataaaaaaaacgagatatgtttgtcaaccaaacccgtgtttcaaccctttagcgggcagggccatagactgggacgggtgtctcatattaaggacttcatcgagaagtatcagggctctcagcggtccccccccttttctttggctacagccctgcctgtactgcgattgcttgatgagacactgaccctggaagaggcagatcttcagaacgctgttatcattcagcggttacagaagacagcgtctttcagagagctgtccgagcactag

SEQ ID NO: 255468 - DNA, 780 bp, Artificial Sequence
  derived and/or modified sequence
atgaaagacgtggataatctgaagtctattaaagaggaatgggtgtgtgagactggaagcgacaaccagcctctgggaaataaccagcagtcaaattgcgagtatttcgtggatagcctgttcgaggaggcgcagaaagtgagcagcaagtgtgttagtcccgcagagcagaaaaagcaagtggacgtgaacataaagttatggaagaatggctttacagtgaatgacgactttaggagctacagcgacggagctagtcagcagttcctgaacagtatcaaaaagggggagcttcccagtgaactgcaaggcatcttcgacaaagaggaggtagacgtcaaggttgaagacaagaaaaatgaaatctgtctgagtaccaaacccgtgtttcaacctttcagcgggcagggccacagactcggttcggctacccccaaaattgtatcaaaggcaaagaacatagaagtcgagaacaagaacaacttgtctgccgtgcctcttaataatctcgaacccataactaacatccagatctggttagccaacgggaagcggattgtccaaaagtttaacattactcatcgggtgtctcatataaaagatttcatcgagaaataccaaggctctcagcgcagcccaccgttctcactcgcgaccgcattaccagtgctccggctactcgacgagacgcttacattggaggaggccgatctgcagaatgctgttataatacagcgcctccagaagaccgcctcctttcgtgagttatccgaacactag

SEQ ID NO: 255469 - DNA, 780 bp, Artificial Sequence
  derived and/or modified sequence
atgaaggatgttgacaacctcaagtctattaaggaagagtgggtgtgtgaaacgggatctgacaaccagccacttggaaacaatcagcagtcaaattgcgagtattttgtagatagtttatttgaggaggctcagaaggtgtcttccaaatgcgtatcgcccgctgaacagaagaagcaagtggacgtcaacatcaagctgtggaagaatgggttcactgtgaacgatgacttccggagttatagtgacggtgccagccagcagttcctaaattccatcaaaaagggtgagcttccctccgaactgcaagggatctttgacaaggaagaggttgatgtgaaagtcgaagacaagaagaatgagatctgcctgtctacgaagcctgtcttccagccgtttagcggccaaggccaccggcttggctccgcaactcctaaaatagtttcaaaggccaagaatattgaggtggagaacaagaataatttatccgctgtgcccctaaacaatctggagccaattaccaatattcagatttggctggcaaatggcaagcgtatcgtccaaaagttcaacataacacacagagtttctcacatcaaagactttatcgagaaataccagggctctcagcgctcacctccgttcagtctcgccactgccctcccagtcctacgcctactggatgagacgctgaccctggaagaagccgatcttcagaatgccgtcatcatccagagactgcagaagaccgccagcttcagggaactgtcagagcactag

SEQ ID NO: 255470 - DNA, 621 bp, Artificial Sequence
  derived and/or modified sequence
atgaaggacgtagacaacctaaaatcaatcaaagaagaatgggtctgcgaaactggaagcgataatcagccgctgggcaataatcagcagagcaattgtgagtattttgtcgactccttatttgaagaagcccagaaagtctcttctaagtgtgtctctcccgctgagcagaaaaagcaagtagacgtgaacattaaactgtggaagaatggctttaccgtgaatgatgattttaggtcgtactcagatggagcgtctcaacagttcttgaacagcattaaaaaaggcgagcttccttctgaactccagggaatattcgacaaggaagaagtggatgtaaaagtggaagacaaaaagaacgagatctgcctctcaacaaaacctgtcttccagcccttttctggacaggggcaccgacttggtcgagtgtctcacatcaaagattttatcgaaaagtaccaggggagccagaggagcccccctttctcactggccacagccctgcccgtgctcaggctgttagatgaaacactgaccttggaggaagccgatctacaaaacgccgtgatcatccagcggctccagaagactgctagttttagggagctgtcggagcactag

SEQ ID NO: 255471 - DNA, 748 bp, Artificial Sequence
  derived and/or modified sequence
gcctgagctgagtgaggccgaggccgggaggccgtgcccggagtaaggcgaaagagaatgaaagacgtagataacctcaaaagtataaaagaagaatgggtttgtgaaacaggatctgataatcaacctcttggtaataatcaacaatcaaattgtgaatattttgttgatagcctttttgaggaagctcagaaggttagttccaaatgtgtgtctcccgctgaacagaagaaacaggtagatgtaaatataaaattatggaaaaacggattcaccgtcaacgacgatttcagaagttattccgatggtgccagtcagcagtttttgaactccatcaaaaagggggaattaccttcagaattacagggaatttttgataaagaagaggtggacgttaaagttgaagacaagaaaaatgaaatatgtttgtctacgaagcctgtgttccagcccttttcaggacagggtcacagactaggaagagtaagccatatcaaagacttcattgaaaaataccaaggatctcaaagaagtcctccgttttccctggcaacagctcttcctgtcctcaggttgctagatgagacactcacactggaagaagcagatttacagaatgctgtcatcattcagagactccaaaaaactgcatcttttagagaactttcagagcactgatttttgatagactaagtggaaaatttgcagagaaatgatggttgtaagtggacatgcaaaccaaaattgg

SEQ ID NO: 255472 - DNA, 6066 bp, Artificial Sequence
  derived and/or modified sequence
ccgcgcgcgctcctcgggtctgcgcggagccggcgtcggcgcgcgcttgggcgcctggcgaagaccgagagaggctggcgggatctcagcggcgcggccgcggaacctgaggcggtctggggcggcggcgctccggctctgaagggctccagccaaacggagcccgcggccaaacggtgcctgcggtgcctgagctgagtgaggccgaggccgggaggccgtgcccggagtaaggcgaaagagaatgaaagacgtagataacctcaaaagtataaaagaagaatgggtttgtgaaacaggatctgataatcaacctcttggtaataatcaacaatcaaattgtgaatattttgttgatagcctttttgaggaagctcagaaggttagttccaaatgtgtgtctcccgctgaacagaagaaacaggtagatgtaaatataaaattatggaaaaacggattcaccgtcaacgacgatttcagaagttattccgatggtgccagtcagcagtttttgaactccatcaaaaagggggaattaccttcagaattacagggaatttttgataaagaagaggtggacgttaaagttgaagacaagaaaaatgaaatatgtttgtctacgaagcctgtgttccagcccttttcaggacagggtcacagactaggaagtgccacaccaaaaattgtttctaaagcaaagaatattgaagttgaaaataaaaataatttgtctgctgttccactgaacaacttggaacccattactaatatacagatctggttggccaatggaaaaaggattgtccagaaatttaacattactcatagagtaagccatatcaaagacttcattgaaaaataccaaggatctcaaagaagtcctccgttttccctggcaacagctcttcctgtcctcaggttgctagatgagacactcacactggaagaagcagatttacagaatgctgtcatcattcagagactccaaaaaactgcatcttttagagaactttcagagcactgatttttgatagactaagtggaaaatttgcagagaaatgatggttgtaagtggacatgcaaaccaaaattggggattggagaagtcagactcactagacttttggttcgagtactattgaactctctcctgatgagaagatgtttagataagtacaagttaagaaagtagcatatgactggaaactatattcagtgcactttctccaaaagactacccagaaaaatagacttattttcaaataccagttatcaagatatattaaatagctgtattgtttagaatcttaatatggtataaattagcatatgtattcacaatattcattcagacatcattcccagacagcagggatttatttaaatgttagctgtctgagtttttaaatagctaatacgaccgggtacagtggttcatgcctgtaatcccagaacttcgggaggccgagacaggcagatcacgaggtcaacagattgagaccatcctggcaaacatggtgaaaccccatctctagtaaaaatacaaaaattagctgggcgtggcggtgcgcaactgtagtcccagctactcgggaggctgaggcaggagaatctcttgaacctggcaagtgtaggttgcagtgagctgagattgagcaactgtactccagcttggcgacagagcaagaccccctctcaaaaataaataaaataaagtaaaataaatataaataattgtggccgggtgcaatggctcatgcctgtaatcccagcactttgggaggctgagatgggaggatcacttgaagccaggagtttaaaaccagaatgatcaacagagtgagacccctgtctatatatttttttaatttaaaaaataaaagaataaaattgtgtagctcagtatagtatcaagattaatctgcctactcacatttctacactttataaaaatgtaataaaagaaaattatctttctaaaaagcctattccctttccattttattttctttcaaaaattatggatttgtttttggctaacatttgggattagccattcatttgccaccactcacttagaatataatgccggtgtgtgtcacattactagtattttttaaatgcatcatataaagtatggttttctgtttctttttcgtttgtttgagatggagtttcgctcttgttgcccaggctggagtgcagtggcgcaatctcagctcaccacaacctccacctcccgggttcaagagattctcctgctcagcctcccaagtagctgggattacaggcatgcgccaccatgcttggctaattttgcatttttagtagacacgggatttcaccatgttggtcaggctggtctcgaactcccgacctcaggggatctgcctgcctaggcctcctgaagtgctgggattacaagtgtgaaccaccgtgcccagctggttttctgtttcatacatcagagtcaacttgtgaatacatttaaagattatttcattttgatatcacgaagaaaaacaggctttatatctcagactttaactaaatccagttagacctcaatttttcactgtcagattaaatccccatacctgaaaataagtttaacatttttttttgcaaatgatctattgaatcagatttaaaatgaagcatgcattgagtgtgccaaggaactaagtggtccatagcagcagtaatgttcatagggtgcgagatgcctgctatgaaacagcaactctcaaacatttttatctcaagaccatttgtttatgtgagctatatatattattatattaaatattaaatttttaaaatatttatttatgggccaggcacggtggcttacgcctgtaatcccagcactttgggaggctgaggcaggcggatcacaaggtcaagtgattgagaccatcctgtccaacatggtgaatccccgtctctactaaaaatacaaaaaaaattagctgggtgtggtggcatgcgcctgtagtcccagctacgtgggaggctgagggaggagaatggcttgaacccgggaggtggaggtttcagtgagccgagattgcgcccctgcactccagcctggtgacggagcgagactctttctcaaaaaaaaaaaattattcatttaaaaataacttctggctggacatggtgtctcacgcctgtaatcctagcactttgggaggccaagacaggtggatcacttgagcccaggagtttgagaccagcctgggcaacaaggcaaaactctatctataaaaattacaaaaattagtgcagtagctcacacctgtaatcccagcactttgggacactaaagcgggcagatcacctgaggtcaggagttcgagaccagcctggtcaatgtggtgaaaccatgtctgtactaaaaatacaaaaattagcctggtgtggtggcacatgcctgtaatctcagctactagggaggctgagggaggagaattgcttgaactcaggaggcagaggttgcagtgagccgagattgcgccactgcactctagcttaggcaacagagtaagaccctgccgtaataataataacttttttttttttgagatagagttttgctctttcccccagactagagtgcaatggcgcgatcttggctcactgcaacttgtccccccgggttcaagcgattcttctgccacagcctcccgagtagctgggattataggcgcccactaccacgcctggctaatttttgtatttttagtagagacggggtttcgccatgttggcctggctggcctctaactcgtaacctcaggtgatccgcccgccttggcctcccaaagtgctaggattataggcgtgagccactgtgcccagccaataataacttataaaacatgaaacgatttagtgagaaaagtggccggttttttggggggaattactttctgtcataaagaagatagatgggttctcatgtcttctacattcagtctgttgtgcagtcacatatcatgtagactctggaaaacacctctgtatactggtgaaagaatgaaaagaagcaaataatgccttagtatgattatgaaaaacgttttgacttcacagtgccctgaatgggtcttgggaatctccagggatccctcaggcacactttgagaaccaatctatataaagtgatggttcacaatgattctgaagccttagtttcagaatcatttggggcagcttttcaaaaatgccattcctgccacctaccacaaagattctgattcactgtatctgtgatgggtctcagatctctgcatttttaatctcacgtgattcttaagtatgtggtggaagtacctttcttcaggaaattctgtcctaagcttttaccctgagaaaataaaacctgcatgctttcaccatggacggtgggagactccactgaaacacatctgctagaccactaagtttatccttgtcacccagtttgctcttggaaagagtctgttcccttttgtcactgaaccaatcatgacataaacttgtgctttacctcctatagcacagccgagacaaggctggaacatttaattaaggtttttactaaggactcaggaataacaacagggaaatatctatgtaactagatgacctgacataaaatctatcttctgattgcagtctattgtgagaatgctgcttttcctagctcccagccttccatggggcagaaggctcttttaattaggaagagagggaggacaaaggagagccttttcttttgtccattactcttagaaatgaacaggtacataatagaaaataaataattattgttggtaatgtttacacagcagtgttagagcctctctgtagtgaaacaaaaataatgttcttaccaaaaaaaaaaaaaaaaaaaagaggcaatgataaaatcaatgagcttatctttctgatatagaaaataacaggatgacagttaatacatgttcaggaatctaagaaaatgtttcatataggcctatcatgtagcatttttatttgcataattatagtcaacatatgattctccatgtaggggtctctcattgagaatgtttcctgtgtacctatagaaaagcctctttggtagattttccggtttataattatttaaccagaagatacatgggaggttcttttgtatgtacctgtagaatacatcccagtaagggtcctatggagaaagacctgttgtcatcaataaccttcattattctaactgtgaaacgttcattaatgcgaataatatcctcaaagattttctacaatgagaatcatccagtaaagctttttaactgagaatttaaaagttgtaaaattgttagttaaatgtgtataattatcaaaagaggttgactttggaaaacaaacaatttgctaagggaaggaaaacttgaaaataatcaccttagatggggcatacaatttgacctaagcaattgtttcaaaactgtcttcagtttcttgaaaataattgttagggctgatatatagaaatacatatctaggccaggcacggtgactcatgcctgcaatcccagcactttgggaggctgaggtggatggatcacgaggtcaagagatcgagaccatcctggtcaacatggggaaaccccgtctatactaaaaatacaaaaattagctgggtgtagtggtgtgcgcctgtagtcccagctactcaggaggctgaggcaggagaatcacctgagccccggaggcagaggttgcagtgagccgagatcgtgccactgcactccagcctgggcaacagagcgagactccgtctcaaaaaaaagaaaaaaagaaatacatatctaatgttacagattgtggtttattggttaattactatgcatttttttcagtttaaaaaataatcttattttatatacttctctcggtataatttttcatgacatttcagcatgttgataatatgtgtgcatctatttcagtgccttaaagtattttgagagcaatcttttgctgacagttgaagaactgttaatgaaatactgttcattaaaaggatctgtgaaatca

SEQ ID NO: 255473 - DNA, 780 bp, Artificial Sequence
  derived and/or modified sequence
atgaaggacgtggacaacctgaagagcatcaaggaggagtgggtgtgcgagaccggcagcgacaaccagcccctgggcaacaaccagcagagcaactgcgagtacttcgtggacagcctgttcgaggaggcccagaaggtgagcagcaagtgcgtgagccccgccgagcagaagaagcaggtggacgtgaacatcaagctgtggaagaacggcttcaccgtgaacgacgacttcagaagctacagcgacggcgccagccagcagttcctgaacagcatcaagaagggcgagctgcccagcgagctgcagggcatcttcgacaaggaggaggtggacgtgaaggtggaggacaagaagaacgagatctgcctgagcaccaagcccgtgttccagcccttcagcggccagggccacagactgggcagcgccacccccaagatcgtgagcaaggccaagaacatcgaggtggagaacaagaacaacctgagcgccgtgcccctgaacaacctggagcccatcaccaacatccagatctggctggccaacggcaagagaatcgtgcagaagttcaacatcacccacagagtgagccacatcaaggacttcatcgagaagtaccagggcagccagagaagcccccccttcagcctggccaccgccctgcccgtgctgagactgctggacgagaccctgaccctggaggaggccgacctgcagaacgccgtgatcatccagagactgcagaagaccgccagcttcagagagctgagcgagcactag

SEQ ID NO: 255474 - protein, 693 aa, Artificial Sequence
  derived and/or modified sequence
MATSGANGPGSATASASNPRKFSEKIALQKQRQAEETAAFEEVMMDIGSTRLQAQKLRLAYTRSSHYGGSLPNVNQIGSGLAEFQSPLHSPLDSSRSTRHHGLVERVQRDPRRMVSPLRRYTRHIDSSPYSPAYLSPPPESSWRRTMAWGNFPAEKGQLFRLPSALNRTSSDSALHTSVMNPSPQDTYPGPTPPSILPSRRGGILDGEMDPKVPAIEENLLDDKHLLKPWDAKKLSSSSSRPRSCEVPGINIFPSPDQPANVPVLPPAMNTGGSLPDLTNLHFPPPLPTPLDPEETAYPSLSGGNSTSNLTHTMTHLGISRGMGLGPGYDAPGLHSPLSHPSLQSSLSNPNLQASLSSPQPQLQGSHSHPSLPASSLARHVLPTTSLGHPSLSAPALSSSSSSSSTSSPVLGAPSYPASTPGASPHHRRVPLSPLSLLAGPADARRSQQQLPKQFSPTMSPTLSSITQGVPLDTSKLSTDQRLPPYPYSSPSLVLPTQPHTPKSLQQPGLPSQSCSVQSSGGQPPGRQSHYGTPYPPGPSGHGQQSYHRPMSDFNLGNLEQFSMESPSASLVLDPPGFSEGPGFLGGEGPMGGPQDPHTFNHQNLTHCSRHGSGPNIILTGDSSPGFSKEIAAALAGVPGFEVSAAGLELGLGLEDELRMEPLGLEGLNMLSDPCALLPDPAVEESFRSDRLQ

SEQ ID NO: 255475 - DNA, 2082 bp, Artificial Sequence
  derived and/or modified sequence
atggctacatctggcgccaatggccccggaagcgccacagcttctgccagcaaccctagaaagttcagcgagaagattgcgctacagaagcagcgtcaggctgaggaaactgccgcttttgaagaggtcatgatggacatcggttctaccagactgcaggcccagaaactgcggctggcctatactaggagctctcactacggtggcagtctgcccaacgtgaatcaaatcggctctggattggccgaatttcagtcccccctgcattctcctttagattcttcacgctcgacacggcatcatgggctggtggagcgggtacagcgggatccaaggagaatggttagccctctccgacgctataccagacacatcgattctagcccatattctcccgcatatcttagccctcctccagagtcttcttggaggcggactatggcatggggaaactttccggcggagaaaggacagttatttcgcctgccttctgctctgaatcgcacttcatcagactccgccctacataccagcgtcatgaatccctccccacaggatacctacccaggccctactcccccaagtatcctgccaagtcgcagggggggtattctcgacggcgagatggatcccaaagtccctgcaattgaggaaaacctcctggacgataagcacctgttaaaaccatgggatgcaaagaagctttcttcctcctcctccagacctcgctcttgcgaagtgccaggcattaacatttttccgtcaccggatcagccagcaaatgtacctgtcttacctccagcaatgaatactggcggctctctgcccgatcttactaacttgcattttccccctccactacctacaccacttgaccctgaagagacggcatacccgtcgttgtcagggggaaatagcaccagcaacttgacgcataccatgacccatcttggaatttcacgaggcatggggcttgggcctggttacgacgcccccggcctgcattctccactgtcacaccctagcctacagagctcattgtctaatcctaacctgcaggctagcctctcgagcccccagcctcagcttcaggggagccactcccatccatcactccccgcttcatcgctggcccgccatgttctacctacaacctctcttggtcacccctctctctctgcacccgcactgtcctcatcatcaagttcgtcttctacttcctcacccgtgctgggggcgcccagctaccctgcgtccaccccgggcgcctcgcctcaccatagaagggttccgctgagcccactgagtttgctcgccgggccggcagatgcccggagaagccaacaacagctgccgaagcaattttcaccaactatgagtcccaccttatcatctattacccaaggagtgccactcgacacaagcaaattgtctaccgatcagaggctgccaccctacccctactcttccccctccttagtgctccctactcagccccacacgcccaaaagtttgcaacagccagggcttccatctcagagctgctcagttcaaagctccggcgggcaaccacccgggcggcagtctcattatggcaccccctatcctcccgggccttcgggacacggccaacaaagctaccatcggccaatgagtgatttcaatcttgggaatctggaacagttctcaatggaaagcccatctgcctctttggtcctcgatcccccaggcttttctgaaggccctggttttctcggtggagaagggcctatgggtggccctcaggacccccacactttcaatcatcagaacctaacgcactgcagccggcatggcagcgggcccaacatcatcctcacaggagacagttcacctggtttctcaaaagaaatcgccgctgccctggctggagtgcccggttttgaagtgtccgccgctggcctggaactgggtctcggccttgaggatgaactgaggatggagccccttggcctggagggcctgaatatgctgagcgatccctgcgctttgttgcccgacccagctgtcgaggaaagctttcgctctgacagactacagtag

SEQ ID NO: 255476 - DNA, 2082 bp, Artificial Sequence
  derived and/or modified sequence
atggccaccagcggggccaatggacctggcagcgccacagccagcgccagcaaccccaggaagttcagcgagaagatcgccctgcagaagcagaggcaggccgaggagacagctgcctttgaggaggtgatgatggacatcggcagcacccggctgcaggcccagaagctgcggctggcctacaccaggagcagccactatggaggcagcctgcccaacgtgaaccagatcggcagcggcctggccgagttccagagccccctgcacagccccctggacagcagccgcagcaccaggcaccacggcctggtggagcgggtgcagagggaccccaggaggatggtgagccccctgcggcgctacaccaggcacatcgacagcagcccctacagccctgcctacctgagccccccacctgagagctcctggaggaggaccatggcctggggcaacttccctgctgagaagggccagctgttccggctgcccagcgccctgaacagaaccagcagtgacagcgccctgcacacctctgtgatgaaccccagcccccaggacacctacccaggccccaccccacccagcatcctgcccagccggcggggcggcatcctggatggagagatggaccccaaggtgcctgccatcgaggagaacctgctggatgacaagcacctgctgaagccctgggatgccaagaagctgagcagcagcagcagccggcccaggagctgtgaggtgcccggcatcaacatcttccccagcccagaccagcctgccaacgtgcctgtgctgcccccagccatgaacacaggaggcagcctgcctgacctgaccaacctgcacttccccccacccctgcccacccccctggaccctgaggagacagcctaccccagcctgagcggcggcaacagcaccagcaacctgacccacaccatgacccacctgggcatcagccggggcatgggcctgggccctggctatgatgcccctggcctgcacagccccctgagccaccccagcctgcagagcagcctgagcaaccccaacctgcaggccagcctgagcagcccccagccccagctgcagggcagccacagccaccccagcctgcctgccagcagcctggcccggcacgtgctgcccaccaccagcctgggccaccccagcctgagcgccccagccctgagcagcagcagcagcagcagcagcaccagcagccctgtgctgggcgcccccagctacccagccagcacccctggggccagcccccaccaccggcgggtgcccctgagccccctgagcctgctggccggccctgcagatgcccggcgcagccagcagcagctgcccaagcagttcagccccaccatgagccccaccctgagcagcatcacccagggcgtgcccctggacaccagcaagctgagcacagaccagaggctgcccccctacccctacagcagccccagcctggtgctgcccacccagccccacacccccaagagcctgcagcagcccggcctgcccagccagagctgcagcgtgcagagcagcggcggccagcccccaggccggcagagccactacggcaccccctacccacctggccccagcggccacggccagcagagctaccaccggcccatgtctgacttcaacctgggcaacctggagcagttctccatggagagccccagcgccagcctggtgctggaccccccaggcttcagcgagggccctggcttcctgggcggggagggccccatgggcggcccccaggacccccacaccttcaaccaccagaacctgacccactgcagcagacatggcagcggccccaacatcatcctgaccggggacagcagccctggcttcagcaaggagattgctgctgccctggccggcgtgcccggctttgaggtgtctgctgctggcctggagctgggcctgggcctggaggatgagctgaggatggagcccctgggcctggagggcctgaacatgctgagtgacccctgtgccctgctgcctgaccctgctgtggaggagagcttcagaagtgaccggctgcagtag

SEQ ID NO: 255477 - DNA, 2082 bp, Artificial Sequence
  derived and/or modified sequence
atggccaccagcggcgccaacggccccggcagcgccaccgccagcgcttcaaaccccagaaagttttcagaaaagattgcattgcagaagcaaagacaggcagaggagactgccgcctttgaggaggtgatgatggacattggttccacaagactgcaggcccaaaaacttaggctggcctacaccagatctagccattacggagggtcattgccaaatgtcaatcagattgggtcaggcctggcagaattccagagccctctgcattccccactcgactcaagcagatctacacgtcaccatgggctggtggaacgggtccagcgggacccaagaaggatggtttctccactgaggcgctatactcgacacatagattcaagcccctattcgcctgcttatctgtcccctccgcccgagagtagctggcgccgcacgatggcctggggcaactttccagctgagaaaggacaactgttccgcctaccgtctgccctaaatcgtaccagtagcgactctgcactgcatactagcgtgatgaacccttccccccaggatacttaccctggcccaacgccaccatccatccttccatccagaaggggcggtatcttggacggggaaatggaccctaaggtacctgcaatcgaggagaatctcctggacgacaaacacctgctaaagccctgggatgcaaaaaagttgtctagctccagcagcagacctcggtcttgtgaagtcccgggcattaacatcttccctagcccagatcagcctgccaatgtgcccgtattgcctcctgcgatgaataccggcggaagtttacctgacttgaccaatctacatttcccccctccactgcctacacctcttgaccccgaggaaaccgcgtatcctagcctgagtggtgggaattctactagtaatctgactcatactatgactcatctgggtatctctagaggaatgggccttggtcccgggtatgatgcacctggactgcattcgcctctgtctcatccatctctccaatcgagcctgtctaatcctaatctacaagccagcctctcttcccctcagccgcagctccaggggagccattctcacccgagcctcccagcgtcctcactggcacgacacgtgctgccgactacttccttaggccacccctctctctctgcaccagcactgagctcttctagctctagttcttcgactagttcgcctgtactgggcgccccatcctatccggcttcaacccctggtgcttctccccaccatcggagggtgcctctctccccactgtccctcctggccggcccggccgatgcgcgaagaagccagcagcagctcccgaaacagttctcaccaactatgtcgccaactctgtcaagtataacccagggagtgccactggatacaagtaaactgagcactgaccaacggctcccaccctacccatacagttctcctagcctggtattacctacgcagcctcatacacctaagtctctccaacagcccgggctgccaagtcagtcttgtagtgtgcaatctagcggaggccaaccacctggaagacagtcacactacggcacgccctatccacccggcccatcaggacacggtcagcagtcctatcaccgaccaatgtcagatttcaacctggggaacctggaacaattcagcatggagagtccctcggcttctctcgtgttggacccccctggattctctgaagggcctggctttttgggaggtgaggggccaatgggaggcccacaggatcctcataccttcaaccatcagaatctcacacattgcagccggcacgggagtggacccaacatcatcctaacgggggattcatcccctggctttagcaaagagattgctgcagcacttgctggtgtccccggatttgaggtatccgctgccgggctcgaactggggcttggacttgaggacgagctgcgcatggagccactcggattggaaggtcttaatatgctcagtgatccatgcgcactgctaccagaccccgccgttgaggaaagctttcggtctgacagactccagtag

SEQ ID NO: 255478 - DNA, 2082 bp, Artificial Sequence
  derived and/or modified sequence
atggcgacttccggagctaacggccctggtagcgcaactgcctccgcgtccaacccgcgtaaattcagcgagaaaatcgcgttacagaagcagcgtcaagcggaggagaccgccgcattcgaggaagtgatgatggacattgggtcaaccaggctgcaggcgcaaaagctgagacttgcttatacccgctctagtcattatggcggatcactccctaacgtgaaccagattggatccggcttggccgagttccagagtccgctgcacagcccactcgatagctcacgcagtaccaggcatcatggtctggtcgaaagggttcaacgcgacccgaggagaatggtaagcccactccggagatacacacggcacatcgacagctctccttactcgcccgcttatctgtctcctcctcccgagagttcttggcgccgaacaatggcatggggcaatttcccagccgagaagggccagttgttccgcctgccatccgccctaaatcggacgagctctgattccgcactgcatacgagtgtgatgaacccaagcccccaagatacatacccgggaccaacaccacctagcattttgccctcacggagaggcggaattctggatggggagatggatcctaaagtgccagccatcgaggaaaacctgctggatgataagcatttgctgaaaccttgggacgccaagaagttgtcttctagcagctcaaggccccgttcgtgcgaagtacccggaatcaacattttccctagcccagaccaacccgctaatgtgcccgtgcttcctcccgctatgaacaccggcggttcactccccgatttgacaaatctgcactttccccctcctttaccgacacccctggaccccgaagagactgcctaccctagcctaagcggtggtaatagcacaagtaacctaacccatactatgacccacctggggatatccagaggcatgggactcgggcctgggtacgacgcgcctgggcttcactcccccctctcccacccatccctccagagcagtttgagcaaccccaacttacaggccagtctatcctccccgcagccgcagttacagggctcccatagccatccctctctgcctgcctcttctctggctcgacacgtcttacctaccacaagcctcgggcatccctcgctgtccgctcctgctttgagcagttcatcctcatcaagctccacatcctcccctgtgcttggtgccccatcctaccccgcaagtacgccgggagcgtcccctcaccatagacgggtacctctgagccccctcagtcttctcgcagggcctgcagatgccaggcggtcacaacagcagttaccaaagcagttctcgcccactatgtcccctacactgagctccattacacagggcgtgccactcgatacctccaagctctctaccgaccagcgtctgcctccttatccatattcctcaccatcactcgtgctgccaactcagccgcatacacctaagagcctgcagcagcccggattgccaagtcaatcttgctcagtgcagagttcagggggacagcctcccggtcggcagtcacactacgggacgccgtacccccctggaccctcaggacacggtcagcagtcctaccaccgacccatgagcgactttaacctggggaatcttgagcagttctcaatggagtcccccagcgccagccttgtcctggatccgccaggcttcagtgagggccctgggtttcttggcggtgaaggacctatgggaggcccacaggatccccacaccttcaaccatcagaatctgacccactgctcccgacatggttcgggtcccaacataattctgacgggcgattccagcccaggcttcagcaaagaaatcgccgctgccctagcgggtgttccaggctttgaagtttcagcggctggcctggagctaggtctcgggctggaggatgaactccggatggaaccacttggactggaaggcctgaacatgctgtctgacccctgtgccctgttgcctgatccagccgttgaggagtcctttagatctgaccggcttcagtag

SEQ ID NO: 255479 - DNA, 2644 bp, Artificial Sequence
  derived and/or modified sequence
ctaggctggggccgggttcgcggtgctcgctgaggcggcggtggctacggctggaggagccgggccgaggccgcggcggaggccgcggctggtactgggagggtggcagggagggacggggaaggaagatggcgacgtcgggggcgaacgggcctggttcggccacggcctcggcttccaatccgcgcaaatttagtgagaagattgcgctgcagaagcagcgtcaggccgaggagacggcggccttcgaggaggtgatgatggacatcggctccacccggttacaggcccaaaaactgcgactggcatacacaaggagctctcattatggtgggtctctgcccaatgttaaccagattggctctggcctggccgagttccagagccccctccactcacctttggattcatctcggagcactcggcaccatgggctggtggaacgggtgcagcgagatcctcgaagaatggtgtccccacttcgccgatacacccgccacattgacagctctccctatagtcctgcctacttatctcctcccccagagtctagctggcgaaggacgatggcctggggcaatttccctgcagagaaggggcagttgtttcgactaccatctgcacttaacaggacaagctctgactctgcccttcatacaagtgtgatgaaccccagtccccaggatacctacccaggccccacacctcccagcatcctgcccagccgacgtgggggtattctggatggtgaaatggaccccaaagtacctgctattgaggagaacttgctagatgacaagcatttgctgaagccatgggatgctaagaagctatcctcatcctcttcccgacctcggtcctgtgaagtccctggaattaacatctttccatctcctgaccagcctgccaatgtgcctgtcctcccacctgccatgaacacggggggctccctacctgacctcaccaacctgcactttcccccaccactgcccacccccctggaccctgaagagacagcctaccctagcctgagtgggggcaacagtacctccaatttgacccacaccatgactcacctgggcatcagcaggggcatgggcctgggcccaggctatgatgcaccaggacttcattcacctctcagccacccatccctgcagtcctccctaagcaatcccaacctccaggcttccctgagcagtcctcagccccagcttcagggctcccacagccacccctctctgcctgcctcctccttggcccgccatgtactgcccaccacctccctgggccacccctcactcagtgctccggctctctcctcctcctcttcctcctcctccacttcatctcctgttttgggcgccccctcttaccctgcttctacccctggggcctccccccaccaccgccgtgtgcccctcagccccctgagtttgctcgcgggcccagccgacgccagaaggtcccaacagcagctgcccaaacagttttcgccaacaatgtcacccaccttgtcttccatcactcagggcgtccccctggataccagtaaactgtccactgaccagcggttacccccatacccatacagctccccaagtctggttctgcctacccagccccacaccccaaagtctctacagcagccagggctgccctctcagtcttgttcagtgcagtcctcaggtgggcagcccccaggcaggcagtctcattatgggacaccgtacccacctgggcccagtgggcatgggcaacagtcttaccaccggccaatgagtgacttcaacctggggaatctggagcagttcagcatggagagcccatcagccagcctggtgctggatccccctggcttttctgaagggcctggatttttagggggtgaggggccaatgggtggcccccaggatccccacaccttcaaccaccagaacttgacccactgttcccgccatggctcagggcctaacatcatcctcacaggggactcctctccaggtttctctaaggagattgcagcagccctggccggagtgcctggctttgaggtgtcagcagctggattggagctagggcttgggctagaagatgagctgcgcatggagccactgggcctggaagggctaaacatgctgagtgacccctgtgccctgctgcctgatcctgctgtggaggagtcattccgcagtgaccggctccaatgagggcacctcatcaccatccctcttcttggccccatcccccaccaccattcctttcctcccttccccctggcaggtagagactctactctctgtccccagatcctctttctagcatgaatgaaggatgccaagaatgagaaaaagcaaggggtttgtccaggtggcccctgaattctgcgcaagggatgggcctgggggaactcaagggagggcctaaagcacttgtaactttgaaccgtctgtctggaggtcagagcctgttggaaagcaggggtagaggggagccctggaagcagggcttttccggatgcctaggggtgggcagtgccagcccctcctcaccactcttccccttgcagtggaggagagagccagagtggatactattttttattaaatatattattatatgttaataaaaaaatcatatcaaa

SEQ ID NO: 255480 - DNA, 2082 bp, Artificial Sequence
  derived and/or modified sequence
atggccaccagcggcgccaacggccccggcagcgccaccgccagcgccagcaaccccagaaagttcagcgagaagatcgccctgcagaagcagagacaggccgaggagaccgccgccttcgaggaggtgatgatggacatcggcagcaccagactgcaggcccagaagctgagactggcctacaccagaagcagccactacggcggcagcctgcccaacgtgaaccagatcggcagcggcctggccgagttccagagccccctgcacagccccctggacagcagcagaagcaccagacaccacggcctggtggagagagtgcagagagaccccagaagaatggtgagccccctgagaagatacaccagacacatcgacagcagcccctacagccccgcctacctgagccccccccccgagagcagctggagaagaaccatggcctggggcaacttccccgccgagaagggccagctgttcagactgcccagcgccctgaacagaaccagcagcgacagcgccctgcacaccagcgtgatgaaccccagcccccaggacacctaccccggccccaccccccccagcatcctgcccagcagaagaggcggcatcctggacggcgagatggaccccaaggtgcccgccatcgaggagaacctgctggacgacaagcacctgctgaagccctgggacgccaagaagctgagcagcagcagcagcagacccagaagctgcgaggtgcccggcatcaacatcttccccagccccgaccagcccgccaacgtgcccgtgctgccccccgccatgaacaccggcggcagcctgcccgacctgaccaacctgcacttccccccccccctgcccacccccctggaccccgaggagaccgcctaccccagcctgagcggcggcaacagcaccagcaacctgacccacaccatgacccacctgggcatcagcagaggcatgggcctgggccccggctacgacgcccccggcctgcacagccccctgagccaccccagcctgcagagcagcctgagcaaccccaacctgcaggccagcctgagcagcccccagccccagctgcagggcagccacagccaccccagcctgcccgccagcagcctggccagacacgtgctgcccaccaccagcctgggccaccccagcctgagcgcccccgccctgagcagcagcagcagcagcagcagcaccagcagccccgtgctgggcgcccccagctaccccgccagcacccccggcgccagcccccaccacagaagagtgcccctgagccccctgagcctgctggccggccccgccgacgccagaagaagccagcagcagctgcccaagcagttcagccccaccatgagccccaccctgagcagcatcacccagggcgtgcccctggacaccagcaagctgagcaccgaccagagactgcccccctacccctacagcagccccagcctggtgctgcccacccagccccacacccccaagagcctgcagcagcccggcctgcccagccagagctgcagcgtgcagagcagcggcggccagccccccggcagacagagccactacggcaccccctacccccccggccccagcggccacggccagcagagctaccacagacccatgagcgacttcaacctgggcaacctggagcagttcagcatggagagccccagcgccagcctggtgctggacccccccggcttcagcgagggccccggcttcctgggcggcgagggccccatgggcggcccccaggacccccacaccttcaaccaccagaacctgacccactgcagcagacacggcagcggccccaacatcatcctgaccggcgacagcagccccggcttcagcaaggagatcgccgccgccctggccggcgtgcccggcttcgaggtgagcgccgccggcctggagctgggcctgggcctggaggacgagctgagaatggagcccctgggcctggagggcctgaacatgctgagcgacccctgcgccctgctgcccgaccccgccgtggaggagagcttcagaagcgacagactgcagtag

SEQ ID NO: 255481 - protein, 272 aa, Artificial Sequence
  derived and/or modified sequence
MRRSRSSAAAKLRGQKRSGASAAPAASAAAALAPSATRTRRSASQAGSKSQAVEKPPSEKPRLRRSSPRAQEEGPGEPPPPELALLPPPPPPPPTPATPTSSASNLDLGEQRERWETFQKRQKLTSEGAAKLLLDTFEYQGLVKHTGGCHCGAVRFEVWASADLHIFDCNCSICKKKQNRHFIVPASRFKLLKGAEHITTYTFNTHKAQHTFCKRCGVQSFYTPRSNPGGFGIAPHCLDEGTVRSMVTEEFNGSDWEKAMKEHKTIKNMSKE

SEQ ID NO: 255482 - DNA, 819 bp, Artificial Sequence
  derived and/or modified sequence
atgagaagatcccggtcatctgccgctgctaagctgcggggacagaagcgctccggggcatcagcagctcctgctgcatccgcggccgccgctctggcaccctccgctacccgcactaggcgatctgccagtcaggccggttcgaaatcacaggcagttgaaaagcccccttctgaaaagccacgcttgcggaggagctctccccgcgcacaggaggaaggacctggcgagccacccccaccggaattggccctgctccccccacctcccccaccgcccccaacacctgcaaccccgacttcttcagcttctaatctcgacctcggcgaacaaagggagcggtgggaaacgttccagaagcgacagaaactgactagtgagggtgcagctaagctcttgctggacactttcgagtaccagggactggttaaacacacaggaggatgtcactgtggagcagttagattcgaagtctgggcctcagcggatctccatatcttcgactgtaactgctccatatgtaagaagaagcagaatcgccacttcatcgtcccagcctcaaggttcaagttattaaaaggtgctgaacacatcaccacttataccttcaatacccataaagcgcaacataccttttgtaagagatgtggcgtgcaatccttctataccccacgctccaaccctggcggatttggcatcgctccccattgcctggatgagggcaccgttaggagcatggtgactgaggagtttaatgggtctgattgggagaaagctatgaaagagcataagacgatcaaaaatatgtccaaggagtag

SEQ ID NO: 255483 - DNA, 819 bp, Artificial Sequence
  derived and/or modified sequence
atgaggaggagccgcagcagcgctgctgccaagctgcggggccagaagaggtctggggccagcgctgccccagctgccagcgctgctgctgccctggcccccagcgccaccaggacccggcgcagcgccagccaggccggcagcaagagccaggccgtggagaagccacccagcgagaagccccggctgcggcgcagcagcccccgggcccaggaggagggccctggagagcccccacctcctgagctggccctgctgcccccacctcctcctcctccacccaccccagccacccccaccagcagcgccagcaacctggacctgggggagcagcgggagcgctgggagaccttccagaagaggcagaagctgaccagcgagggcgccgccaagctgctgctggacacctttgagtaccagggcctggtgaagcacactggaggctgccactgtggggctgtgcgctttgaggtgtgggccagcgctgacctgcacatctttgactgcaactgcagcatctgcaagaagaagcagaacagacacttcatcgtgcctgccagccgcttcaagctgctgaagggagctgagcacatcaccacctacaccttcaacacccacaaggcccagcacaccttctgcaagagatgtggggtgcagagcttctacacccccaggagcaaccctgggggctttggaattgccccccactgcctggatgagggcaccgtgcgctccatggtgacagaggagttcaacggcagtgactgggagaaggccatgaaggagcacaagaccatcaagaacatgagcaaggagtag

SEQ ID NO: 255484 - DNA, 819 bp, Artificial Sequence
  derived and/or modified sequence
atgcggcggagccggagcagcgccgccgccaagctgcggggccagaagagatccggggcatctgccgcccccgccgcatcagccgcagccgccctggctccatcagccacccggaccaggaggagtgcaagtcaggctggatctaagtcccaagctgtggaaaaacctccatctgaaaagccacgcctgaggaggtcctctcctcgtgcgcaggaagagggtcccggcgaaccacccccccctgaactggctctacttccgccccctccccccccccccccaacgcccgcaacaccgacttcgagtgcatcgaatctcgatttaggcgagcagcgggaaaggtgggagactttccaaaaaaggcagaagttgactagcgagggagccgctaaactgctgctggacacttttgaatatcaaggactcgtaaaacatacaggcggatgtcattgtggagccgtgaggttcgaggtatgggcatcggccgatctccacattttcgactgtaattgtagcatttgcaaaaagaagcagaaccggcatttcatcgtgcccgcttcaaggttcaagcttctgaaaggcgctgagcatattacgacgtatacattcaacacgcacaaggctcaacatacattctgtaagcgatgcggcgtgcaatccttttatacccccaggtcgaaccccggcgggtttgggatcgctccccactgtttggacgaaggtacggtgcgatcaatggtaacagaggagtttaacggttccgactgggagaaagccatgaaagaacataagaccattaaaaatatgtcaaaggagtag

SEQ ID NO: 255485 - DNA, 819 bp, Artificial Sequence
  derived and/or modified sequence
atgagacgtagccgcagctccgccgcagcaaaactccgcggacagaagaggtctggagcgagtgctgcaccagctgcctctgctgcagccgctctcgcccctagtgccacaagaacaagacgatccgcgtctcaggcgggatcgaagtcccaggccgtggagaaacctccttctgaaaagcctagactcagacgtagctcaccacgggcacaagaagaagggcctggcgaaccgccacctcccgagctggccctgctaccaccaccacccccacccccaccgacccctgccacccctacctcgtcagcatctaaccttgacctgggtgaacaacgggaacgctgggaaaccttccagaagcggcagaaactgacctctgagggggcagccaaactgctgctggacacattcgagtaccagggacttgtgaagcataccggtggatgtcattgtggtgccgtgcggtttgaggtttgggcgtccgccgatctgcacatctttgattgcaattgctcaatctgcaagaaaaagcagaaccggcatttcatcgttcccgcatccagattcaagctgctgaagggagcggagcatatcactacgtataccttcaatacgcataaggctcagcacacgttttgcaaaaggtgtggagtgcaatccttttacacccccaggtccaatcccggaggatttggcattgcgcctcactgcttggacgaaggcaccgtccgatccatggtcacggaagagtttaacggctcagattgggaaaaggcaatgaaggaacacaagacaataaagaacatgtctaaggaatag

SEQ ID NO: 255486 - DNA, 1165 bp, Artificial Sequence
  derived and/or modified sequence
ggcgcgcgcaggccggcgggggcgcgccgcgctgcgaggcctgcgcgccaggctgcgggagccatgcggcgatcgaggagctctgcggccgccaagctgcgcgggcagaagcggtccggggcctccgcggcccccgcggcctccgcggccgctgccttggcacccagcgccacccgcacacggcgctccgctagccaggccgggagcaagagccaggcggtggagaagccgccgtcggagaagccgcggctgaggcgctcgtcgccgcgggcccaggaggagggcccgggggagccgccgccgcctgagctggcgttgctcccgccaccgccgccgccgccgccgactcccgcgaccccgacgtcctcggcgtccaacctggacctgggcgagcagcgggagcgctgggagacgttccagaagcggcagaagcttacctccgagggtgccgccaagctcctgctagacacctttgaataccagggcctggtgaagcacacaggaggctgccactgtggagcagttcgttttgaagtttgggcctcagcagacttgcatatatttgactgcaattgcagcatttgcaagaagaagcagaatagacacttcattgttccagcttctcgcttcaagctcctgaagggagctgagcacataacgacttacacgttcaatactcacaaagcccagcataccttctgtaagagatgtggcgttcagagcttctatactccacgatcaaaccccggaggcttcggaattgccccccactgcctggatgagggcactgtgcggagtatggtcactgaggaattcaatggcagcgattgggagaaggccatgaaagagcacaagaccatcaagaacatgtctaaagagtgagcttctgcctctcctgccctgaaaaggaggaatgattggggccagcaactttgctctccctgccgtgcctcggtggtgctcctgaatgtggctgacctgggctgctggttccgttgactagggtcatcttgatctctgcagtttgctccagctaccagtttctttaggcagctctttgtcctccctctgcccagattttgatgtagtctaattgacatccttctcttcccaacttttgtgtgatcttttaggaaaaaaaataaatatttttaacattaaagca

SEQ ID NO: 255487 - DNA, 819 bp, Artificial Sequence
  derived and/or modified sequence
atgagaagaagcagaagcagcgccgccgccaagctgagaggccagaagagaagcggcgccagcgccgcccccgccgccagcgccgccgccgccctggcccccagcgccaccagaaccagaagaagcgccagccaggccggcagcaagagccaggccgtggagaagccccccagcgagaagcccagactgagaagaagcagccccagagcccaggaggagggccccggcgagccccccccccccgagctggccctgctgccccccccccccccccccccccccacccccgccacccccaccagcagcgccagcaacctggacctgggcgagcagagagagagatgggagaccttccagaagagacagaagctgaccagcgagggcgccgccaagctgctgctggacaccttcgagtaccagggcctggtgaagcacaccggcggctgccactgcggcgccgtgagattcgaggtgtgggccagcgccgacctgcacatcttcgactgcaactgcagcatctgcaagaagaagcagaacagacacttcatcgtgcccgccagcagattcaagctgctgaagggcgccgagcacatcaccacctacaccttcaacacccacaaggcccagcacaccttctgcaagagatgcggcgtgcagagcttctacacccccagaagcaaccccggcggcttcggcatcgccccccactgcctggacgagggcaccgtgagaagcatggtgaccgaggagttcaacggcagcgactgggagaaggccatgaaggagcacaagaccatcaagaacatgagcaaggagtag

SEQ ID NO: 255488 - protein, 890 aa, Artificial Sequence
  derived and/or modified sequence
MKSRQKGKKKGSAKERVFGCDLQEHLQHSGQEVPQVLKSCAEFVEEYGVVDGIYRLSGVSSNIQKLRQEFESERKPDLRRDVYLQDIHCVSSLCKAYFRELPDPLLTYRLYDKFAEAVGVQLEPERLVKILEVLRELPVPNYRTLEFLMRHLVHMASFSAQTNMHARNLAIVWAPNLLRSKDIEASGFNGTAAFMEVRVQSIVVEFILTHVDQLFGGAALSGGEVESGWRSLPGTRASGSPEDLMPRPLPYHLPSILQAGDGPPQMRPYHTIIEIAEHKRKGSLKVRKWRSIFNLGRSGHETKRKLPRGAEDREDKSNKGTLRPAKSMDSLSAAAGASDEPEGLVGPSSPRPSPLLPESLENDSIEAAEGEQEPEAEALGGTNSEPGTPRAGRSAIRAGGSSRAERCAGVHISDPYNVNLPLHITSILSVPPNIISNVSLARLTRGLECPALQHRPSPASGPGPGPGLGPGPPDEKLEASPASSPLADSGPDDLAPALEDSLSQEVQDSFSFLEDSSSSEPEWVGAEDGEVAQAEAAGAAFSPGEDDPGMGYLEELLGVGPQVEEFSVEPPLDDLSLDEAQFVLAPSCCSLDSAGPRPEVEEENGEEVFLSAYDDLSPLLGPKPPIWKGSGSLEGEAAGCGRQALGQGGEEQACWEVGEDKQAEPGGRLDIREEAEGTPQPPQPEEMEPEGQPSPDGCLCPCSLGLGGVGMRLASTLVQVQQVRSVPVVPPKPQFAKMPSAMCSKIHVAPANPCPRPGRLDGTPGERAWGSRASRSSWRNGGSLSFDAAVALARDRQRTEAQGVRRTQTCTEGGDYCLIPRTSPCSMISAHSPRPLSCLELPSEGAEGSGSRSRLSLPPREPQVPDPLLSSQRRSYAFETQANPGKGEGL

SEQ ID NO: 255489 - DNA, 2673 bp, Artificial Sequence
  derived and/or modified sequence
atgaaaagtcgacagaagggtaaaaaaaaaggcagtgccaaggagagggtgtttgggtgcgacctccaggagcatttgcaacattccggtcaggaggttccacaggtactgaaatcatgtgcagagttcgttgaggagtacggcgtggtcgacggaatctatcggctgtctggcgtgtccagtaatatccagaaactcagacaggagtttgaatctgagaggaagcctgacctccgaagggacgtgtacctgcaggatattcactgcgtgagctcactctgcaaggcgtacttccgcgaactgcccgaccctcttttaacctaccgtctgtatgacaagttcgcagaggccgttggggtacagttggagcctgaaaggctggtcaaaatactggaggtacttagggagctgccagttccaaattaccggacccttgaatttcttatgcggcacctcgtccacatggcatcctttagcgctcagaccaatatgcacgctcggaacttagcaatcgtctgggctccaaacctgctacgttcgaaagacattgaagcctctgggttcaatgggaccgccgcctttatggaagtcagagtccagtccatcgtcgttgagtttattctgactcacgtggatcaactatttggcggagcagccctttcaggcggtgaagtcgagagcggctggcgtagtctgcccggtacacgggcatctgggagccctgaggatctgatgcccagacctctaccgtatcacctcccatccatcctccaggctggtgatggaccacctcagatgaggccttaccatacaattatagagattgctgagcacaagcgcaaggggagcttgaaagtcagaaagtggcgctctatttttaacctcgggcgcagcggccacgaaactaagcgcaagttgccacgtggagcagaggatcgggaagacaagagcaataagggtaccctgagaccggcaaaatccatggattctctctccgcggctgcaggcgcctctgacgagcccgagggcttggttggcccctccagcccacggccttcgccattgctgcccgagtccctcgagaatgacagtatagaagcggccgagggcgagcaggaaccggaagcagaggctctgggggggaccaatagtgagcccggtactcctagagctgggagatctgctattagagctggtggtagttccagagccgagcgttgcgccggcgtgcatatcagtgatccctacaacgtcaatctgccactacacataaccagtatcttgtctgtccccccaaacatcattagtaacgtgtcactggcccgactcacaaggggcctagaatgcccagccctgcaacaccggccatctccagcgtctgggcctggcccaggcccgggcttagggccaggaccccctgacgagaaactggaagctagccctgcctcgtctcccctggccgattctggccccgacgacctggcaccagctttggaggattctttgagccaagaggtacaggattcctttagcttcctcgaggatagcagtagctctgagcccgagtgggttggcgccgaggatggcgaggttgctcaggcagaggcagcaggagccgcattcagccctggtgaggatgaccccggtatgggatacctcgaggagcttctaggagtaggcccccaagtagaggaattttccgtcgagccccctctcgacgacctgtcactggacgaagcccagtttgtgctggctccaagttgctgtagcttggactccgccggcccacgccccgaggtggaggaggaaaatggtgaggaggtttttctgagtgcctacgatgacttatccccgctgctgggcccaaagcctcctatatggaaaggctccggctcattagagggcgaggcagcaggctgtgggagacaggcgctgggacagggcggagaggaacaggcatgctgggaagtaggcgaggataaacaagccgagcctggcggacggctggatatccgtgaagaagcggaaggcactccccagcccccccagccagaagagatggagcccgaggggcagccatctcccgacggttgcttatgcccttgttctcttggcttaggcggcgtcggaatgagacttgccagtaccctggtacaagtgcagcaggtacggtctgtgcccgtagtgcccccaaaaccccagttcgcaaagatgcccagcgcaatgtgctcaaagatccacgtggctcccgccaatccctgcccacgccccggccgcttagatggcaccccaggggaacgagcgtggggctcacgggcctcaaggtcttcctggcggaatgggggatccctgtccttcgacgccgctgttgccctagctcgtgacagacagcgaacagaggcccagggagttcgtcggacacagacctgtaccgagggtggagattattgcttgatcccccgtacaagcccgtgcagcatgatatccgcccattcacctaggcctttgagctgcctggagttaccatccgaaggagccgagggatcgggtagtcgctcaaggttatctctgccccccagggaacctcaggttccggaccctttactatcctctcaacgacgcagctatgcctttgagacccaggctaacccaggaaagggagagggactctag

SEQ ID NO: 255490 - DNA, 1500 bp, Artificial Sequence
  derived and/or modified sequence
atgagacacctggtccacatggcaagcttttccgcccagaccaacatgcatgcaagaaatctggccatcgtgtgggccccaaatctgctgagatctaaagatatcgaggcctccggcttcaatggcacagctgcttttatggaggtccgagtgcaaagtattgtagttgagtttatactgacccacgttgatcagcttttcgggggagcagcattgtccgggggtgaagtggaatcgggctggcgatcactaccagggactcgggcctccgggagtcccgaggaccttatgccccgcccattgccataccacctaccgtccatcctgcaggcaggcgacggaccacctcaaatgaggccgtaccataccatcatagaaatagctgaacacaagaggaaggggagtcttaaagttagaaagtggcgctcaatttttaatttgggccgctccggccacgaaaccaaaaggaaattgcctaggggggccgaagatagagaagacaagtcaaataagggtactctgagaccggccaaaagtatggactctctgagtgctgccgctggagcttccgatgaacctgaaggtctcgtagggccaagtagcccccgccctagtcctctcctcccagaaagtttggagaatgacagcatcgaggctgcagagggcgagcaggagcctgaggccgaggccctgggaggaacaaacagcgaacccggaacccctagagccggcagatcagcaattagggccggcgggtcaagtagggctgaacggtgtgcaggcgtgcacataagtgatccgtacaatgttaaccttcccttgcacatcacctctatcctgtccgtgccgcccaacataatcagcaatgtctctctggctcggctaacacggggccttgaatgtcctgctctgcagcaccggccctcccctgccagtggaccaggacctggccctggacttggccctggccctcctgatgaaaaactagaagccagtcctgcctccagtccactcgccgacagtggccctgacgacttggcaccagcacttgaggatagtctgtctcaggaagttcaggatagttttagttttctggaggactcttcctcatccgaacccgaatgggtgggtgcggaggatggagaagtcgctcaagccgaggccgccggggccgcatttagtccaggggaggacgaccctggaatgggatacctcgaggaactcctgggggtgggcccacaggtggaggagttttccgtggagccaccactggacgacctctctctcgatgaagctcagtttgtcctcgcgcccagctgctgcagcctcgattctgctggacctagaccggaggttgaggaggaaaacggcgaggaagtgtttctcagtgcttatgatgacctctctcccgccttggggctgctactgcagcccgggtggggacatcggtcgcatagttctgaaggacaatgtttgagaattaaggcagtatttctgtag

SEQ ID NO: 255491 - DNA, 2673 bp, Artificial Sequence
  derived and/or modified sequence
atgaagagccggcagaagggcaagaagaagggcagcgccaaggagcgggtgtttggctgtgacctgcaggagcacctgcagcacagcggccaggaggtgccccaggtgctgaagagctgtgccgagtttgtggaggagtatggagtggtggatggcatctaccgcctgtctggagtgagcagcaacatccagaagctgcggcaggagtttgagagcgagaggaagccagacctgcggagagatgtgtacctgcaggacatccactgtgtgagcagcctgtgcaaggcctacttccgggagctgcctgaccccctgctgacctaccgcctgtatgacaagtttgctgaggccgtgggcgtgcagctggagcctgagcggctggtgaagatcctggaggtgctgcgggagctgcctgtgcccaactaccgcaccctggagttcctgatgaggcacctggtgcacatggccagcttcagcgcccagaccaacatgcacgccaggaacctggccatcgtgtgggcccccaacctgctgcggagcaaggacatcgaggccagcggcttcaatggaacagctgccttcatggaggtgcgggtgcagagcatcgtggtggagttcatcctgacccacgtggaccagctgtttggaggagctgccctgtctggaggagaggtggagagcggctggaggagcctgcccggcacccgggccagcggcagccctgaggacctgatgccccggcccctgccctaccacctgcccagcatcctgcaggccggagatggccccccccagatgaggccctaccacaccatcattgaaattgctgagcacaagaggaagggcagcctgaaggtgaggaagtggaggagcatcttcaacctgggccgcagcggccacgagaccaagaggaagctgcccagaggagcagaagatcgggaggacaagagcaacaagggcaccctgcggcctgccaagtccatggacagcctgtctgctgctgctggggccagtgatgagcctgagggcctggtgggccccagcagcccccggcccagccccctgctgcctgagagcctggagaatgacagcattgaagctgctgagggggagcaggagcctgaggccgaggccctgggcggcaccaacagcgagcccggcacccccagggctggccgcagcgccatccgggccggcggcagcagcagagctgagcgctgtgccggcgtgcacatcagtgacccctacaacgtgaacctgcccctgcacatcaccagcatcctgtctgtgccccccaacatcatcagcaatgtgtccctggcccggctgacccggggcctggagtgcccagccctgcagcaccggcccagccctgccagcggccctggccctggccctggcctgggccctggccccccagatgagaagctggaggccagccctgccagcagccccctggccgacagcggcccagatgacctggccccagccctggaggacagcctgagccaggaggtgcaggacagcttctccttcctggaggacagcagcagcagcgagcctgagtgggtgggcgcagaagatggagaggtggcccaggccgaggccgccggggccgccttcagccctggagaagatgaccccggcatgggctacctggaggagctgctgggcgtgggcccccaggtggaggagttctctgtggagccccccctggatgacctgagcctggatgaggcccagtttgtgctggcccccagctgctgcagcctggacagcgctggccccaggcctgaggtggaggaggagaatggagaggaggtgttcctgagcgcctatgatgacctgagccccctgctgggccccaagccacccatctggaagggcagcggcagcctggagggggaggccgccggctgcggccggcaggccctgggccagggcggggaggagcaggcctgctgggaggtgggggaggacaagcaggccgagcccggcggccgcctggacatccgggaggaggccgagggcaccccccagcccccccagcctgaggagatggagcctgagggccagcccagcccagatggctgcctgtgcccctgcagcctgggcctgggcggcgtgggcatgaggctggccagcaccctggtgcaggtgcagcaggtgcgctctgtgcctgtggtgccccccaagccccagtttgccaagatgcccagcgccatgtgcagcaagatccacgtggccccagccaacccctgccccaggcctggccgcctggatggcaccccaggagagcgggcctggggcagccgggccagccgcagctcctggagaaatggaggcagcctgagctttgatgctgctgtggccctggcccgggaccggcagaggacagaggcccagggcgtgcggaggacccagacctgcacagaaggaggagactactgcctgatccccaggaccagcccctgcagcatgatcagcgcccacagcccccggcccctgagctgcctggagctgcccagcgagggcgctgagggcagcggcagccgcagccggctgagcctgcccccccgggagccccaggtgcctgaccccctgctgagcagccagaggaggagctatgcctttgagacccaggccaaccctgggaagggggagggcctgtag

SEQ ID NO: 255492 - DNA, 1500 bp, Artificial Sequence
  derived and/or modified sequence
atgaggcacctggtgcacatggccagcttcagcgcccagaccaacatgcacgccaggaacctggccatcgtgtgggcccccaacctgctgcggagcaaggacatcgaggccagcggcttcaatggaacagctgccttcatggaggtgcgggtgcagagcatcgtggtggagttcatcctgacccacgtggaccagctgtttggaggagctgccctgtctggaggagaggtggagagcggctggaggagcctgcccggcacccgggccagcggcagccctgaggacctgatgccccggcccctgccctaccacctgcccagcatcctgcaggccggagatggccccccccagatgaggccctaccacaccatcattgaaattgctgagcacaagaggaagggcagcctgaaggtgaggaagtggaggagcatcttcaacctgggccgcagcggccacgagaccaagaggaagctgcccagaggagcagaagatcgggaggacaagagcaacaagggcaccctgcggcctgccaagtccatggacagcctgtctgctgctgctggggccagtgatgagcctgagggcctggtgggccccagcagcccccggcccagccccctgctgcctgagagcctggagaatgacagcattgaagctgctgagggggagcaggagcctgaggccgaggccctgggcggcaccaacagcgagcccggcacccccagggctggccgcagcgccatccgggccggcggcagcagcagagctgagcgctgtgccggcgtgcacatcagtgacccctacaacgtgaacctgcccctgcacatcaccagcatcctgtctgtgccccccaacatcatcagcaatgtgtccctggcccggctgacccggggcctggagtgcccagccctgcagcaccggcccagccctgccagcggccctggccctggccctggcctgggccctggccccccagatgagaagctggaggccagccctgccagcagccccctggccgacagcggcccagatgacctggccccagccctggaggacagcctgagccaggaggtgcaggacagcttctccttcctggaggacagcagcagcagcgagcctgagtgggtgggcgcagaagatggagaggtggcccaggccgaggccgccggggccgccttcagccctggagaagatgaccccggcatgggctacctggaggagctgctgggcgtgggcccccaggtggaggagttctctgtggagccccccctggatgacctgagcctggatgaggcccagtttgtgctggcccccagctgctgcagcctggacagcgctggccccaggcctgaggtggaggaggagaatggagaggaggtgttcctgagcgcctatgatgacctgagccctgccctgggcctgctgctgcagcccggctggggccacaggagccacagcagcgagggccagtgcctgcgcatcaaggctgtgttcctgtag

SEQ ID NO: 255493 - DNA, 2673 bp, Artificial Sequence
  derived and/or modified sequence
atgaagagccggcagaagggcaagaagaagggcagcgccaaggagagggtcttcggatgcgacttgcaggagcatctccagcacagtggccaagaagttccccaggtgctcaagagttgtgccgagtttgtggaggagtatggcgtggttgacggcatataccgcctctcaggggtttcttctaacattcagaaactaaggcaggagttcgagtccgaaagaaagcctgacttgagacgcgacgtgtacctccaagacatccactgtgtctcttccctttgcaaggcctattttcgggagttgcccgacccactgttgacatacaggctgtatgacaagtttgccgaggctgtaggggtccagttggagcccgagcgtttggttaaaattctagaggtcctgagagaacttcccgtgccaaattacagaacacttgagttcttgatgcgccacctggtccatatggcttccttctctgcacagacaaatatgcacgcgagaaatttagctattgtttgggctcctaacctgctccgaagtaaggacatagaagccagcggctttaacggcacagccgcatttatggaagtccgggttcagtcaatcgtcgtggagttcattctgacccacgtggaccagctgttcggcggcgccgccctgagtgggggagaagtagagtctggatggcggtccttgccggggacgcgagcttccggttcccccgaggacctgatgcctaggccactgccttatcacctgccttctattctgcaggccggtgacggcccgccgcagatgcgcccataccataccattattgagatagcagaacacaaaaggaagggatcattgaaggttaggaagtggcgaagtatattcaatctgggtcgcagtgggcatgagaccaagcgcaagcttccaagaggggcggaagaccgggaagataagtccaacaaaggcactctgcggcctgcaaagtccatggactcgctgtccgcagctgccggagcctcggacgagcctgagggactcgtcggaccgagcagtccccgtccaagcccactgctccctgaatcattagaaaacgactccattgaagccgcagagggtgagcaagagccagaggctgaggccctggggggaaccaacagcgagcccggcacaccacgagccggaagaagtgccataagggctggcggctcgagcagagccgaacgttgcgctggagtacatatttccgatccatacaatgtgaatttgcctctccacattactagcatcttgagtgtgccgcccaatattatctccaatgtctcactggctaggctcactcgcggcctcgagtgtccagcgctacagcatcgaccatcccccgcctccgggccgggtccgggcccaggccttgggccaggcccaccagatgaaaagctcgaagccagtcccgcgtcctcccccttagctgattccggccctgacgatttggcccccgccctggaggattccctgagccaagaggtacaggacagctttagctttttggaggacagctcttcaagcgagcctgaatgggtgggcgccgaggatggtgaggtggcgcaagcagaggcagccggcgctgctttttcccctggagaagatgaccccggcatggggtacctagaggaacttctgggcgtcggaccccaagtggaagaattttctgtggaacccccgttagacgacctcagcctggatgaggcccaattcgtgttggcgccaagctgctgcagtcttgacagcgccggtccccgccccgaggtggaagaggaaaacggcgaagaggtttttctgtctgcctatgatgatctatcgcctctgctgggacccaaacctcctatctggaaaggatccgggagtctggagggcgaggcagcaggatgtggaagacaggctttgggacaggggggggaagagcaggcatgctgggaggtcggtgaagataagcaagccgagccaggagggaggctggacattcgcgaggaggccgaaggaaccccccagccccctcaacctgaggagatggaacctgaagggcagccatcacctgatggctgcctgtgcccatgttcactcggtttgggtggagtcgggatgaggctggcgtctacgcttgtgcaggttcagcaggttcgttcagttccggtcgtcccgcctaaaccccagttcgccaaaatgccttccgcaatgtgttcaaagatccacgttgcaccagccaatccttgccccagacctggtcgcctggacgggacaccgggcgagagggcctgggggagtcgggccagtaggtcctcttggcggaacgggggctccttgtcgtttgatgctgcagtggcactggcacgcgacagacaaagaactgaggcccagggagtgcggcgaacacaaacttgcacagaagggggagactactgtcttattcctcgcacgagcccgtgttctatgatctcggctcactcccctcgccctctctcatgtctggaattgcctagtgaaggcgctgagggctccggctcaaggagtaggctgagcctccccccgagggagccacaggtgccagaccccctgctgtccagccaaaggcgcagttacgcattcgagacgcaagcaaatcccggaaagggagagggcctgtag

SEQ ID NO: 255494 - DNA, 1500 bp, Artificial Sequence
  derived and/or modified sequence
atgcggcacctggtgcacatggccagcttcagcgcccagaccaacatgcatgccaggaacctggcaattgtctgggcgccaaaccttctcaggtccaaggatattgaggccagcgggttcaacgggaccgctgcatttatggaggtgcgcgtccagtcgatcgtggtagagttcattctcacacacgtggatcaactgtttggaggagccgccctgtctggtggcgaggtcgagtctggttggcgttcattgccaggtactcgcgccagtggatcccccgaagatctgatgcctcgaccattgccctaccatcttccatccattctacaggcaggtgatggaccaccccagatgcggccatatcacaccattattgagattgcagaacataagaggaagggaagtctgaaagtaaggaaatggcgatccatttttaacttagggcgcagtggccacgagaccaaacggaagttacctcgcggcgcagaggatcgagaggataagtcaaacaagggaaccctacgacctgcaaagtctatggatagcttgtctgcagcagctggtgcctcagacgaacctgagggactcgtgggaccgagcagcccgcgaccctcgccgttactgcctgaatcactcgaaaatgactctattgaggccgcggaaggcgagcaggaaccagaggcggaagcactggggggtacaaactcagaaccagggactccacgggccggaagaagcgccatccgggctggcggatcgagtagagcggaacgttgtgcgggtgtgcacatttctgatccttacaacgtaaacctaccccttcacatcacgagtattctctctgttccaccaaatataatttccaacgtgtcactggcaagactgacccggggccttgaatgtccggccctgcagcatcgacctagtcccgcctccgggcccggtcctgggccagggctcggcccagggcctccggacgagaagctggaggcatctcctgctagttccccgctggctgactctgggccggatgatctcgcacccgctttagaagattccctgtcccaggaggtgcaggattccttcagttttctcgaagactcatcctcctctgagcctgagtgggtgggcgctgaagacggagaggttgcccaggccgaagcagctggagccgccttctcacctggcgaggacgatcctggcatgggctatctcgaggaactgctgggcgttggcccacaggtggaagagttttctgtggaacctccactggatgatctgtctctcgatgaagcacagtttgtgctcgccccaagctgctgttcactggactccgctgggccaaggcccgaggtggaagaggagaacggcgaggaagtgtttctgtcagcctacgacgatctctcccctgccttaggactgctcttgcaaccaggatgggggcaccgcagtcacagctccgagggccagtgtctgagaatcaaggccgtgtttctgtag

SEQ ID NO: 255495 - DNA, 2673 bp, Artificial Sequence
  derived and/or modified sequence
atgaagtcaagacagaaaggaaagaagaaagggtctgcaaaagagcgggttttcggctgcgacctccaggagcacctccaacatagtgggcaggaggtcccacaagttctgaaatcatgcgccgaattcgttgaggaatacggtgtcgtagacggcatctatcgactgtcaggtgtatctagcaatattcagaagttgcggcaagagttcgagtctgagaggaaacccgatcttaggcgggatgtctacctgcaggatatccattgcgtcagctcattgtgcaaggcgtactttagagaactgcctgacccccttttgacgtatcgtctgtatgataagttcgctgaagcagtcggcgttcagctggagcctgaacgtttggtgaaaatccttgaggtgctccgggaacttccggtccccaactaccggaccctggagtttctgatgaggcatctcgttcatatggccagtttctctgcacagacaaacatgcatgcaagaaaccttgctattgtttgggccccaaatttgcttagatcgaaagatattgaggctagtgggtttaatggaaccgctgcttttatggaggtgcgagtacaaagcatcgttgtggaatttatcctaacacacgtagatcagttattcggtggcgctgcactatcgggaggggaggtggagtctggatggaggtccctccccggaactagagcctcgggttctcctgaggacctgatgcctcgccctctgccctaccacttgccaagtatacttcaggcaggagacggccctcctcagatgcggccataccacactatcatcgaaattgcagagcataagcggaaaggatccctaaaagtgcgaaagtggcggtccatctttaacctgggcagatctggccacgagaccaaacgaaagctcccccgaggcgcagaggacagggaggacaagagtaataaaggaacactgcgccctgccaaatctatggactcactttcagccgcagctggagcctcagatgagcccgagggcctggtcggaccgtccagtccgaggccctcccctctactgcccgagtctttggagaatgattccatagaagcagcagagggagagcaagaacctgaagccgaggctctcggaggtacgaattctgaaccaggtactccacgcgcaggcaggtctgctatccgcgctggagggagctctcgtgccgaaagatgtgctggagttcacattagtgacccctacaatgtgaatctcccactgcacatcacatctatccttagtgtcccccctaacattatctctaatgtcagtttggccaggctcaccagaggactggagtgcccggcacttcagcaccgtccctcccctgcaagcggcccaggcccagggcctggtcttggtcctggacctccagacgagaagcttgaagcctcccctgccagctcccctctggccgactctggtccagatgatctcgctcccgctttggaggatagtttgagtcaggaagtgcaggacagcttcagctttctggaagacagctcttcttctgaacccgaatgggtgggggctgaagatggagaagtggcacaagccgaggcggcaggcgctgccttttcacccggtgaggacgatccagggatgggttacctggaagagctcctcggcgtgggcccacaagttgaggaattcagtgtggaaccacctttggatgacttgagtctggatgaggcacaatttgtgctggctcctagctgctgctccctagacagcgctgggccaaggcctgaggtggaagaggagaatggcgaggaggtcttcctatccgcctacgacgatctcagccccctgctgggccctaagcccccaatctggaaggggagtgggtcactggagggcgaggcagccggatgtggccgtcaagccctagggcaggggggagaggagcaggcctgttgggaagtgggcgaggacaagcaggcggagcccggaggcagactggatatcagggaggaggctgaggggacccctcaacctccacagccggaggaaatggagcccgaaggccagccatcccccgacggatgtttgtgtccctgttctttagggcttggcggagtcggcatgcgcctcgcctccacattggtccaggtacagcaggtgagaagtgtgcccgtagttcctcccaaaccccaatttgccaagatgccatcagccatgtgtagcaaaattcacgtggcaccagctaatccatgccccaggcccggtagacttgacggaacacctggtgagcgcgcatggggatccagagcttccaggtcctcgtggaggaatgggggttcattgagctttgacgctgcagtcgcccttgctagagacaggcaacgaaccgaagcgcaaggggtccgacgaacccagacatgcactgaaggcggtgattactgtttgattccgagaacctctccatgtagcatgatctctgcccacagtccgaggcctttgtcctgtctggagctacctagtgaaggtgccgaaggttcggggtcaagaagtaggctgtcactgccacccagagagccccaggtccccgatcctctgctatcgtcgcagcgcagatcatatgccttcgagactcaggccaatcctggaaagggtgagggactgtag

SEQ ID NO: 255496 - DNA, 1500 bp, Artificial Sequence
  derived and/or modified sequence
atgaggcatctcgtgcacatggcctcattctcagctcagaccaacatgcacgcaagaaatctggctattgtctgggcgccaaacctactcaggtcaaaggacattgaggcctccggatttaacgggactgctgcgttcatggaggtaagggtccagagcatagttgttgaattcattctgactcatgtggaccagttgtttggtggagcagccctgtcgggaggcgaagtcgaatcaggatggcgatccctgcctggaacaagagcatcaggtagcccagaagacctaatgcccagaccgctcccctaccatttgccttctatcctgcaggccggtgacggacccccacagatgaggccttatcacacgataatcgaaattgccgagcacaaaagaaagggatccctgaaggtccggaaatggcgctccatcttcaaccttgggcgttccggccacgagaccaagagaaaattgccacggggagcagaggaccgggaagacaaatctaacaaaggtactctcagacccgcaaagtcaatggactctctgtccgctgccgcaggagcctccgatgaacccgaggggctggtggggcctagtagcccccgacctagtcccctactcccagaaagtctggagaacgactctatcgaagcagcggagggtgagcaagaaccggaagccgaggccttagggggtaccaactctgaacctgggacccctcgggcagggaggtctgcgatccgcgctgggggttcttctagagccgaacggtgtgcaggagtgcacatctcagacccctataacgtcaatttgccgctgcacatcactagcatcttgtctgtgcctcctaatatcatctccaatgtgtcgctggcacggctaactcgcggactggaatgtcccgcactgcaacaccggccatccccggctagtggtcccggtccgggtcctggtctcgggcctgggccacccgacgagaagttggaggcctctcctgctagctcccctctggcagacagcggcccagatgatttagctcccgctctcgaggattccctgagccaggaagtccaagacagcttctcttttttagaggattcgtcctcgtcggaaccagaatgggtgggagcagaggatggtgaggtggcacaggcagaagccgcaggagccgctttctcccctggggaggatgaccccggaatgggctatctcgaggaactgcttggagtcggccctcaggtagaggaattcagtgtcgaaccccctctggacgatttgtcactggatgaagctcaatttgtgcttgccccttcttgctgcagtctagatagtgctgggcctaggcccgaggtggaggaggaaaacggcgaggaggtcttcctgagtgcctatgacgatctcagccctgcacttgggctacttctgcagcccggatgggggcaccgctcccacagttcagaaggacaatgtctgcgaatcaaggctgtttttctgtag

SEQ ID NO: 255497 - DNA, 3482 bp, Artificial Sequence
  derived and/or modified sequence
gggggatagaggtgaccgggccagtgccctggggctctggccatgaagtctcggcagaaaggaaagaagaagggcagcgcaaaggagcgggtttttgggtgcgacttgcaggagcacctgcagcactcaggccaggaggtgccccaggtgctaaagagctgtgcagaatttgtggaggagtatggagtggtggatgggatctaccgcctctcaggggtctcctccaacatccagaagcttcggcaggaatttgagtcagagcggaagccagacctgcgtcgggatgtttacctccaagacattcactgcgtctcctccctgtgcaaggcctatttcagagaactgccggatcccctgctcacttaccggctctatgacaagtttgctgaggctgtaggagtgcaattggaacctgagcgcttggtcaagatcctagaggtgcttcgggaactccctgtcccaaactacaggaccctggagttcctcatgaggcacttggtacacatggcctcattcagtgcccagaccaacatgcatgctcgcaacctggccatcgtgtgggctcccaacctgctgaggtctaaggacatagaggcctcaggcttcaatgggacagcggccttcatggaggtgcgggtacaatccatcgtcgtggagttcatcctcacacacgtggaccagctctttgggggtgctgccctctctggtggtgaggtggagagtgggtggcgatcgcttccagggacccgggcatcaggcagccccgaggaccttatgcccaggccactgccttatcacctgcctagcatactgcaggctggcgatggacccccacagatgcggccctaccatactatcatcgagattgcagagcacaagaggaaggggtctttgaaggtcaggaagtggaggtctatcttcaatttaggtcgctctggccatgagactaagcgtaaacttccacggggggctgaggacagggaggataaatccaacaaggggacactgcggccagccaaaagcatggactcactgagtgctgcagctggggccagtgatgagccagaggggctggtggggcccagcagcccccggccaagcccattgctgcctgagagcttggagaacgattctatagaggcagcagagggtgaacaggagcctgaggcagaagcactgggtggcacaaactctgaaccaggcacaccacgagctgggcggtcagccatccgggctgggggcagcagccgtgcagaacgctgtgctggtgtccacatctcagacccctacaatgtcaacctcccgctacacatcacctctatcctcagtgtgcccccgaacatcatctctaacgtttccttggccaggctcacccgtggccttgagtgccctgctctacagcaccggccaagccctgcctctggccctggccctggccctggccttggccctggccccccagatgaaaagttggaagcaagtccagcctcaagtcccctggcagactcaggcccagacgacttggctcctgccctggaggactcgctgtcccaggaggtgcaggactccttctccttcctagaggactcaagcagctcagaacctgagtgggtgggggcagaggatggggaggtggcccaggcagaagcagcaggagcagccttctcccctggggaggacgaccctgggatgggctacctggaggagctcctgggagttgggcctcaggtggaggagttctctgtggagccacccctggatgacctgtctctggatgaggcacagtttgtcttggcccccagctgctgttccctggactccgctggccccaggcctgaagttgaggaggaaaatggggaggaagttttcctgagtgcctatgatgacctaagtccccttctgggacctaaacccccaatctggaagggttcagggagtctggagggagaggcagcaggatgtggaaggcaggctctgggacagggtggggaagagcaggcatgctgggaagttggggaggacaagcaggctgagcctggaggcaggctagacatcagggaagaggcagagggaaccccacagccacctcagccagaggagatggagcctgaggggcagcccagtccagacggctgtctatgcccctgttctcttggcctgggtggcgtgggcatgcgtctagcttccactctggttcaggtccaacaggtccgctctgtgcctgtggtgccccccaagccacagtttgccaagatgcccagtgcaatgtgtagcaagattcatgtggcacctgcaaatccatgcccgaggcctggccggcttgatgggactcctggagaaagggcttgggggtcccgagcttctcgatcctcttggaggaatgggggtagtctttcctttgatgctgctgtggccctagcccgggaccgccaaaggactgaggctcaaggagttcggcgaacccagacctgtactgagggtggggattactgcctcatccccagaacctccccttgtagcatgatctctgcccattctcctcggccccttagctgcctggagctcccatctgaaggtgcagaagggtctggatcccggagtcgtcttagtctgccccccagagaaccccaggttcctgaccccctgttgtcctctcagcgcaggtcatatgcatttgaaacacaggctaaccctgggaaaggtgaaggactgtgattaggaccacagccctgggcaaaggggaccagcaagttgtcttgaatctccagggttcctgactagctgtctcctctgcagcatgagcagctgtagtgcccaactctataggctttggccctccagcttctctctttgactgtgggaggcactgccttggttggtttacctgaacttgtctccgacacaaagcacttatctcttaggagattcccaagaaagtcaacaagatcttgttcccagggagtgggtcattggccaaagggaacataaggtaggcagaaaacttaaaagagtttgttaaagtgaagactggagaaattcctcccttcctctgagctgtgaatctctcttcatgaaagccaaaggtagagacagggaggacagggccaggttagggccttccacacacaaacacttctagagttgcccattcctgttatgttcttggaccctaagatacctcctgtcccttttaaatccagattaagagaaacgtccaggaagagctctttgaagccctcaatatttgttggagggactggactcctctccagctccccaccctctgcctccagtcaccatgtgcaagagaggtcctgtacagatctctctgggctctcctttctcctttggaataacttgttcctatttcaggaaagggaaatggtgtcactcaggccctgggactgcttctccagccaggctggggccacaggtcccactctagtgaaggtcaatgtctcagaataaaagctgtattttta

SEQ ID NO: 255498 - DNA, 2287 bp, Artificial Sequence
  derived and/or modified sequence
gcaaagatgctctaacaggaagtgggttaaggagctgcactgcttcctgccccctaaagctgagcggggcgaggagggcgagtgccaggctgggccacgagacacaggacacaatttcttgccagggtcctggtagcttcctcttcaacagccacttccgtgtggccggggccccaggggcaggagctgctgcccgttgcccaggccaccctccacccccaattgggagccctgcccccctggggccgggccaagcccagcagctggctgggatcccatgggggactggtagggcacaggtcttgggggatagaggtgaccgggccagtgccctggggctctggccatgaagtctcggcagaaaggaaagaagaagggcagcgcaaaggagcgggtttttgggtgcgacttgcaggagcacctgcagcactcaggccaggaggtgccccaggtgctaaagagctgtgcagaatttgtggaggagtatggagtggtggatgggatctaccgcctctcaggggtctcctccaacatccagaagcttcggcaggaatttgagtcagagcggaagccagacctgcgtcgggatgtttacctccaagacattcactgcgtctcctccctgtgcaaggcctatttcagagaactgccggatcccctgctcacttaccggctctatgacaagtttgctgaggctgtaggagtgcaattggaacctgagcgcttggtcaagatcctagaggtgcttcgggaactccctgtcccaaactacaggaccctggagttcctcatgaggcacttggtacacatggcctcattcagtgcccagaccaacatgcatgctcgcaacctggccatcgtgtgggctcccaacctgctgaggtctaaggacatagaggcctcaggcttcaatgggacagcggccttcatggaggtgcgggtacaatccatcgtcgtggagttcatcctcacacacgtggaccagctctttgggggtgctgccctctctggtggtgaggtggagagtgggtggcgatcgcttccagggacccgggcatcaggcagccccgaggaccttatgcccaggccactgccttatcacctgcctagcatactgcaggctggcgatggacccccacagatgcggccctaccatactatcatcgagattgcagagcacaagaggaaggggtctttgaaggtcaggaagtggaggtctatcttcaatttaggtcgctctggccatgagactaagcgtaaacttccacggggggctgaggacagggaggataaatccaacaaggggacactgcggccagccaaaagcatggactcactgagtgctgcagctggggccagtgatgagccagaggggctggtggggcccagcagcccccggccaagcccattgctgcctgagagcttggagaacgattctatagaggcagcagagggtgaacaggagcctgaggcagaagcactgggtggcacaaactctgaaccaggcacaccacgagctgggcggtcagccatccgggctgggggcagcagccgtgcagaacgctgtgctggtgtccacatctcagacccctacaatgtcaacctcccgctacacatcacctctatcctcagtgtgcccccgaacatcatctctaacgtttccttggccaggctcacccgtggccttgagtgccctgctctacagcaccggccaagccctgcctctggccctggccctggccctggccttggccctggccccccagatgaaaagttggaagcaagtccagcctcaagtcccctggcagactcaggcccagacgacttggctcctgccctggaggactcgctgtcccaggaggtgcaggactccttctccttcctagaggactcaagcagctcagaacctgagtgggtgggggcagaggatggggaggtggcccaggcagaagcagcaggagcagccttctcccctggggaggacgaccctgggatgggctacctggaggagctcctgggagttgggcctcaggtggaggagttctctgtggagccacccctggatgacctgtctctggatgaggcacagtttgtcttggcccccagctgctgttccctggactccgctggccccaggcctgaagttgaggaggaaaatggggaggaagttttcctgagtgcctatgatgacctaagtcctgccctgggactgcttctccagccaggctggggccacaggtcccactctagtgaaggtcaatgtctcagaataaaagctgtattttta

SEQ ID NO: 255499 - DNA, 2673 bp, Artificial Sequence
  derived and/or modified sequence
atgaagagcagacagaagggcaagaagaagggcagcgccaaggagagagtgttcggctgcgacctgcaggagcacctgcagcacagcggccaggaggtgccccaggtgctgaagagctgcgccgagttcgtggaggagtacggcgtggtggacggcatctacagactgagcggcgtgagcagcaacatccagaagctgagacaggagttcgagagcgagagaaagcccgacctgagaagagacgtgtacctgcaggacatccactgcgtgagcagcctgtgcaaggcctacttcagagagctgcccgaccccctgctgacctacagactgtacgacaagttcgccgaggccgtgggcgtgcagctggagcccgagagactggtgaagatcctggaggtgctgagagagctgcccgtgcccaactacagaaccctggagttcctgatgagacacctggtgcacatggccagcttcagcgcccagaccaacatgcacgccagaaacctggccatcgtgtgggcccccaacctgctgagaagcaaggacatcgaggccagcggcttcaacggcaccgccgccttcatggaggtgagagtgcagagcatcgtggtggagttcatcctgacccacgtggaccagctgttcggcggcgccgccctgagcggcggcgaggtggagagcggctggagaagcctgcccggcaccagagccagcggcagccccgaggacctgatgcccagacccctgccctaccacctgcccagcatcctgcaggccggcgacggccccccccagatgagaccctaccacaccatcatcgagatcgccgagcacaagagaaagggcagcctgaaggtgagaaagtggagaagcatcttcaacctgggcagaagcggccacgagaccaagagaaagctgcccagaggcgccgaggacagagaggacaagagcaacaagggcaccctgagacccgccaagagcatggacagcctgagcgccgccgccggcgccagcgacgagcccgagggcctggtgggccccagcagccccagacccagccccctgctgcccgagagcctggagaacgacagcatcgaggccgccgagggcgagcaggagcccgaggccgaggccctgggcggcaccaacagcgagcccggcacccccagagccggcagaagcgccatcagagccggcggcagcagcagagccgagagatgcgccggcgtgcacatcagcgacccctacaacgtgaacctgcccctgcacatcaccagcatcctgagcgtgccccccaacatcatcagcaacgtgagcctggccagactgaccagaggcctggagtgccccgccctgcagcacagacccagccccgccagcggccccggccccggccccggcctgggccccggcccccccgacgagaagctggaggccagccccgccagcagccccctggccgacagcggccccgacgacctggcccccgccctggaggacagcctgagccaggaggtgcaggacagcttcagcttcctggaggacagcagcagcagcgagcccgagtgggtgggcgccgaggacggcgaggtggcccaggccgaggccgccggcgccgccttcagccccggcgaggacgaccccggcatgggctacctggaggagctgctgggcgtgggcccccaggtggaggagttcagcgtggagccccccctggacgacctgagcctggacgaggcccagttcgtgctggcccccagctgctgcagcctggacagcgccggccccagacccgaggtggaggaggagaacggcgaggaggtgttcctgagcgcctacgacgacctgagccccctgctgggccccaagccccccatctggaagggcagcggcagcctggagggcgaggccgccggctgcggcagacaggccctgggccagggcggcgaggagcaggcctgctgggaggtgggcgaggacaagcaggccgagcccggcggcagactggacatcagagaggaggccgagggcaccccccagcccccccagcccgaggagatggagcccgagggccagcccagccccgacggctgcctgtgcccctgcagcctgggcctgggcggcgtgggcatgagactggccagcaccctggtgcaggtgcagcaggtgagaagcgtgcccgtggtgccccccaagccccagttcgccaagatgcccagcgccatgtgcagcaagatccacgtggcccccgccaacccctgccccagacccggcagactggacggcacccccggcgagagagcctggggcagcagagccagcagaagcagctggagaaacggcggcagcctgagcttcgacgccgccgtggccctggccagagacagacagagaaccgaggcccagggcgtgagaagaacccagacctgcaccgagggcggcgactactgcctgatccccagaaccagcccctgcagcatgatcagcgcccacagccccagacccctgagctgcctggagctgcccagcgagggcgccgagggcagcggcagcagaagcagactgagcctgccccccagagagccccaggtgcccgaccccctgctgagcagccagagaagaagctacgccttcgagacccaggccaaccccggcaagggcgagggcctgtag

SEQ ID NO: 255500 - DNA, 1500 bp, Artificial Sequence
  derived and/or modified sequence
atgagacacctggtgcacatggccagcttcagcgcccagaccaacatgcacgccagaaacctggccatcgtgtgggcccccaacctgctgagaagcaaggacatcgaggccagcggcttcaacggcaccgccgccttcatggaggtgagagtgcagagcatcgtggtggagttcatcctgacccacgtggaccagctgttcggcggcgccgccctgagcggcggcgaggtggagagcggctggagaagcctgcccggcaccagagccagcggcagccccgaggacctgatgcccagacccctgccctaccacctgcccagcatcctgcaggccggcgacggccccccccagatgagaccctaccacaccatcatcgagatcgccgagcacaagagaaagggcagcctgaaggtgagaaagtggagaagcatcttcaacctgggcagaagcggccacgagaccaagagaaagctgcccagaggcgccgaggacagagaggacaagagcaacaagggcaccctgagacccgccaagagcatggacagcctgagcgccgccgccggcgccagcgacgagcccgagggcctggtgggccccagcagccccagacccagccccctgctgcccgagagcctggagaacgacagcatcgaggccgccgagggcgagcaggagcccgaggccgaggccctgggcggcaccaacagcgagcccggcacccccagagccggcagaagcgccatcagagccggcggcagcagcagagccgagagatgcgccggcgtgcacatcagcgacccctacaacgtgaacctgcccctgcacatcaccagcatcctgagcgtgccccccaacatcatcagcaacgtgagcctggccagactgaccagaggcctggagtgccccgccctgcagcacagacccagccccgccagcggccccggccccggccccggcctgggccccggcccccccgacgagaagctggaggccagccccgccagcagccccctggccgacagcggccccgacgacctggcccccgccctggaggacagcctgagccaggaggtgcaggacagcttcagcttcctggaggacagcagcagcagcgagcccgagtgggtgggcgccgaggacggcgaggtggcccaggccgaggccgccggcgccgccttcagccccggcgaggacgaccccggcatgggctacctggaggagctgctgggcgtgggcccccaggtggaggagttcagcgtggagccccccctggacgacctgagcctggacgaggcccagttcgtgctggcccccagctgctgcagcctggacagcgccggccccagacccgaggtggaggaggagaacggcgaggaggtgttcctgagcgcctacgacgacctgagccccgccctgggcctgctgctgcagcccggctggggccacagaagccacagcagcgagggccagtgcctgagaatcaaggccgtgttcctgtag

SEQ ID NO: 255501 - protein, 292 aa, Artificial Sequence
  derived and/or modified sequence
MGNELFLAFTTSHLPLAEQKLARYKLRIVKPPKLPLEKKPNPDKDGPDYEPNLWMWVNPNIVYPPGKLEVSGRRKREDLTSTLPSSQPPQKEEDASCSEAAGVESLSQSSSKRSPPRKRFAFSPSTWELTEEEEAEDQEDSSSMALPSPHKRAPLQSRRLRQASSQAGRLWSRPPLNYFHLIALALRNSSPCGLNVQQIYSFTRKHFPFFRTAPEGWKNTVRHNLCFRDSFEKVPVSMQGGASTRPRSCLWKLTEEGHRRFAEEARALASTRLESIQQCMSQPDVMPFLFDL

SEQ ID NO: 255502 - DNA, 879 bp, Artificial Sequence
  derived and/or modified sequence
atgggtaatgaactgttcctggcttttaccacgagccacctccctctcgccgaacaaaagcttgcacgttacaagctgaggatagtgaagccaccgaaactgcctttggagaaaaagccaaatccggacaaggacggccccgactatgagcctaatctttggatgtgggtgaacccaaacattgtttatcctcccggcaagttggaggtttccggtcggaggaagcgcgaggacttaaccagcaccctccctagtagtcagccaccacagaaagaagaagatgcttcatgcagtgaggcagctggggtggaaagcctgtctcagtcgagctctaagagatcccccccccgaaaacgttttgcttttagcccaagtacatgggagttaaccgaggaggaggaagcagaggatcaagaagatagctcaagtatggctttgccttcaccccacaagcgcgcgccacttcagtcacggaggcttagacaggcatcatctcaagcagggcggctctggagcaggccgccacttaattacttccacctgatcgctctggccttgcgtaactcgtcaccctgcggactcaatgttcagcagatatactcctttacaaggaaacactttccgttttttcgaacagcccccgagggctggaaaaacaccgtgcgccacaatctctgttttcgcgacagttttgagaaggtacccgtgagcatgcaagggggggcttcaacgaggccccgatcatgtctgtggaagttgaccgaagaggggcacaggcgtttcgccgaggaggcaagggccctcgcttccaccaggcttgagagcatacaacagtgtatgtcccagcctgacgtgatgccttttttatttgacctgtag

SEQ ID NO: 255503 - DNA, 879 bp, Artificial Sequence
  derived and/or modified sequence
atgggaaatgaactcttcctggccttcaccaccagccacctgcccctggccgagcagaagctggcccgctacaagctgcgcatcgtgaagccacccaagctgcccctggagaagaagcccaacccagacaaggatggccctgactatgagcccaacctgtggatgtgggtgaaccccaacatcgtgtacccacctgggaagctggaggtgtctggaagaaggaagcgggaggacctgaccagcaccctgcccagcagccagcccccccagaaggaggaggatgccagctgcagcgaggccgccggcgtggagagcctgagccagagcagcagcaagaggagcccccccaggaagagatttgccttcagccccagcacctgggagctgacagaggaggaggaggccgaggaccaggaggacagcagctccatggccctgcccagcccccacaagagggcccccctgcagagccggcggctgcggcaggccagcagccaggccggccgcctgtggagccggccccccctgaactacttccacctgattgccctggccctgaggaacagcagcccctgtggcctgaatgtgcagcagatctacagcttcaccaggaagcacttccccttcttcagaacagcccctgagggctggaagaacacagtgcgccacaacctgtgcttccgggacagctttgagaaggtgcctgtgtccatgcagggcggggccagcacccggcccaggagctgcctgtggaagctgacagaggagggccacagaagatttgctgaggaggcccgggccctggccagcacccggctggagagcatccagcagtgcatgagccagccagatgtgatgcccttcctgtttgacctgtag

SEQ ID NO: 255504 - DNA, 879 bp, Artificial Sequence
  derived and/or modified sequence
atgggcaacgagctgttcctggccttcaccaccagccacctgcccctggcggagcagaagctggcacgatacaagttgcgtatcgtcaaaccaccaaagctccctctggagaaaaaacccaatccagacaaggacggccctgattatgaacctaatctctggatgtgggtgaaccccaacattgtatatccacctggcaagttggaggtcagtggccgtcgtaaacgagaagacctgactagcaccctgcccagtagccagcctccccagaaagaagaggacgcctcctgttctgaagcggccggggtggaatccctgtcccaatcttcttcgaagcgctccccccctcgcaagagatttgcttttagcccaagcacgtgggaattgaccgaggaggaggaggccgaggatcaggaggattcgtccagtatggcactgccaagcccacacaaaagggcccctctgcaatcacggcgattgcggcaggccagctcccaggcagggaggctgtggagcagacctcctctaaattactttcacctaattgccttagccctgcgaaatagcagcccatgcggcctcaacgtgcagcaaatctattccttcactcgaaaacattttccattctttcgaacagcaccagaaggttggaaaaatacagttcggcacaatctgtgcttcagggattcttttgagaaagttcctgtaagcatgcaaggaggagcttcaaccaggccacggtcatgtctgtggaagctgacagaggagggtcatagacgcttcgccgaggaggctcgcgctctggcctctactaggctggaaagcattcagcagtgcatgtcgcagccagatgtgatgccttttctgttcgatttgtag

SEQ ID NO: 255505 - DNA, 879 bp, Artificial Sequence
  derived and/or modified sequence
atggggaacgaactcttccttgcatttaccacctcacacctgccgctggcagagcagaagttggctcgatacaagctccgcattgtcaaaccaccaaagttgcctctggagaagaaacccaaccccgataaggacgggcctgactatgagccaaatttgtggatgtgggtgaatccaaacatcgtgtaccctccaggaaagctggaagtgagtggtaggcgtaagagagaagatctaactagcacgttaccaagcagccagcccccacaaaaagaggaagacgccagctgcagcgaggcagcaggtgtggagagcctgtcccaaagttcctccaagcggtcccctcccaggaaaaggtttgccttttccccctctacttgggaacttacggaagaggaggaggccgaggaccaggaggactctagctctatggctctgccttccccccacaaacgggctcctcttcagtcccgacgcttgcggcaagcttcatctcaagcaggtcgactttggtctcgacctcccctcaattactttcatctgatagccttggcccttaggaatagctcaccctgcgggttgaacgtgcagcaaatttactcttttacccgtaaacacttccctttcttcaggactgctcctgagggatggaaaaataccgtgcgtcacaatttatgctttcgagattcctttgagaaggtgcccgtgtcaatgcaaggaggcgcatcaacccgaccgcgtagttgtctttggaaactgaccgaagagggtcacagacggttcgccgaagaagcccgagcactcgcctctacccgcctcgagtcaatccagcagtgtatgtctcagccagacgttatgccgtttcttttcgatctgtag

SEQ ID NO: 255506 - DNA, 1159 bp, Artificial Sequence
  derived and/or modified sequence
aaatggaccgctccacacctgagctgccgccaagctaactcaatccgagccggcgcatttgagaaggcgcctgtgagggtcgctcctcagccgccgcgctcccactccgcgtccccactccgcgccgccgcgcctctgccagccccgaaggtggacgtgaagctccaacacctcgacttctgggcccgcctccatggccaggtcccgggactgctggactgggacatggggaacgagctctttctggccttcaccacatctcacctccccttagcggagcagaaacttgccaggtataaactccgaattgttaagccaccaaaattacccctagagaaaaaacccaaccctgataaggatggtccagattatgagcccaacctctggatgtgggtaaatcccaacattgtgtatccccctggaaagctggaggtctcaggacgtaggaagagggaggacctgacaagcacactcccctcctctcagccaccccagaaggaggaagatgccagctgctcagaggccgcaggggtggaatcactgtcccagtcctccagcaagcggtctccccctcggaagcggtttgccttttcccccagcacctgggagctcacagaagaggaggaggctgaggaccaggaagacagctcctctatggctctcccatcccctcacaaaagggcccccctccagagtcggaggcttcggcaagccagcagccaggcggggaggctctggtcccggccccctctcaattacttccacctaattgccctggcattaagaaacagttccccctgtggcctcaacgtgcaacagatctacagtttcactcgaaagcacttcccctttttccggacggccccggaaggctggaagaatactgtccgtcacaatctctgttttcgagacagctttgagaaagtgcctgtcagcatgcagggcggggccagcacacggcctcgatcttgcctctggaagttgaccgaggagggacaccgccgctttgcggaggaggcccgcgccttggcttccactcggctagaaagtatccaacagtgcatgagccagccagatgtgatgcccttcctctttgatctttaaccccaagaagcaacagccagctaatgctttattaaaattaccctcactagccttc

SEQ ID NO: 255507 - DNA, 879 bp, Artificial Sequence
  derived and/or modified sequence
atgggcaacgagctgttcctggccttcaccaccagccacctgcccctggccgagcagaagctggccagatacaagctgagaatcgtgaagccccccaagctgcccctggagaagaagcccaaccccgacaaggacggccccgactacgagcccaacctgtggatgtgggtgaaccccaacatcgtgtacccccccggcaagctggaggtgagcggcagaagaaagagagaggacctgaccagcaccctgcccagcagccagcccccccagaaggaggaggacgccagctgcagcgaggccgccggcgtggagagcctgagccagagcagcagcaagagaagcccccccagaaagagattcgccttcagccccagcacctgggagctgaccgaggaggaggaggccgaggaccaggaggacagcagcagcatggccctgcccagcccccacaagagagcccccctgcagagcagaagactgagacaggccagcagccaggccggcagactgtggagcagaccccccctgaactacttccacctgatcgccctggccctgagaaacagcagcccctgcggcctgaacgtgcagcagatctacagcttcaccagaaagcacttccccttcttcagaaccgcccccgagggctggaagaacaccgtgagacacaacctgtgcttcagagacagcttcgagaaggtgcccgtgagcatgcagggcggcgccagcaccagacccagaagctgcctgtggaagctgaccgaggagggccacagaagattcgccgaggaggccagagccctggccagcaccagactggagagcatccagcagtgcatgagccagcccgacgtgatgcccttcctgttcgacctgtag

SEQ ID NO: 255508 - protein, 530 aa, Artificial Sequence
  derived and/or modified sequence
MAALRRLLWPPPRVSPPLCAHQPLLGPWGRPAVTTLGLPGRPFSSREDEERAVAEAAWRRRRRWGELSVAAAAGGGLVGLVCYQLYGDPRAGSPATGRPSKSAATEPEDPPRGRGMLPIPVAAAKETVAIGRTDIEDLDLYATSRERRFRLFASIECEGQLFMTPYDFILAVTTDEPKVAKTWKSLSKQELNQMLAETPPVWKGSSKLFRNLKEKGVISYTEYLFLLCILTKPHAGFRIAFNMFDTDGNEMVDKKEFLVLQEIFRKKNEKREIKGDEEKRAMLRLQLYGYHSPTNSVLKTDAEELVSRSYWDTLRRNTSQALFSDLAERADDITSLVTDTTLLVHFFGKKGKAELNFEDFYRFMDNLQTEVLEIEFLSYSNGMNTISEEDFAHILLRYTNVENTSVFLENVRYSIPEEKGITFDEFRSFFQFLNNLEDFAIALNMYNFASRSIGQDEFKRAVYVATGLKFSPHLVNTVFKIFDVDKDDQLSYKEFIGIMKDRLHRGFRGYKTVQKYPTFKSCLKKELHSR

SEQ ID NO: 255509 - DNA, 1593 bp, Artificial Sequence
  derived and/or modified sequence
atggccgccctgagaagactgctgtggcccccccccagagtgagcccccccctgtgcgcccaccagcccctgctgggcccctggggcagacccgccgtgaccaccctgggcctgcccggcagacccttcagcagcagagaggacgaggagagagccgtggccgaggccgcctggagaagaagaagaagatggggcgagctgagcgtggccgccgccgccggcggcggcctggtgggcctggtgtgctaccagctgtacggcgaccccagagccggcagccccgccaccggcagacccagcaagagcgccgccaccgagcccgaggacccccccagaggcagaggcatgctgcccatccccgtggccgccgccaaggagaccgtggccatcggcagaaccgacatcgaggacctggacctgtacgccaccagcagagagagaagattcagactgttcgccagcatcgagtgcgagggccagctgttcatgaccccctacgacttcatcctggccgtgaccaccgacgagcccaaggtggccaagacctggaagagcctgagcaagcaggagctgaaccagatgctggccgagaccccccccgtgtggaagggcagcagcaagctgttcagaaacctgaaggagaagggcgtgatcagctacaccgagtacctgttcctgctgtgcatcctgaccaagccccacgccggcttcagaatcgccttcaacatgttcgacaccgacggcaacgagatggtggacaagaaggagttcctggtgctgcaggagatcttcagaaagaagaacgagaagagagagatcaagggcgacgaggagaagagagccatgctgagactgcagctgtacggctaccacagccccaccaacagcgtgctgaagaccgacgccgaggagctggtgagcagaagctactgggacaccctgagaagaaacaccagccaggccctgttcagcgacctggccgagagagccgacgacatcaccagcctggtgaccgacaccaccctgctggtgcacttcttcggcaagaagggcaaggccgagctgaacttcgaggacttctacagattcatggacaacctgcagaccgaggtgctggagatcgagttcctgagctacagcaacggcatgaacaccatcagcgaggaggacttcgcccacatcctgctgagatacaccaacgtggagaacaccagcgtgttcctggagaacgtgagatacagcatccccgaggagaagggcatcaccttcgacgagttcagaagcttcttccagttcctgaacaacctggaggacttcgccatcgccctgaacatgtacaacttcgccagcagaagcatcggccaggacgagttcaagagagccgtgtacgtggccaccggcctgaagttcagcccccacctggtgaacaccgtgttcaagatcttcgacgtggacaaggacgaccagctgagctacaaggagttcatcggcatcatgaaggacagactgcacagaggcttcagaggctacaagaccgtgcagaagtaccccaccttcaagagctgcctgaagaaggagctgcacagcagatag

SEQ ID NO: 255510 - DNA, 3992 bp, Artificial Sequence
  derived and/or modified sequence
gttctctgccccctcccagctctggtgtgggcggcctccgctatggctgcgctgcgaaggctcttgtggccgccaccccgggtgtctcctccactctgcgctcaccagcccctccttgggccgtgggggcggcctgcggtgaccaccctgggccttcctggccggcccttctcctcccgagaggatgaggagagggctgtggcggaggcggcatggaggcggcggcggcgctggggggagctgagcgtggcggcggcggccggcggggggctggtcggcctggtatgctaccagctgtacggggaccccagggccggctcgccggcgaccgggcgaccctcaaagagcgcggccacggagcccgaggacccgccccgcggccgggggatgctgcccatcccagtggcggctgccaaggagacggttgctattggcagaacagacattgaagacttagacctttatgccacatctcgggagaggcgatttcgtttatttgcttctatagaatgtgaagggcagttattcatgactccgtatgattttattttggctgttacaacagatgagcccaaagttgccaaaacttggaagtcactttccaaacaggaattaaatcaaatgctcgcagaaacaccaccagtttggaaaggctcatcgaagctatttcgaaatcttaaagaaaaaggtgtgatttcttacacagaatatctttttcttttatgtattttaacaaagccacatgcagggttcagaatagctttcaacatgtttgacactgatggcaatgagatggtggataaaaaagagtttttggtgcttcaagagatattcaggaaaaaaaatgaaaagagagaaattaaaggagatgaagaaaagcgtgcaatgctgcgtcttcaactttatggataccattctcctactaatagtgtacttaaaacagatgctgaggaacttgtctccagaagctattgggatacactgagacgtaacacaagccaagcactgttttcagacctcgcagagcgtgctgatgacatcacaagtttagtaacagatactacacttcttgtacacttttttggaaagaaaggaaaagctgagctcaactttgaagatttttatagattcatggataatctccaaacagaagttctagaaatagaattcctttcctactcaaatggaatgaataccatcagtgaagaagattttgctcatattcttttacgatatacaaatgtggaaaatacatcagtatttttagaaaatgtgcgttacagtatacctgaagaaaagggcatcacatttgatgaattcaggtcatttttccagtttttaaacaacctagaagactttgcaatagccctgaatatgtataactttgcaagtcgttctatagggcaagatgaatttaaacgtgccgtctatgtagctactggactcaaattttcaccacatttagtgaacactgtcttcaagatttttgatgttgacaaagatgatcaattaagttataaagaatttattggaattatgaaagacagactccatagaggattccggggttataaaacagtccagaagtaccccactttcaaatcctgcctgaagaaagaacttcacagcagataaatactcctaaaacaaagtttaaaggattactatctgtgtgacaaataacaagaagcaacattttgagaatggaagcaggtctgaggtcagaagaagtagagaatgaaggaaaaggtgaatgctatgaaattgatattttttctggaactgaattcttaaacataaaacagataaaatgcatcttgttactacaaatgttatatatataaaatcaagttgagctttgccttgatttgctgaactctctgcactttttcattcccttcagaagtatatagatacttccggtgactacatatgaatgtactttcaatattatttttttatttattcattagaaattttcctcatttcaaaataatttatgactcatggaatgttgatcgcctaaaaatgaacatcgcattttctttgattttggactgtgaacttattttcagagatgaatattgcttgagatttataatacccttagaattaaattcctgttatttgcccagtttttaattacactgagataattttgaaaagaaatagaaattaagctactatataaaacaattgtttacgtgtacttttaacttttaaaagtacttaattaacatatgttgtttgacttgtataaagtttttaaaaattgttgtttatttgccaaagtcaacagaatgtctgttattgttttatgtatacggtaaagaaatttaaagtgtagaattttcctcccccaaaaagtcatgtgttgatagtagaagcagtggtagttgttgtaacagtaatcattgtcattgtcattatcttcttaaacatgaagctgctcctgatcataggtggtacacgttaataacactagtaaaaataacgtcttacactctgtaacttactgcatattgttaatgtatgtctagcatcaaatgagtattgtaaaagactaatataaaatggtttataagactgatgtatatattaagtagaagctaatatttttgtttcttgcaaaaggaccacttgaaaagtgatgctaaacagccagtaataataatttaaatataatttattatttcaaaagaatatgtcttaaaagggaaaataaaaactttctgttgaatcacaacaaaattagatttgtacatagagaaacaatttgataatacttaatagaaatctgttcaattaaaaatgcttagtttatacaaagatactacacaaaaatagaacaattagtctgaattaacgtatttacatattgcatatggaagataagttcatttatcttcctttctaagacatatttaatgtaggttacatacactccaactattactttgcttttgcatatgaaactagaaaacactgactttgtttttataagttattaaatgtgaaattgatctgcatcagcttatttataaaagtaatgttatttccaagaaaatgttactcttagcattgattttgtatgttagactttttacattgtttatctaatattatttatgacagtaattttaaaatatattattcataagttcaaggatcccatatagtataagaatataatttcacttgctttgaaagttgatttaattgactgactaaatgaaaatgcctacccactcatataacatacctcaggtctattttaccttacactgaatgttcttaatatgatttggtacctaaagtaattgaaaaaaatgcagtttcctttaatccttgactataagttatactatgttgcgtacatggcaaatcctgcaaatatagattaaaaattaaattagcccattgaaatcctttataattctgtcattttcccaaggaagaatagcattgtacatatgcaatctttattttattctttattgcttatcagagtgagtggatgaaaacatttgtaaggctgcaacataatattaaaatgtgaataaataaatgttctgataaaatagaaaagaaagtaaattacagtgatttccatcatattatcactcttgaattttatcatctataaaatgagagataaaaatatctcactgaattgttacttatatcaatttaaaatttgctagtggtttgaaaataataatgtactgactacatgtatgctgttattgtcagtgtttccttctataaactgttctttggaaaaattaagttatacataaaattcatattaaactttttacagaaagcatacatgataaacagtttatggtacttctcagaatcatttcataataagcaatttatttagcttaagttccaacttactgttcttattataaattgcaaagcaacctgtcttacattcttacattatcttaaaataaatatttctgcccttgaatcaagaaaca

SEQ ID NO: 255511 - DNA, 1593 bp, Artificial Sequence
  derived and/or modified sequence
atggccgccctgcgaagactgctgtggccaccacctcgcgtctccccccctttgtgtgcccatcaaccccttctagggccatggggccgcccagcggtcacaacgctggggctgcctggccggcccttctcttcgagggaggacgaggagcgcgcagtagctgaagcagcgtggagacgccgaagaagatggggtgagttaagcgtggccgcagcagccggaggcggcctggttggactagtatgctatcagctttatggggaccctagagctgggagtcccgcaacaggtcgaccctccaagagcgcagcaaccgagcctgaagaccccccacggggccgggggatgttaccaatcccagtggccgcggctaaggagaccgtcgccatcggcagaaccgacatagaggacttagatctgtacgccactagtcgcgagcggcgatttcgcctgttcgcaagcatagaatgtgaaggtcagctatttatgactccctatgattttatcttagcagtcactacagacgagcccaaggtggccaaaacctggaagagtttgagcaagcaggagctgaatcaaatgctggccgaaacgcctcccgtttggaagggaagctctaagttattcagaaacctgaaggagaagggcgttatcagttataccgaatacctgtttttgctgtgtatcttgacaaagcctcacgcaggttttcggattgcgttcaatatgttcgacacagatggaaacgagatggtggataaaaaagagttcctggtcctgcaggagatcttccgaaaaaaaaatgaaaagcgcgagattaagggcgacgaagaaaaaagggctatgcttcgtctgcagctctatgggtatcattccccaactaattcggtcctcaaaaccgacgccgaggaactcgtgtctcgaagctactgggacacactgcgccgaaacacctcccaggcgctgttctctgacttggctgagcgtgccgatgacataactagtttagtgactgatacaacgctactcgtgcatttcttcggtaagaagggaaaagcagaactaaatttcgaagacttctaccggttcatggacaatttgcagaccgaggtccttgaaatcgagtttctgtcctactcgaacgggatgaatacaatctccgaagaagattttgctcacatcctgctccgttacaccaacgtggagaacaccagcgtgtttcttgaaaatgtgcggtatagcatcccagaggagaaaggtattaccttcgacgaatttcgctctttctttcagtttttgaacaatctggaagatttcgccatcgccttgaacatgtacaattttgcgagtcgtagcataggtcaggacgagtttaaaagagccgtatacgttgccacaggtttaaaattctctccacatttggtcaacaccgtgtttaagatctttgatgtggataaagacgaccagttgtcatataaggaatttattggcataatgaaagaccgcctgcacagaggatttagaggttacaaaacagttcagaaatatccaacttttaaaagctgcttgaaaaaggaactacatagccggtag

SEQ ID NO: 255512 - DNA, 1593 bp, Artificial Sequence
  derived and/or modified sequence
atggccgccctgcggcggctgctgtggcccccaccccgggtgagcccccccctgtgtgcccaccagcccctgctgggcccctggggccggcctgctgtgaccaccctgggcctgcccggccggcccttcagcagcagagaagatgaggagagagctgtggccgaggccgcctggaggagaagaagacgctggggcgagctgtctgtggccgctgctgctgggggcggcctggtgggcctggtgtgctaccagctgtatggagaccccagggctggcagccctgccaccggccggcccagcaagtctgctgccacagagcctgaggaccccccccggggccggggcatgctgcccatccctgtggccgccgccaaggagaccgtggccatcggccgcacagacatcgaggacctggacctgtatgccaccagccgggagcggcgcttccggctgtttgccagcattgaatgtgagggccagctgttcatgaccccctatgacttcatcctggccgtgaccacagatgagcccaaggtggccaagacctggaagagcctgagcaagcaggagctgaaccagatgctggccgagaccccacctgtgtggaagggcagcagcaagctgttcaggaacctgaaggagaagggcgtcatctcctacacagagtacctgttcctgctgtgcatcctgaccaagccccatgctggcttcagaattgccttcaacatgtttgacacagatggaaatgagatggtggacaagaaggagttcctggtgctgcaggagatcttcaggaagaagaatgagaagcgggagatcaagggagatgaggagaagagggccatgctgcggctgcagctgtatggctaccacagccccaccaacagcgtgctgaagacagatgctgaggagctggtgagccgcagctactgggacaccctgcggaggaacaccagccaggccctcttcagtgacctggccgagcgggcagatgacatcaccagcctggtgacagacaccaccctgctggtgcacttcttcggcaagaagggcaaggccgagctgaactttgaggacttctaccgcttcatggacaacctgcagacagaggtgctggagattgagttcctgagctacagcaatggcatgaacaccatcagtgaagaagattttgcccacatcctgctgcgctacaccaacgtggagaacacctctgtgttcctggagaatgtgcgctacagcatccctgaggagaagggcatcacctttgatgagttccgctccttcttccagttcctgaacaacctggaggactttgccatcgccctgaacatgtacaactttgccagccgcagcatcggccaggatgagttcaagagagctgtgtatgtggccaccggcctgaagttcagcccccacctggtgaacacagtgttcaagatctttgatgtggacaaggatgaccagctgagctacaaggagttcatcggcatcatgaaggaccggctgcaccggggcttccggggctacaagacagtgcagaagtaccccaccttcaagagctgcctgaagaaggagctgcacagcaggtag

SEQ ID NO: 255513 - DNA, 1593 bp, Artificial Sequence
  derived and/or modified sequence
atggccgccctgcggcggctgctgtggccccccccccgggtgagcccccccctttgcgcccatcagccactgctaggaccttgggggcggccagctgtgacaacccttggattacctggacgccctttctcttctagagaagatgaggagagagcagttgctgaggccgcatggcggagacgtaggagatggggagagctttccgtggcagccgccgctggcggaggcctggtcggacttgtctgttaccagctgtacggggatccccgagcaggttcacctgccaccggccgacccagtaaaagcgccgctaccgaacctgaggacccccccagggggcgcgggatgctccccattccggtagccgccgccaaggagactgtcgctattgggagaacagatatagaagacctagacttatacgctacgtcccgcgagaggcggtttcggctgttcgcgtccattgagtgtgaggggcagcttttcatgacaccctatgactttatattagcagtgactacggacgagcctaaggtcgctaagacttggaagtccctctcaaaacaggagcttaaccagatgctggccgaaaccccaccagtctggaaaggctcaagcaagctcttcagaaacctgaaggagaagggcgtgatctcctacactgaatacctattcctactatgcatactgacaaaaccccatgctggcttccggattgcattcaacatgtttgatacagacggcaatgagatggtggataagaaggaatttctcgtactccaggaaatatttcgtaagaaaaacgaaaaaagagaaattaagggtgacgaagaaaaaagagctatgctcaggttgcagctgtatggctaccattcccctaccaattccgtgctgaagactgacgccgaggaattggtcagcaggtcctattgggatacattgaggcgcaatacgagccaagcactgtttagcgatcttgctgagcgggcagacgatatcacctcattggttaccgacaccacactgcttgtacatttttttgggaaaaagggtaaggccgagttgaattttgaggacttctaccgctttatggacaatctccagaccgaggtgttggagatcgagttcctgtcttactccaacggtatgaacacaatttccgaggaggactttgcacacatcctgcttcgttatacaaacgttgaaaacacttccgtatttttggagaacgttaggtactcaatcccggaagagaaaggcatcacgttcgacgagttcagatccttcttccagtttctgaataacctggaggacttcgccatcgctctgaacatgtacaactttgccagtaggagcattgggcaggacgagtttaagcgggcagtttatgttgctacgggtttaaagttctcacctcatctagttaataccgtgtttaagatttttgacgttgacaaagatgaccaattaagctacaaggagtttatcggtattatgaaagaccgacttcatcgaggattccgagggtacaagacagtgcagaaatatcctacttttaaatcatgcctaaaaaaggagcttcacagtagatag

SEQ ID NO: 255514 - DNA, 1593 bp, Artificial Sequence
  derived and/or modified sequence
atggccgcactccgcaggctgctctggccaccaccacgagtttcgccacccctgtgtgcacaccagcccctgttggggccatggggtcgtcctgccgtcacaaccttaggcctgcccggacggccatttagcagccgcgaggatgaggagcgcgctgtagcagaggccgcttggcgccgacgacgaaggtggggcgagctttccgtggcggcagctgccggtggcggtctggtgggcttagtgtgttaccagctgtatggagaccctagagcgggaagcccagccaccggacggccttcaaagtccgcagccaccgagcctgaggacccgccacgcggacggggtatgcttcccatccctgtcgctgctgcaaaggagactgtggccatcgggaggactgacatcgaagaccttgacctctacgctacgagtcgtgaacgacgcttcaggctcttcgcctcaatcgagtgtgaagggcagctgttcatgaccccgtacgacttcattcttgccgtgaccactgatgagcccaaggtggccaagacctggaagtcactgagcaagcaagaactcaatcagatgctggccgagacacctcctgtgtggaaggggagctcaaaattgtttagaaatctaaaggagaagggggtcatttcgtacacggagtatctcttcctgctgtgcattcttaccaaaccccatgccggattccggattgcatttaacatgttcgacaccgatggaaatgaaatggtcgataaaaaggaattccttgttctccaggagatctttagaaagaagaacgagaagcgcgagattaagggcgatgaggagaagcgggctatgctccgcctgcagctgtacgggtaccattcacccactaatagtgtcctgaaaacagacgctgaggaactggtgtcacgaagctactgggacactttgcggcgtaatacctcacaggccctgttctcagatctcgccgagagagcggatgacatcacatcgctcgtgaccgatactacgctgcttgtgcatttttttggaaagaagggtaaggccgaactaaatttcgaagatttttatcgattcatggacaatctgcagactgaagtcttagagatcgagtttctttcctactccaacggaatgaataccatttctgaggaggacttcgctcacattctcctgcgctacactaacgtggaaaacacatcagtgttcctggagaatgttcgctactccatacccgaagagaaggggatcacctttgatgagttccggagtttctttcaattcttaaataacctcgaggactttgccatcgctctgaacatgtacaatttcgccagtcggagcatagggcaggacgagtttaagcgtgccgtatacgttgctaccggcctgaagtttagccctcacctcgtcaacaccgtcttcaaaatattcgacgttgataaggacgatcaactctcctacaaggaatttatcgggatcatgaaggatcgcctgcaccgaggatttagaggatacaagactgtccagaaataccctacatttaaatcctgtctcaagaaagaactccattctcgctag

SEQ ID NO: 255515 - protein, 158 aa, Artificial Sequence
  derived and/or modified sequence
MLLLDCNPEVDGLKHLLETGASVNAPPDPCKQSPVHLAAGSGLACFLLWQLQTGADLNQQDVLGEAPLHKAAKVGSLECLSLLVASDAQIDLCNKNGQTAEDLAWSCGFPDCAKFLTTIKCMQTIKASEHPDRNDCVAVLRQKRSLGSVENTSGKRKC

SEQ ID NO: 255516 - protein, 44 aa, Artificial Sequence
  derived and/or modified sequence
MLLLDCNPEVDGLKHLLETGASVNAPPDPCKQSPVHLAAGSGLA

SEQ ID NO: 255517 - DNA, 477 bp, Artificial Sequence
  derived and/or modified sequence
atgctgctgctggactgcaaccccgaggtggacggcctgaagcacctgctggagaccggcgccagcgtgaacgccccccccgacccctgcaagcagagccccgtgcacctggccgccggcagcggcctggcctgcttcctgctgtggcagctgcagaccggcgccgacctgaaccagcaggacgtgctgggcgaggcccccctgcacaaggccgccaaggtgggcagcctggagtgcctgagcctgctggtggccagcgacgcccagatcgacctgtgcaacaagaacggccagaccgccgaggacctggcctggagctgcggcttccccgactgcgccaagttcctgaccaccatcaagtgcatgcagaccatcaaggccagcgagcaccccgacagaaacgactgcgtggccgtgctgagacagaagagaagcctgggcagcgtggagaacaccagcggcaagagaaagtgctag

SEQ ID NO: 255518 - DNA, 1141 bp, Artificial Sequence
  derived and/or modified sequence
gcggccgcggagccccacccgctcctactccagtcctctcacgcccactgacttaccctgcgcacgcgcgctgaggctccgtggggccgccgcgggccccgccccgaggtgggagggcctgacgcatccacagctggccaatcggcggatggcctcgcgcgcccgccccctccccctgcccccggcgccgggctccacgtgccagtgtttgtgtacgtgcggccgtggcggggctggacagggtccgggtcgttgaggattaggctgctcgggcgtaaccggagctggggcgcggctgccaagggccggcccggaagtcccagcggtctttaaattctcccgtgctagggccagcctgcgcattcttacctgtcggggtgcggcgagtgtctcacctctctgcacttccaaggactcttgtcatctgccttaggcgggaaatgctgttgctggattgcaaccccgaggtggatggtctgaagcatttgctggagacaggggcctcggtcaacgcacccccggatccctgcaagcagtcgcctgtccacttagccgcaggaagcggccttgcttgctttcttctctggcagctgcaaacgggcgctgacctcaaccagcaggatgttttaggagaagctccactacacaaggcagcaaaagttggaagcctggagtgcctaagcctgcttgtagccagtgatgcccaaattgatttatgtaataagaacgggcaaacagctgaagatctcgcttggtcatgtggatttccagactgtgccaagtttcttacaacaattaaatgtatgcagacaataaaagcaagtgaacaccctgacaggaatgattgtgttgccgtgctcagacagaaacggagtctcggaagtgtagaaaataccagtgggaaaaggaagtgctgatgtcacgtgggttatgaagaagtctgaagaacgccttcatttcatgcaaatctataagctcctgcttttggctttaccatatgttgtgtctaatctccttctgagaaggacgaaaaactttcttccaagtgaagatccatttaagaacacatgtatttacatgcctataatatgctggttgtgtatgctttgtcttttaagttattaaaggaacgtctaaaaaa

SEQ ID NO: 255519 - DNA, 135 bp, Artificial Sequence
  derived and/or modified sequence
atgctgctgctggactgcaaccccgaggtggacggcctgaagcacctgctggagaccggcgccagcgtgaacgccccccccgacccctgcaagcagagccccgtgcacctggccgccggcagcggcctggcctag

SEQ ID NO: 255520 - DNA, 477 bp, Artificial Sequence
  derived and/or modified sequence
atgctcttgctggactgcaacccagaagtagacggcttgaagcatttattagaaacgggggcctcggtgaatgcaccgccggatccatgtaaacagtctcccgtccatctagcggccggctcaggcctggcatgcttcctgctatggcagttacagaccggagccgacttgaaccaacaagatgtattgggggaggcaccgctgcacaaagccgctaaagtcggtagcctggaatgcttaagtctgctagtggcaagcgatgctcaaatagatctatgcaacaaaaatggacagacagccgaggacttggcgtggagctgtggctttcccgattgcgcaaagttcctgacaaccatcaaatgtatgcagaccatcaaggctagtgagcatccagaccggaatgattgtgtggcagttctgaggcaaaagaggagcctcggctctgtagaaaacactagtgggaagcgcaagtgttag

SEQ ID NO: 255521 - DNA, 135 bp, Artificial Sequence
  derived and/or modified sequence
atgctgttactcgactgtaatcctgaagtggacggtctcaagcatttacttgaaactggagcttctgtaaacgctccccctgacccatgtaagcaatcccccgtccacctcgcagcgggttccggattggcgtag

SEQ ID NO: 255522 - DNA, 477 bp, Artificial Sequence
  derived and/or modified sequence
atgctgctgctggactgcaaccctgaggtggatggcctgaagcacctgctggagactggagcctctgtgaatgcccccccagacccctgcaagcagagccctgtgcacctggccgccggcagcggcctggcctgcttcctgctgtggcagctgcagacaggagctgacctgaaccagcaggatgtgctgggggaggcccccctgcacaaggccgccaaggtgggcagcctggagtgcctgagcctgctggtggccagtgatgcccagattgacctgtgcaacaagaatggccagacagctgaggacctggcctggagctgtggcttcccagactgtgccaagttcctgaccaccatcaagtgcatgcagaccatcaaggccagcgagcacccagacagaaatgactgtgtggccgtgctgcggcagaagaggagcctgggctctgtggagaacaccagcggcaagaggaaatgttag

SEQ ID NO: 255523 - DNA, 135 bp, Artificial Sequence
  derived and/or modified sequence
atgctgctgctggactgcaaccctgaggtggatggcctgaagcacctgctggagactggagcctctgtgaatgcccccccagacccctgcaagcagagccctgtgcacctggccgccggcagcggcctggcctag

SEQ ID NO: 255524 - DNA, 477 bp, Artificial Sequence
  derived and/or modified sequence
atgctgctgctggactgcaaccccgaggtggacggcctgaagcaccttctggaaaccggagcgtccgtaaatgccccacccgatccatgtaaacaaagtcccgtacatctagctgccggatccggattggcatgctttctcctgtggcagctgcagacgggcgcggacctgaatcagcaggatgtacttggcgaggccccactccataaagccgccaaagtcgggtccctcgagtgcctaagcctgctggtggccagtgatgctcaaatagatttatgcaataagaatggccaaacagcagaggacctcgcctggagctgtggatttccggattgcgcgaaatttttgacaacgataaagtgtatgcagacaattaaggctagcgaacatcctgaccgaaacgactgtgtggccgtgctgcggcagaaaagatctcttggaagcgtcgaaaacacttctggtaaacgtaaatgctag

SEQ ID NO: 255525 - DNA, 135 bp, Artificial Sequence
  derived and/or modified sequence
atgctgctgctggactgcaaccccgaggtggacggcctgaagcaccttctggagacaggcgcgagtgtcaatgctcctcctgatccctgtaagcaatcacctgttcatctagctgctggctccggactcgcgtag

SEQ ID NO: 255526 - DNA, 477 bp, Artificial Sequence
  derived and/or modified sequence
atgcttctgttggattgtaatccagaggtcgatgggttgaagcaccttctggaaaccggagccagtgttaatgcacccccagacccatgtaagcagtctccggtacacctggcggctggcagcgggctcgcttgtttcctgctttggcagctccaaacgggcgctgacttgaatcagcaggacgtcttgggtgaagccccactgcacaaggctgcaaaggttggctccctcgagtgcctttctctcctggtcgcttcggacgcccaaatcgatctgtgcaataagaatgggcaaacagccgaggacttagcttggtcgtgcggcttcccagactgtgctaaattcctgaccactataaagtgtatgcagactatcaaagcgagcgaacatcctgatcgcaatgattgcgttgccgtgctcagacagaagcgttctttgggctctgtagagaacaccagcggtaaacgcaagtgttag

SEQ ID NO: 255527 - DNA, 135 bp, Artificial Sequence
  derived and/or modified sequence
atgctgctgcttgattgcaatccagaagtcgatgggctcaaacaccttctcgagaccggcgcatccgtcaatgcaccacctgatccatgcaaacagtcccccgtccatctggctgcgggatcagggctggcctag

SEQ ID NO: 255528 - DNA, 605 bp, Artificial Sequence
  derived and/or modified sequence
ccgaatcgcacgcggccgggtccgctctcccgggaggagagcccggcgtggaccagcgtgacgaccccagcgtgctgcggcctctccccgagggcccctccacaagggtccctgcgcgggccgggctcggccgttgccactcgggacagccatcccctcgagttcgcgctcgccgtccccgccttcacctcccgggttgggaggcgggcgactgcgcgcgaggtaaaggaacttgcgttccccggcgccgaggcggcagcagcgcagtgcacagcggcttctgaaggcggcgtcgacggggagctgcgcgtggctcccagtttcctggttacgtgcgcgccggcagagccaaaacctgcagccgaaactcccgcttctccggccagcctgcgcattcttacctgtcggggtgcggcgagtgtctcacctctctgcacttccaaggactcttgtcatctgccttaggcgggaaatgctgttgctggattgcaaccccgaggtggatggtctgaagcatttgctggagacaggggcctcggtcaacgcacccccggatccctgcaagcagtcgcctgtccacttagccgcaggaagcggccttgctt

SEQ ID NO: 255529 - protein, 839 aa, Artificial Sequence
  derived and/or modified sequence
MGWVGGRRRDSASPPGRSRSAADDINPAPANMEGGGGSVAVAGLGARGSGAAAATVRELLQDGCYSDFLNEDFDVKTYTSQSIHQAVIAEQLAKLAQGISQLDRELHLQVVARHEDLLAQATGIESLEGVLQMMQTRIGALQGAVDRIKAKIVEPYNKIVARTAQLARLQVACDLLRRIIRILNLSKRLQGQLQGGSREITKAAQSLNELDYLSQGIDLSGIEVIENDLLFIARARLEVENQAKRLLEQGLETQNPTQVGTALQVFYNLGTLKDTITSVVDGYCATLEENINSALDIKVLTQPSQSAVRGGPGRSTMPTPGNTAALRASFWTNMEKLMDHIYAVCGQVQHLQKVLAKKRDPVSHICFIEEIVKDGQPEIFYTFWNSVTQALSSQFHMATNSSMFLKQAFEGEYPKLLRLYNDLWKRLQQYSQHIQGNFNASGTTDLYVDLQHMEDDAQDIFIPKKPDYDPEKALKDSLQPYEAAYLSKSLSRLFDPINLVFPPGGRNPPSSDELDGIIKTIASELNVAAVDTNLTLAVSKNVAKTIQLYSVKSEQLLSTQGDASQVIGPLTEGQRRNVAVVNSLYKLHQSVTKAIHALMENAVQPLLTSVGDAIEAIIITMHQEDFSGSLSSSGKPDVPCSLYMKELQGFIARVMSDYFKHFECLDFVFDNTEAIAQRAVELFIRHASLIRPLGEGGKMRLAADFAQMELAVGPFCRRVSDLGKSYRMLRSFRPLLFQASEHVASSPALGDVIPFSIIIQFLFTRAPAELKSPFQRAEWSHTRFSQWLDDHPSEKDRLLLIRGALEAYVQSVRSREGKEFAPVYPIMVQLLQKAMSALQ

SEQ ID NO: 255530 - DNA, 2520 bp, Artificial Sequence
  derived and/or modified sequence
atgggctgggtcggaggccgtagacgcgatagtgcctctcctccaggacgtagccgttccgctgccgacgatatcaatcccgcccccgctaatatggaaggaggcggcggttccgtggctgtggcaggtctgggagctaggggtagcggggccgcagccgccaccgtgagggaactgctgcaggacggatgctacagcgacttcttgaacgaggacttcgacgtgaaaacttacacaagccagagcattcatcaggcagttatcgcggagcagttagctaagctagctcagggcatctctcagctagatcgagagctacacctacaggtagtggccaggcacgaagacctgcttgcccaggccacgggcatcgagagcctggagggagtgctccagatgatgcagactaggattggagcccttcaaggggcggtggaccgaattaaagccaagatagtggagccatataacaaaatcgtggctcgcacagcccagttggctcgtttgcaggttgcatgtgatcttctcagacgcatcattcggatcctgaatctgtccaagcgtttgcagggacagctgcaggggggtagtagagaaataacaaaagccgcccaatccttaaacgaactcgactatctgtcccagggtattgacctgtccggtattgaggtgatcgagaacgatttactgttcattgctagagctcgactggaagtcgagaatcaggccaagagactgttggaacagggtcttgaaacacaaaatccaacccaggtgggcaccgcactccaggtgttctacaatctggggacattgaaggacacaattacaagcgtagtggacggctattgcgccacgctggaggagaatatcaactccgctctggacattaaggtattgacacagccctcccaatctgccgtccggggcggcccaggtcgctctacgatgccaacacctggaaataccgcggccctgagagcctccttctggactaacatggagaaattgatggatcatatttacgccgtgtgcggacaggtccaacaccttcagaaagtgcttgccaagaaacgggacccggtctctcacatctgttttatcgaggagatagtgaaagatggacaacccgaaattttctatactttctggaatagcgtgacccaagctctgtcctcccaatttcatatggccaccaacagctccatgtttctgaaacaagcctttgagggtgaataccccaagctgctcaggttatataacgatctctggaagcggttgcaacagtatagccagcacatccaggggaattttaacgcaagtggtacgactgacttgtacgtcgacttgcagcacatggaggacgacgcccaggatatattcatccctaagaaacccgattacgacccggagaaagccctgaaggattctcttcaaccctacgaagccgcatacctctctaaatcattatctcgcttgtttgaccctattaatctcgtgttcccccctggcgggagaaacccccccagttctgatgagctggacgggatcatcaaaaccattgcttctgagctaaatgttgcagccgtggatacaaacttaacactagccgttagtaagaatgttgcaaaaactatccagctatactctgttaaatccgaacagctgctatcaacccaaggggacgcgtcccaggtcattgggcccctcaccgaaggtcaaagaagaaacgtggcggtggtgaatagcctgtataaactgcaccaaagcgtgactaaggccatacacgcactcatggaaaatgcagtgcagcccttgcttacctcagttggtgacgccatcgaggcgatcataattaccatgcatcaagaagatttctccgggtccctgtccagctccggcaagcccgatgtgccctgttcactttacatgaaagaactgcaggggtttattgctagggtcatgagcgactatttcaagcatttcgaatgccttgatttcgtgtttgacaacacagaggccatcgcacaacgagctgtcgagcttttcatcagacatgcctcgttaatcagacctctgggcgagggagggaagatgaggctggcagctgacttcgcccagatggagctagcagtaggccctttctgccgccgagtatcagacctggggaaaagctaccggatgctccgctcctttagaccgttgctgttccaggcctccgaacacgttgctagctctcctgccctcggcgacgtgatccctttctccataattatacagttcctgttcacacgggccccagccgaacttaagtccccatttcaacgcgcagagtggtcccatactcgcttctcccagtggttggacgaccacccaagcgagaaggatagacttcttttgatccgaggtgcattggaagcgtacgtgcagtcagtcagaagccgcgagggcaaagaattcgcgcccgtgtatcctatcatggtgcagctgctgcaaaaggctatgagtgctctgcagtag

SEQ ID NO: 255531 - DNA, 2520 bp, Artificial Sequence
  derived and/or modified sequence
atgggctgggtgggcggcagaagaagagattctgccagccccccaggccgcagccgctctgctgctgatgacatcaacccagccccagccaacatggagggcggcggcggctctgtggccgtggccggcctgggcgcccggggcagcggggctgctgctgccaccgtgcgggagctgctgcaggacggctgctacagcgacttcctgaatgaagattttgatgtgaagacctacaccagccagagcatccaccaggccgtgattgctgagcagctggccaagctggcccagggcatcagccagctggaccgggagctgcacctgcaggtggtggcccggcatgaggacctgctggcccaggccaccggcatcgagagcctggagggcgtgctgcagatgatgcagacccgcatcggggccctgcagggcgctgtggaccgcatcaaggccaagatcgtggagccctacaacaagatcgtggccaggacagcccagctggcccggctgcaggtggcctgtgacctgctgcggcgcatcatccgcatcctgaacctgagcaagaggctgcagggccagctgcagggcggcagccgggagatcaccaaggccgcccagagcctgaatgagctggactacctgagccagggcatcgacctgagcggcatcgaggtgattgaaaatgacctgctcttcatcgcccgggcccggctggaggtggagaaccaggccaagaggctgctggagcagggcctggagacccagaaccccacccaggtgggcacagccctgcaggtgttctacaacctgggcaccctgaaggacaccatcacctctgtggtggatggctactgtgccaccctggaggagaacatcaacagcgccctggacatcaaggtgctgacccagcccagccagagcgctgtgcggggcggccctggccgcagcaccatgcccaccccaggcaacacagctgccctgcgggccagcttctggaccaacatggagaagctgatggaccacatctatgctgtgtgtggccaggtgcagcacctgcagaaggtgctggccaagaagagggaccctgtgagccacatctgcttcatcgaggagatcgtgaaggatggccagcctgagatcttctacaccttctggaacagcgtgacccaggccctgagcagccagttccacatggccaccaacagctccatgttcctgaagcaggcctttgaaggagagtaccccaagctgctgcggctgtacaatgacctgtggaagaggctgcagcagtacagccagcacatccagggcaacttcaatgccagcggcaccacagacctgtatgtggacctgcagcacatggaggatgatgcccaggacatcttcatccccaagaagccagactatgaccctgagaaggccctgaaggacagcctgcagccctatgaagctgcctacctgagcaagagcctgagccggctgtttgaccccatcaacctggtgttccccccaggcggcaggaacccccccagcagtgatgagctggatggcatcatcaagaccatcgccagcgagctgaatgtggccgctgtggacaccaacctgaccctggccgtgtccaagaatgtggccaagaccatccagctgtacagcgtgaagtctgagcagctgctgagcacccagggagatgccagccaggtgattggccccctgacagagggccagaggagaaatgtggccgtggtgaacagcctgtacaagctgcaccagagcgtgaccaaggccatccacgccctgatggagaatgctgtgcagcccctgctgacctctgtgggagatgccatcgaggccatcatcatcaccatgcaccaggaggacttcagcggcagcctgagcagcagcggcaagccagatgtgccctgcagcctgtacatgaaggagctgcagggcttcatcgcccgggtgatgtctgactacttcaagcactttgaatgtctggactttgtgtttgacaacacagaggccatcgcccagagagctgtggagctgttcatcagacatgccagcctcatccggcccctgggggagggcggcaagatgaggctggccgctgactttgcccagatggagctggccgtgggccccttctgcagaagagtgtctgacctgggcaagagctacaggatgctgcgctccttccggcccctgctcttccaggccagcgagcacgtggccagcagccctgccctgggagatgtgatccccttcagcatcatcatccagttcctgttcacccgggccccagctgagctgaagagccccttccagagagctgagtggagccacacccgcttcagccagtggctggatgaccaccccagcgagaaggaccggctgctgctgatccggggggccctggaggcctacgtgcagagcgtgcgcagccgggagggcaaggagtttgcccctgtgtaccccatcatggtgcagctgctgcagaaggccatgtctgccctgcagtag

SEQ ID NO: 255532 - DNA, 2520 bp, Artificial Sequence
  derived and/or modified sequence
atgggctgggtgggcggccggcggcgggacagcgccagcccccccgggaggagccggtcggcagcagatgacattaacccggcaccggccaatatggaaggcggtggagggagcgtcgccgtcgccggccttggtgcgcgaggctcaggagcagccgccgctaccgtgagagagctgctacaggacggctgttacagcgatttccttaacgaagattttgacgtgaagacttatacatctcagagcattcaccaggcggtaatcgccgagcagctggccaaactggctcagggaataagccagctagatcgagagctgcatttgcaggtggttgcgaggcatgaggaccttctcgctcaggcgaccgggattgaatccctggaaggcgttcttcagatgatgcagaccagaataggcgctcttcagggcgccgtggacagaattaaggcaaagattgtggaaccatacaacaaaattgtagccaggacagctcagctggctaggcttcaagtcgcctgcgacctcttacgccggattatccgaattttaaatctgtctaagcggttacagggtcagcttcagggcggctctagagagataaccaaggccgcacaaagcctaaatgagttagactacctcagccaaggaatcgacctcagcggtattgaagtcattgagaacgatctgctgttcattgccagagccagattggaggtagaaaaccaggccaaaagactcctcgagcaaggactggaaacccagaaccctactcaggtggggaccgctctgcaggtcttttacaacctgggaactttgaaggatacaattacaagtgtggtggatggctattgcgccacactcgaagagaatattaatagtgctctggatataaaagtcctcacccagccttcccaaagcgccgtgaggggtgggccaggcaggtccaccatgcctaccccaggcaacaccgcagccctgagagctagcttctggacaaatatggaaaagcttatggaccatatctacgctgtctgcggtcaagttcagcatttacagaaggtattggcgaaaaagcgagacccagtaagccatatatgctttatcgaggaaatcgtgaaggacggacagccagagattttttatactttctggaattccgtgacccaagcactttccagccaattccacatggccaccaatagctcgatgttcctcaagcaggcctttgagggagagtaccctaaattactcagactgtataacgatctgtggaaaaggctccaacagtacagccaacacattcagggcaatttcaacgccagcggtacaacggacctgtacgtggacctgcaacacatggaagacgacgctcaggacatattcattcctaagaaacccgattacgatccagagaaagccctcaaggattcactgcaaccctatgaagctgcatatctttctaaatctctgagccggttattcgaccccatcaaccttgtgtttccacctggaggccgcaaccctccaagctctgatgagctggacggtattatcaagaccattgcaagtgagctgaacgttgctgctgtcgataccaatctgactcttgctgtctccaaaaacgtagccaagacgatccagctttacagcgtgaaaagtgagcagttgttaagtactcagggagacgcatcgcaagtcatcggacctctgacagaggggcagaggcgcaatgtcgcggtcgtgaattctctgtataagcttcatcagagtgtgacaaaggccatacacgctttgatggagaatgcggtacaaccccttctgacctccgtcggcgacgctattgaggccatcatcataaccatgcatcaggaggatttttcaggctccctgtctagctctggaaagcccgacgttccctgcagcctctacatgaaagaactccagggcttcattgcccgtgtgatgagcgactacttcaaacattttgaatgcctggactttgtcttcgacaacacggaggctattgcccaaagggctgtcgaacttttcatccgacatgctagtctcatacggcccttaggtgaggggggcaagatgcgcctcgctgccgatttcgcccagatggaacttgcggtcggtccattctgccgccgcgtgtcagatctggggaagagctacaggatgctgagatcctttcgacctcttctctttcaggccagcgagcacgtggcaagtagcccagccctaggggacgtgattccatttagcatcattatccagtttctattcacccgggctccagccgagctcaagtcccccttccagagggcggagtggagtcatacacgattttcccagtggttggatgatcatccctcagagaaggacaggttactcctcattaggggtgccctggaggcatatgttcagtccgtcagatccagagagggaaaggagtttgcccctgtctacccaatcatggttcagcttctgcaaaaggccatgtccgcactgcaatag

SEQ ID NO: 255533 - DNA, 2520 bp, Artificial Sequence
  derived and/or modified sequence
atgggttgggtgggaggccgacggcgagacagtgccagcccacccggaagaagcagatccgcagcagatgatattaatccagctccagccaacatggaaggcggaggcggatcagtggctgtcgctggcctgggagcacgaggaagtggcgcagccgctgctactgttcgcgagctcctgcaggatggatgctattccgatttcctcaatgaggacttcgacgtcaagacatataccagtcaaagcatccaccaggctgtcattgccgagcaactcgctaagcttgctcaaggaatcagccaacttgaccgggagctgcacttgcaggtggtagcacgccacgaggacctgctagcgcaggctacaggcattgagtcccttgaaggcgttctgcagatgatgcaaaccagaatcggtgccctccagggggctgtcgatcggatcaaggctaagattgtggagccctacaataaaatcgttgccaggacagcacagctggccagactgcaggtcgcctgtgacctactgagacgtatcatccggatcctgaacctatctaagcggcttcaggggcaactgcagggagggagccgcgaaattacaaaagctgcccagagcctcaacgaactggactatcttagccaggggatcgacctgtcaggtatcgaagtgatcgagaacgacctgttatttattgcaagagccaggttagaggtggagaaccaggccaagcggctgctggaacagggactggaaacacagaatcccactcaagttggcacagccctgcaggtattctacaacctgggcaccctgaaggacaccatcacctctgtggtggatgggtactgtgccactctcgaggaaaatatcaactccgccttggacatcaaagtacttacccagccaagccagtctgcggtgagaggcggacccggacgctccaccatgcctacacctggaaataccgccgcactgcgggcaagcttttggacgaatatggagaaactgatggaccatatatatgctgtatgtggtcaggtgcagcaccttcagaaggtgttggcaaaaaagcgcgatcccgttagccatatatgtttcatagaggaaattgtaaaggatggccaacctgaaattttttatacattctggaactccgtaactcaggcccttagttctcagttccatatggccacaaattcatcaatgtttctcaagcaggcttttgagggggagtaccccaagctactgaggctttacaacgacctctggaagaggctgcagcagtactctcagcatattcaaggcaactttaacgcctcgggtactacggatctgtatgtcgacctgcagcacatggaggacgatgctcaggatattttcattcccaagaaaccagattacgacccggaaaaagccttgaaggacagcctgcaaccttatgaggcagcctatttgagcaagagcctgagccgactttttgatccaatcaatttggtctttccccctgggggtcgcaacccaccgtcatccgacgaactggatggtataatcaaaaccattgcctcagaattaaacgtggccgctgtcgataccaatctaacactggccgtgagcaaaaatgtagcaaagactatacagctgtattccgtcaagtctgaacaactcttatctacccagggtgacgcctcgcaggtcatcggccctctcacagagggtcagcggcgaaatgtggccgtggtgaacagcttgtataaactgcaccagtccgtcaccaaagctatccacgctttaatggagaacgccgtacagcccttactgacatccgtgggcgacgcaatagaagccatcatcatcaccatgcatcaagaggactttagcggaagcttgagttcctccggcaagccagatgttccgtgcagtctgtacatgaaagagctgcagggctttatagcaagagtcatgagcgattacttcaaacatttcgagtgtctggattttgtctttgacaatacggaagcaatcgcgcagagagcagtggaattgttcatacggcacgcttcactgatccggcctctgggcgaagggggaaaaatgagactcgcagctgactttgcccagatggaactcgctgttgggcctttctgcaggcgagttagcgatctgggtaaaagctaccgaatgcttcggtcgttcaggccccttttgttccaggcctccgaacatgtcgcctcttctcccgcacttggtgacgtgattcctttttctattattattcagtttcttttcacacgcgcacctgccgagcttaaaagcccgttccagagggccgagtggagccatacacgattctcccaatggcttgacgatcatccatccgagaaagataggctattgctcatcagaggagccctggaggcttatgtgcagagtgtgaggagtcgtgaagggaaagagtttgcacctgtgtaccctatcatggtgcagctccttcagaaagccatgtctgcattacagtag

SEQ ID NO: 255534 - DNA, 4343 bp, Artificial Sequence
  derived and/or modified sequence
gcttagcccaggcgcgggctgagagtcagttcgccaggtgggcctggagccatgggctgggtgggcgggcggcgccgggattctgcgtcaccacctgggcggagccgttctgctgctgacgacatcaacccggcacctgccaacatggaaggtggcggcggcagcgtcgctgtagctggcctcggagctcgaggctctggagcggctgcagctacagtccgggaacttctgcaggacgggtgttatagtgactttttaaacgaagactttgatgtaaagacttatacttctcaatctattcatcaagctgtaattgctgaacaactagcaaaacttgcccaaggaatcagtcagttggacagagaactacacttacaggttgttgcaagacatgaagatttactggcacaagcaactgggattgagtcgttggaaggtgttcttcagatgatgcagacgagaattggggctttacagggagctgttgataggataaaagcaaaaattgttgaaccatacaataagatagttgcccggactgcacaactagcaagacttcaggttgcctgtgatttgcttcggaggattattcgtatcttgaatctcagtaagagactccaaggacaactgcaagggggaagtagagagataacaaaagctgctcagagtctcaatgaacttgattatctttctcaaggaatagatctttctggaatagaagtgatagaaaatgatctactttttattgcaagagcccgacttgaagtggaaaatcaagctaagcgcctactagagcagggtttggagactcagaatccaactcaagtcggaacagctcttcaggttttctataatcttggaactttgaaggatactattaccagtgttgtggatggatattgtgctactttagaagaaaatatcaacagtgcattagacataaaagttttgactcagccttcccagtcagctgtgagagggggacctggacgatctaccatgccaaccccaggaaatactgcagctttgcgtgcctcattctggaccaatatggagaaacttatggatcatatttatgctgtttgtggacaggtacaacatctacaaaaagtattggccaagaagagagatcctgtttctcacatttgtttcattgaagaaatagttaaggatggacaaccggaaattttctacacattttggaattcagttactcaggcactttcttctcaatttcatatggcaacaaactcttcgatgtttttgaagcaggcatttgaaggagaataccctaaattattacgtctttataatgacttatggaagcgtcttcaacaatacagtcagcatatccaagggaattttaatgcaagtggaactacagacctctatgttgacctacaacacatggaagatgatgcacaagatatattcataccaaaaaagccagattatgatccagaaaaggctttgaaagactcactacaaccctatgaggctgcttatctatcaaaatccttatctcgactcttcgatcctatcaacttggtttttcccccgggtggtcgtaatcctccttcctctgatgaacttgatggtattattaaaactatagcaagtgaactaaatgttgctgctgttgatacaaacctcacattagctgtgtcaaaaaatgtggcaaagaccatccagttatacagtgtaaaatcagagcagcttctctccacacaaggagatgcaagtcaggtgattgggcctcttactgaaggacagagaagaaatgtggcagtagtgaattcattgtataagttgcaccaatcagtaacaaaggctattcatgctcttatggaaaatgctgtgcaacccttactcacttctgtgggagatgctatagaggccataatcatcaccatgcatcaagaagacttttctgggtcattatccagctcaggaaaacctgatgttccttgttctctgtacatgaaggagctacaaggtttcattgccagagttatgagtgactattttaaacactttgaatgcttggattttgtctttgacaacactgaggctattgcccaaagagctgttgaactttttatccgccatgccagtctcataagacctcttggtgaaggtgggaaaatgcgacttgctgctgattttgcacagatggagttggctgtgggtccattctgtagacgagtatctgatttaggaaagtcctatcggatgctgagatcattcagacctctgctcttccaggcaagtgaacatgtagccagtagtcctgcattgggggatgtgattccgttcagcatcattattcagtttttgttcacgagagcacccgctgaactgaaatctcctttccagagggcagagtggtcccacacacgcttctctcagtggctggatgaccatccatctgaaaaggacaggctcctcctcatcaggggagccctggaagcttatgttcaatcagtgagaagtagagaaggcaaagaatttgcaccagtttatcccataatggttcagctgcttcaaaaggctatgtctgctcttcagtaatgacatgaaatctttgttcatctccactttgtgctaacccattcatagttggcagttaaacacatactccaaaagactgctactatctactattttaagaatgtaattgattgttcggtatttcctatcgacgtttatttacctctttagcacttatactttagcataaaaaatgttgagttatcaccacctttcaattccatggacctgatttttccagaaagatgttttcctctttcagatttttgtacaaggctaaaatgtctttcccatccataaccaagtcctcctatgggtacataaacccaaagtccccacttcttttaaagggatatgatcaagttataacatgtaccctgcttcccccaaccctgccttcttcactaaataagcatgtagctcagtggtttccaaatttggctgcacattcataccaatcaccaggggatttttttaaaatcctgatgcccaacttgcactccacattaattaacatgtctaggagtgggagcctgacagacaccactattaaaaaaaaaaaaaatccccaaaatgattccaatagacaacaaagttgaggaaccactggcacatcccaagctaagatacaaggttaaatggcctttttaagtatgtcatactggatctttaaataaagcaaggcttttgttacactttgtcatgttattaaaagcagacctttgggctgtttaaccgtgtaacaaaaatgccacgtgaaaaataaaaatttttattgtatagcaattctctataaatagtagataatctaagtccttattttctgatggctcttgttccactattaacattgtttttaatttttaaaatcctatcagcagcctcctaattagcagtgttaggaatttgccttatgttttccatctcatctcctgaacctgttattctgagaactcataaataaaattcagccaagattaatcaatcaatcaatcaatcagtagacgtcagagataagcaacttttttttccatttatttgaaataatatacaagaatatagtgtgcaaaatttaggggcaacatcatgaagaagtgtgatgaactgaaatcaattttacagctgtgattcctaaccagaaacaccacttggtaagtaacatgaaaagccatgattgtagctcagagcaaaagcagctgtattgccaatgtatttgctctaattttagacagttggaggaaaattaaagtgcaagtgttgcactgcagtaagtgcaaagtctgcccccaccataaagattatgatgacaaaatatatttaagatacatggctgaggagatacagaacacgaagttaaaaaatacaatggtgttgactgtttgttaatagcaccattacagtgactatatcccaatgctattaactaactttaccttggcctgggctaggtctccattggaaataataacggatggctgctgccacctggtgcatcaactcagcatgccatggtaactgcagcaggtggctcttaggctgggacaccaacaccagccacctgccccatgttctggtagcctcttggcactgaccagactaggagcgcctatgtttggcacagatgctgagccatgtggtggttactagaggaaaggccgactcccagcttctgcttcatttcatcatgtgtacaatacagattaataagcagtaaggagccaatgtataaacagcagttacatattttttaaattcccctttcgtacaatttaaaataaaacatgtatacactt

SEQ ID NO: 255535 - DNA, 2520 bp, Artificial Sequence
  derived and/or modified sequence
atgggctgggtgggcggcagaagaagagacagcgccagcccccccggcagaagcagaagcgccgccgacgacatcaaccccgcccccgccaacatggagggcggcggcggcagcgtggccgtggccggcctgggcgccagaggcagcggcgccgccgccgccaccgtgagagagctgctgcaggacggctgctacagcgacttcctgaacgaggacttcgacgtgaagacctacaccagccagagcatccaccaggccgtgatcgccgagcagctggccaagctggcccagggcatcagccagctggacagagagctgcacctgcaggtggtggccagacacgaggacctgctggcccaggccaccggcatcgagagcctggagggcgtgctgcagatgatgcagaccagaatcggcgccctgcagggcgccgtggacagaatcaaggccaagatcgtggagccctacaacaagatcgtggccagaaccgcccagctggccagactgcaggtggcctgcgacctgctgagaagaatcatcagaatcctgaacctgagcaagagactgcagggccagctgcagggcggcagcagagagatcaccaaggccgcccagagcctgaacgagctggactacctgagccagggcatcgacctgagcggcatcgaggtgatcgagaacgacctgctgttcatcgccagagccagactggaggtggagaaccaggccaagagactgctggagcagggcctggagacccagaaccccacccaggtgggcaccgccctgcaggtgttctacaacctgggcaccctgaaggacaccatcaccagcgtggtggacggctactgcgccaccctggaggagaacatcaacagcgccctggacatcaaggtgctgacccagcccagccagagcgccgtgagaggcggccccggcagaagcaccatgcccacccccggcaacaccgccgccctgagagccagcttctggaccaacatggagaagctgatggaccacatctacgccgtgtgcggccaggtgcagcacctgcagaaggtgctggccaagaagagagaccccgtgagccacatctgcttcatcgaggagatcgtgaaggacggccagcccgagatcttctacaccttctggaacagcgtgacccaggccctgagcagccagttccacatggccaccaacagcagcatgttcctgaagcaggccttcgagggcgagtaccccaagctgctgagactgtacaacgacctgtggaagagactgcagcagtacagccagcacatccagggcaacttcaacgccagcggcaccaccgacctgtacgtggacctgcagcacatggaggacgacgcccaggacatcttcatccccaagaagcccgactacgaccccgagaaggccctgaaggacagcctgcagccctacgaggccgcctacctgagcaagagcctgagcagactgttcgaccccatcaacctggtgttcccccccggcggcagaaacccccccagcagcgacgagctggacggcatcatcaagaccatcgccagcgagctgaacgtggccgccgtggacaccaacctgaccctggccgtgagcaagaacgtggccaagaccatccagctgtacagcgtgaagagcgagcagctgctgagcacccagggcgacgccagccaggtgatcggccccctgaccgagggccagagaagaaacgtggccgtggtgaacagcctgtacaagctgcaccagagcgtgaccaaggccatccacgccctgatggagaacgccgtgcagcccctgctgaccagcgtgggcgacgccatcgaggccatcatcatcaccatgcaccaggaggacttcagcggcagcctgagcagcagcggcaagcccgacgtgccctgcagcctgtacatgaaggagctgcagggcttcatcgccagagtgatgagcgactacttcaagcacttcgagtgcctggacttcgtgttcgacaacaccgaggccatcgcccagagagccgtggagctgttcatcagacacgccagcctgatcagacccctgggcgagggcggcaagatgagactggccgccgacttcgcccagatggagctggccgtgggccccttctgcagaagagtgagcgacctgggcaagagctacagaatgctgagaagcttcagacccctgctgttccaggccagcgagcacgtggccagcagccccgccctgggcgacgtgatccccttcagcatcatcatccagttcctgttcaccagagcccccgccgagctgaagagccccttccagagagccgagtggagccacaccagattcagccagtggctggacgaccaccccagcgagaaggacagactgctgctgatcagaggcgccctggaggcctacgtgcagagcgtgagaagcagagagggcaaggagttcgcccccgtgtaccccatcatggtgcagctgctgcagaaggccatgagcgccctgcagtag

SEQ ID NO: 255536 - protein, 354 aa, Artificial Sequence
  derived and/or modified sequence
MALNHTALPQDERLPHYLRDGDPFASKLSWEADLVAGFYLTIIGILSTFGNGYVLYMSSRRKKKLRPAEIMTINLAVCDLGISVVGKPFTIISCFCHRWVFGWIGCRWYGWAGFFFGCGSLITMTAVSLDRYLKICYLSYGVWLKRKHAYICLAAIWAYASFWTTMPLVGLGDYVPEPFGTSCTLDWWLAQASVGGQVFILNILFFCLLLPTAVIVFSYVKIIAKVKSSSKEVAHFDSRIHSSHVLEMKLTKVAMLICAGFLIAWIPYAVVSVWSAFGRPDSIPIQLSVVPTLLAKSAAMYNPIIYQVIDYKFACCQTGGLKATKKKSLEGFRLHTVTTVRKSSAVLEIHEEWE

SEQ ID NO: 255537 - DNA, 1065 bp, Artificial Sequence
  derived and/or modified sequence
atggccctgaaccacaccgccctgccccaggacgagagactgccccactacctgagagacggcgaccccttcgccagcaagctgagctgggaggccgacctggtggccggcttctacctgaccatcatcggcatcctgagcaccttcggcaacggctacgtgctgtacatgagcagcagaagaaagaagaagctgagacccgccgagatcatgaccatcaacctggccgtgtgcgacctgggcatcagcgtggtgggcaagcccttcaccatcatcagctgcttctgccacagatgggtgttcggctggatcggctgcagatggtacggctgggccggcttcttcttcggctgcggcagcctgatcaccatgaccgccgtgagcctggacagatacctgaagatctgctacctgagctacggcgtgtggctgaagagaaagcacgcctacatctgcctggccgccatctgggcctacgccagcttctggaccaccatgcccctggtgggcctgggcgactacgtgcccgagcccttcggcaccagctgcaccctggactggtggctggcccaggccagcgtgggcggccaggtgttcatcctgaacatcctgttcttctgcctgctgctgcccaccgccgtgatcgtgttcagctacgtgaagatcatcgccaaggtgaagagcagcagcaaggaggtggcccacttcgacagcagaatccacagcagccacgtgctggagatgaagctgaccaaggtggccatgctgatctgcgccggcttcctgatcgcctggatcccctacgccgtggtgagcgtgtggagcgccttcggcagacccgacagcatccccatccagctgagcgtggtgcccaccctgctggccaagagcgccgccatgtacaaccccatcatctaccaggtgatcgactacaagttcgcctgctgccagaccggcggcctgaaggccaccaagaagaagagcctggagggcttcagactgcacaccgtgaccaccgtgagaaagagcagcgccgtgctggagatccacgaggagtgggagtag

SEQ ID NO: 255538 - DNA, 1065 bp, Artificial Sequence
  derived and/or modified sequence
atggcactgaaccatactgctctcccccaggatgaaaggttgcctcattacctgcgcgatggcgacccttttgcctctaagctctcttgggaggccgatctcgtggcaggtttctaccttactatcatcggtatactgtcaacctttgggaatggttacgtgttgtatatgagttcgcgtcgtaaaaaaaagctccgacctgcagaaataatgaccatcaatcttgcagtttgcgacctgggcatctccgtggtcgggaagccttttaccataatttcatgtttctgccaccgttgggtgttcggttggattggctgtaggtggtacgggtgggccgggtttttctttggctgcggaagcctgattactatgactgcagtatcgctcgatcgctacttaaagatatgttacctgtcttacggcgtgtggttgaagcgaaagcatgcttatatttgtttagcggccatatgggcttacgcatcattttggacaacaatgccactcgtcgggctgggcgactacgttccagaaccatttgggacttcatgcaccctcgactggtggttagcccaggcaagtgtgggcgggcaggtattcattctaaacattctattcttctgtctgctgcttcccactgcagtgattgtcttctcttacgtgaagattattgctaaggttaagtcctccagcaaggaagttgctcactttgactcaagaattcattcctctcatgtgctggagatgaaactgaccaaggtggctatgctcatctgcgctggcttcctcatcgcgtggatcccgtatgcagtagttagcgtatggagcgccttcggtaggcccgacagcatccctatccagctgtcagttgtgcccacgctcctcgctaagtctgccgcaatgtacaacccgataatctatcaggtcatcgactacaagttcgcatgttgtcaaactggcggactgaaggctacaaaaaaaaagagcctggagggattccggctacacactgtgactactgtaagaaaaagcagcgctgtcctggaaatccacgaagaatgggagtag

SEQ ID NO: 255539 - DNA, 1065 bp, Artificial Sequence
  derived and/or modified sequence
atggccctgaaccacacagccctgccccaggatgagcggctgccccactacctgagagatggagacccctttgccagcaagctgtcctgggaggccgacctggtggccggcttctacctgaccatcatcggcatcctgagcacctttggaaatggctacgtgctgtacatgagcagcaggaggaagaagaagctgcggcctgctgagatcatgaccatcaacctggccgtgtgtgacctgggcatctctgtggtgggcaagcccttcaccatcatcagctgcttctgccaccgctgggtgtttggctggattggctgccgctggtacggctgggccggcttcttcttcggctgcggcagcctcatcaccatgacagctgtgtccctggaccgctacctgaagatctgctacctgtcctatggagtgtggctgaagaggaagcacgcctacatctgcctggccgccatctgggcctatgccagcttctggaccaccatgcccctggtgggcctgggggactatgtgcctgagcccttcggcaccagctgcaccctggactggtggctggcccaggcctctgtgggcggccaggtgttcatcctgaacatcctcttcttctgcctgctgctgcccacagctgtgattgtgttctcctatgtgaagatcatcgccaaggtgaagagcagcagcaaggaggtggcccactttgacagccgcatccacagcagccacgtgctggagatgaagctgaccaaggtggccatgctgatctgtgccggcttcctgattgcctggatcccctatgctgtggtgtctgtgtggagcgccttcggccgcccagacagcatccccatccagctgtctgtggtgcccaccctgctggccaagtctgctgccatgtacaaccccatcatctaccaggtgattgactacaagtttgcctgctgccagacaggaggcctgaaggccaccaagaagaagagcctggagggcttccggctgcacacagtgaccaccgtgaggaagagcagcgctgtgctggagatccacgaggagtgggagtag

SEQ ID NO: 255540 - DNA, 1065 bp, Artificial Sequence
  derived and/or modified sequence
atggccctgaaccacaccgccctgccccaggacgagcggctgccccactacttacgagatggggacccatttgcctcgaaactctcttgggaggccgacttagtggctggattctatctgactataattgggatattgagcaccttcggaaatggatacgttctttacatgtcaagcagaagaaagaagaaacttagaccagcggaaattatgacaatcaacctagctgtctgtgacctaggcatcagcgtggtgggcaagcccttcaccattataagctgcttttgtcataggtgggtgtttgggtggatagggtgtcggtggtacgggtgggcgggcttcttcttcgggtgcgggagtctcatcacaatgactgctgtgagtctggatcggtacttgaaaatctgctacctgtcctatggggtctggttaaagcgaaaacatgcatatatttgcctggcagctatatgggcttatgcctctttctggaccacaatgcctctggtcgggctgggagactacgtgccagagccatttgggacctcctgcactttggattggtggctagcgcaagcctccgttggcggacaagtcttcatactcaacattctctttttctgtttgctgctgccaaccgcagtgatcgtgttcagttatgtgaaaataatcgctaaggtcaagtcttctagcaaagaggtcgcccattttgactcaaggattcatagcagccatgtactggaaatgaagctgacaaaggtcgcaatgctaatctgtgctggatttttaattgcatggattccctacgccgtggtaagtgtttggtccgcctttggcaggccagacagcataccaattcaactctcagtggtccctacattgctcgccaaaagcgctgcaatgtataacccgatcatttatcaggttatcgactacaaattcgcatgctgccagactggggggttgaaagccactaagaaaaagagcctggagggattccgactgcatacggtcaccacagttcgtaaaagctcagcagtcctggaaatccacgaggagtgggagtag

SEQ ID NO: 255541 - DNA, 1801 bp, Artificial Sequence
  derived and/or modified sequence
ttcagatccctcgtggttcgagaacagaatggcgttaaatcacactgccctgcctcaggacgagcgcctgccccattaccttcgagatggggatccttttgcttccaaactttcttgggaagcggatttagtggctggcttttacctaacaataattgggattctgtccacatttggaaatggatatgtcctttacatgtcttctagacgaaagaagaagctgagacccgctgaaataatgactatcaatttagcagtctgtgatctggggatttcagttgtaggcaagccgttcaccatcatctcttgcttttgtcaccgctgggtgtttggctggatcggctgccgctggtatggatgggctggatttttctttggctgtggaagccttatcaccatgactgctgtcagcctggatcgatatttgaaaatctgctatttatcttatggggtttggctgaaaagaaagcacgcctacatctgcctggcagccatctgggcctatgcttccttctggaccaccatgcccttggtaggtctgggggactacgtacctgagcccttcggaacctcgtgcaccctggactggtggctggcccaggcctcggtagggggccaggttttcatcctgaacatcctcttcttctgcctcttgctcccaacggctgtgatcgtgttctcctacgtaaagatcattgccaaggttaagtcctcttccaaagaagtagctcatttcgacagtcggatccatagcagccatgtgctggaaatgaaactgacaaaggtagcgatgttgatttgtgctggattcctgattgcctggattccttatgcagtggtgtctgtgtggtcagcttttggaaggccagactccattcccatacagctctctgtggtgccaaccctacttgcaaaatctgcagcgatgtacaatcccatcatttaccaagttattgattacaaatttgcctgttgccaaactggtggtttgaaagcaaccaagaagaagtctctggaaggcttcaggctgcacaccgtaaccacagtcaggaagtcttctgctgtgctggaaattcatgaagagtgggaataacaaatgttctggttgtgaagagtgcatctgaagtgcttacacggcgtctggcatatgcagagaaattagcttacaaatgttatttttctgacttctcgcctccactccacttaccctgtcaggaaaaaataattcacaaggaatatcaaaacaatgatgcaccctaggagtatccaagtatcttaactgagttatctcattctggtatagtggcagagttataactaaagagtgccagaaacccacgctttaaacatcctgcagtgcacacctcggtctcgtcagtaaggacttcactttcttctgaactggggcttgtgaaagctggcctgaaaagcctgattcaaggagatcaggctgtgtctctgactggagcagctacactccccatctgtaatttgatttgttctattgcagatgatgtactgggcagaggtgagtgtggattggtgaaaatctgtttttatgactggcaaagcagtgcaggggggtctttcactgataagaagcatcatcagtagggtttgtccctgatgcctttacaacagcatctgagcacctctcaagtttttccaggccagctccagtttcagtgaggagagtgtgggctttctattccccaaatattcttactacagttaatatgtaggttactgccccagcccaactgcaggttcccagatgtgagttccatgtaggcagaaactg

SEQ ID NO: 255542 - DNA, 1065 bp, Artificial Sequence
  derived and/or modified sequence
atggcgctcaaccacacagccctaccacaagatgagcggcttccgcattacctacgcgatggcgacccgtttgccagcaaactcagttgggaggcagacttagtcgccggtttttacttgaccatcataggtatcctgtcaacttttggcaacggctatgtgctgtacatgtcctccaggcgcaagaaaaagctccggccagctgaaataatgactattaatctggcagtgtgtgacctgggcattagcgttgtcgggaaaccttttaccatcataagctgtttctgccacaggtgggtgtttggatggattggctgtaggtggtatggctgggcaggtttcttctttggatgtgggtctctgatcacaatgactgctgtctcacttgatagatacctgaagatctgttatctgtcttatggtgtgtggctgaaaaggaagcatgcctatatttgtctcgcagccatatgggcatacgctagtttctggactaccatgccgctggtaggactcggtgactatgtgccagagccctttggaacaagctgtacgcttgactggtggctagcacaagcttcagttggaggacaggtattcatcctgaacattctgttcttttgtttattactcccgactgccgtaatcgtatttagttacgtcaagattattgccaaagtgaaatccagctcaaaggaggtcgcacactttgacagtcgtatccactctagccacgtactggaaatgaaactgaccaaggtcgcgatgctcatatgtgcaggcttcctgattgcatggattccttacgcagtggttagcgtttggtccgccttcggcaggccagatagtatcccaattcagctaagtgtcgtgcccacactgctggccaagagtgctgccatgtataatcctataatctatcaggtgatcgattataagtttgcctgctgccagacaggaggactcaaagcaaccaagaagaagagcctggagggcttccggttgcacaccgtgaccactgtgagaaaatcctccgcagttttggagatccacgaagagtgggaatag

SEQ ID NO: 255543 - protein, 377 aa, Artificial Sequence
  derived and/or modified sequence
MSPECARAAGDAPLRSLEQANRTRFPFFSDVKGDHRLVLAAVETTVLVLIFAVSLLGNVCALVLVARRRRRGATACLVLNLFCADLLFISAIPLVLAVRWTEAWLLGPVACHLLFYVMTLSGSVTILTLAAVSLERMVCIVHLQRGVRGPGRRARAVLLALIWGYSAVAALPLCVFFRVVPQRLPGADQEISICTLIWPTIPGEISWDVSFVTLNFLVPGLVIVISYSKILQTSEHLLDARAVVTHSEITKASRKRLTVSLAYSESHQIRVSQQDFRLFRTLFLLMVSFFIMWSPIIITILLILIQNFKQDLVIWPSLFFWVVAFTFANSALNPILYNMTLCRNEWKKIFCCFWFPEKGAILTDTSVKRNDLSIISG

SEQ ID NO: 255544 - DNA, 1134 bp, Artificial Sequence
  derived and/or modified sequence
atgagccccgagtgcgccagagccgccggcgacgcccccctgagaagcctggagcaggccaacagaaccagattccccttcttcagcgacgtgaagggcgaccacagactggtgctggccgccgtggagaccaccgtgctggtgctgatcttcgccgtgagcctgctgggcaacgtgtgcgccctggtgctggtggccagaagaagaagaagaggcgccaccgcctgcctggtgctgaacctgttctgcgccgacctgctgttcatcagcgccatccccctggtgctggccgtgagatggaccgaggcctggctgctgggccccgtggcctgccacctgctgttctacgtgatgaccctgagcggcagcgtgaccatcctgaccctggccgccgtgagcctggagagaatggtgtgcatcgtgcacctgcagagaggcgtgagaggccccggcagaagagccagagccgtgctgctggccctgatctggggctacagcgccgtggccgccctgcccctgtgcgtgttcttcagagtggtgccccagagactgcccggcgccgaccaggagatcagcatctgcaccctgatctggcccaccatccccggcgagatcagctgggacgtgagcttcgtgaccctgaacttcctggtgcccggcctggtgatcgtgatcagctacagcaagatcctgcagaccagcgagcacctgctggacgccagagccgtggtgacccacagcgagatcaccaaggccagcagaaagagactgaccgtgagcctggcctacagcgagagccaccagatcagagtgagccagcaggacttcagactgttcagaaccctgttcctgctgatggtgagcttcttcatcatgtggagccccatcatcatcaccatcctgctgatcctgatccagaacttcaagcaggacctggtgatctggcccagcctgttcttctgggtggtggccttcaccttcgccaacagcgccctgaaccccatcctgtacaacatgaccctgtgcagaaacgagtggaagaagatcttctgctgcttctggttccccgagaagggcgccatcctgaccgacaccagcgtgaagagaaacgacctgagcatcatcagcggctag

SEQ ID NO: 255545 - DNA, 1134 bp, Artificial Sequence
  derived and/or modified sequence
atgtccccagagtgcgcacgggctgctggggacgcccccctgagaagcctggagcaggccaaccggacccgttttccctttttctctgacgtaaagggtgaccacaggctggtgctggcagctgtagagacaactgtacttgtgctcatattcgcagtcagcctgcttggcaacgtctgtgccctggtcttggtggccaggcgacgtcggagaggtgccacagcatgcttggtgttaaatttattctgcgcggacctactgttcataagtgctatccctctggtgttagctgtgagatggactgaagcctggctgttaggacccgtggcttgccacctccttttttatgtgatgacactgtccgggtctgtgaccatactcacccttgcagccgtgtctcttgagagaatggtatgtatcgtgcacctccagagaggagtcagggggccggggcggagggctcgtgccgtactgctggccctgatctggggttactcagcagtggctgccctgcccttgtgtgtgttttttagggtggtcccccaaagattgccaggcgctgaccaggaaatctccatctgcaccctgatctggcccacaatcccaggtgaaatcagctgggacgtgagtttcgtgacccttaatttcctcgtgcccgggcttgtcatcgtgatctcctactccaagattctccagacctcagaacacctgctggatgctagggcagttgtgacccacagtgagattaccaaggcatcccgcaaaaggttgacggtatccttggcgtatagcgagtcacatcagatccgcgtgagccagcaagacttcaggctgtttcgtaccctgttcctgctgatggtctcttttttcatcatgtggtcgcccattattattacgatcctgctgattctgatacagaatttcaagcaggatttagttatctggcccagtctcttcttctgggtggtggcatttacattcgctaactctgccctgaatcccatcttgtataatatgacactgtgccgtaatgagtggaagaagattttctgctgcttttggtttcctgagaagggagcgatattgacagacacaagtgtgaagcgtaatgatcttagtatcatttccggatag

SEQ ID NO: 255546 - DNA, 1134 bp, Artificial Sequence
  derived and/or modified sequence
atgagcccagaatgtgcccgggctgctggagatgcccccctgcggagcctggagcaggccaacagaacccgcttccccttcttcagtgatgtgaagggggaccaccggctggtgctggccgctgtggagaccaccgtgctggtgctgatctttgctgtgtccctgctgggcaatgtgtgtgccctggtgctggtggccaggagaagaagaagaggagccacagcctgcctggtgctgaacctcttctgtgccgacctgctcttcatcagcgccatccccctggtgctggccgtgcgctggacagaggcctggctgctgggccctgtggcctgccacctgctcttctacgtgatgaccctgagcggctctgtgaccatcctgaccctggccgctgtgtccctggagaggatggtgtgcatcgtgcacctgcagaggggcgtgcggggccctggccggcgggcccgggctgtgctgctggccctgatctggggctacagcgctgtggccgccctgcccctgtgtgtgttcttccgggtggtgccccagaggctgcctggagctgaccaggagatcagcatctgcaccctcatctggcccaccatccctggagagatctcctgggatgtgtcctttgtgaccctgaacttcctggtgcccggcctggtgattgtcatctcctacagcaagatcctgcagaccagcgagcacctgctggatgcccgggctgtggtgacccacagcgagatcaccaaggccagcaggaagaggctgactgtgtccctggcctacagcgagagccaccagatccgggtgtcccagcaggacttccgcctcttccgcaccctcttcctgctgatggtgtccttcttcatcatgtggagccccatcatcatcaccatcctgctgatcctgatccagaacttcaagcaggacctggtgatctggcccagcctcttcttctgggtggtggccttcacctttgccaacagcgccctgaaccccatcctgtacaacatgaccctgtgcagaaatgagtggaagaagatcttctgctgcttctggttccctgagaagggggccatcctgacagacacctctgtgaagagaaatgacctgagcatcatcagcggctag

SEQ ID NO: 255547 - DNA, 1134 bp, Artificial Sequence
  derived and/or modified sequence
atgagccccgagtgcgcccgggccgccggcgacgcccccctgcggtccctggaacaggccaacagaacgcgttttcctttcttttccgacgtgaagggagaccacagattagtgctggcggctgtggagactaccgtgttggtcctcatatttgcagtttcgttgcttgggaatgtctgcgccttggtcttggtggcccggaggagaagaaggggggccacagcttgcctggtacttaatctcttctgtgccgatttgttgtttattagtgctattccgctggttctcgccgtgcgctggacggaggcctggctcttgggccctgtagcgtgtcacctattattttatgtgatgacattatccggctctgtgacaattcttaccctggccgccgtgagtcttgagcgcatggtgtgtattgttcatctgcagaggggtgttcggggccctggccgccgcgcccgcgcagtgctcctggcattaatctggggttattcggccgtcgcagccttgcccttatgtgtgttttttcgcgtcgtgcctcaaaggctgcctggcgcggaccaggaaataagtatctgcaccctcatctggccaacaatccccggggaaatcagttgggacgttagctttgtgaccttgaacttcctggtgccagggctcgtgatagttatctcttacagcaagattctgcaaacctccgaacacctgctcgatgcccgagccgtagtaacacactccgaaatcaccaaggctagtcgtaaaaggctgacagtatcactggcgtacagtgaatcccaccagatcagagttagccagcaggacttccggctgttcagaaccctctttctgctgatggtctcatttttcataatgtggtcacccattatcataactattctgctaatcctgatccagaacttcaagcaggacctcgtgatttggccttctctctttttctgggtagtcgcctttaccttcgccaattccgcactgaaccctatcctatataatatgacactctgtaggaacgaatggaagaagatcttctgttgcttttggttcccagagaagggcgcgatcctaaccgacacctcagtcaagaggaatgatctgtcaatcattagtggctag

SEQ ID NO: 255548 - DNA, 3653 bp, Artificial Sequence
  derived and/or modified sequence
agtcgcctcccagatgagcactctctcagaccgctgcgggccgccaggcgccgggaatgtcccctgaatgcgcgcgggcagcgggcgacgcgcccttgcgcagcctggagcaagccaaccgcacccgctttcccttcttctccgacgtcaagggcgaccaccggctggtgctggccgcggtggagacaaccgtgctggtgctcatctttgcagtgtcgctgctgggcaacgtgtgcgccctggtgctggtggcgcgccgacgacgccgcggcgcgactgcctgcctggtactcaacctcttctgcgcggacctgctcttcatcagcgctatccctctggtgctggccgtgcgctggactgaggcctggctgctgggccccgttgcctgccacctgctcttctacgtgatgaccctgagcggcagcgtcaccatcctcacgctggccgcggtcagcctggagcgcatggtgtgcatcgtgcacctgcagcgcggcgtgcggggtcctgggcggcgggcgcgggcagtgctgctggcgctcatctggggctattcggcggtcgccgctctgcctctctgcgtcttcttccgagtcgtcccgcaacggctccccggcgccgaccaggaaatttcgatttgcacactgatttggcccaccattcctggagagatctcgtgggatgtctcttttgttactttgaacttcttggtgccaggactggtcattgtgatcagttactccaaaattttacagacctcggaacacctcctggatgcaagagctgtcgtgactcacagtgagatcacaaaggcatcaaggaagaggctcacggtaagcctggcctactcggagagccaccagatccgcgtgtcccagcaggacttccggctcttccgcaccctcttcctcctcatggtctccttcttcatcatgtggagccccatcatcatcaccatcctcctcatcctgatccagaacttcaagcaagacctggtcatctggccgtccctcttcttctgggtggtggccttcacatttgctaattcagccctaaaccccatcctctacaacatgacactgtgcaggaatgagtggaagaaaattttttgctgcttctggttcccagaaaagggagccattttaacagacacatctgtcaaaagaaatgacttgtcgattatttctggctaatttttctttatagccgagtttctcacacctggcgagctgtggcatgcttttaaacagagttcatttccagtaccctccatcagtgcaccctgctttaagaaaatgaacctatgcaaatagacatccacagcgtcggtaaattaaggggtgatcaccaagtttcataatattttccctttataaaaggatttgttggccaggtgcagtggttcatgcctgtaatcccagcagtttgggaggctgaggtgggtggatcacctgaggtcaggagttcgagaccaacctgaccaacatggtgagacccccgtctctactaaaaataaaaaaaaaaattagctgggagtggtggtgggcacctgtaatcctagctacttgggaggctgaaccaggagaatctcttgaacctgggaggcagaggttgcagtgagccgagatcgtgccattgcactccaaccagggcaacaagagtgaaactccatcttaaaaaaaaaaaaaaaaagatttgttatgggttccttttaaatgtgaacttttttagtgtgtttgtaatatgatcaaatttaataaatatttatttatgactgttcagcaatcacatctcctacatataaagccacaccatagtggtttctgaagtgagtcttagaaccgattcaggacgcagatttctcctctgaagggtcacagccaccctgtgccctaccttggactcgcaagggtttaggatcattcgttgatgtcaagagcaattgaagaatttctaaggaacagttaaagatgacttacttttttttttttttcatttataaaaatgctatggacccttttaagagaatcggcatcatgaaatgagagagaaagtaggatggctctgaaatgtttgagagtgagttcaggagtggtttactcctgacgcatccagcagagatgcctcttaagcaccagccatggcagacagtgtcctttgtgctaggaatacagtggtgaaccagacagccatggccctctctcagggaacttaccttcgagtcaggggcagaaaaactaaataaaagtcaataaactatatctatatacagatacctatatatttgagatgagggtcttgctccaatgcccaggctggagtgcaacggcacaatcacggctccctgaagcctcaaatgccttggctcaagcaatcctcccgcctcagcctcccaagtagctgggattacaggcgtgagccgccacgcctggctacaagtcaataaatagtatagcatcacagagcgaataagcactgtgaagaaaatgggacgggggctatggtagtgatgggaatttagatcagatggggaggggcctaaggagacctttctgaggagtgacaaattggatcaaaaggtaagcgacaagaaagggccacctgtgtgaatgggggaagggacacagaagagatgttagtgcaaggaggctgacacgcttgaagggagagtggcgtaagccgactattgatggagcctcctctgcactaggcactgcctttaatgctgagatgaggggtacccggctggggcctgtcagttgaggccagagaaattgcagggttagatcacatagggcctaggagtttattctgttctccaagcccctggaggttggcaactggaggctgacgtgacctgatgaatgtgtgcaaagattaccctggctgctgggcagggaatagactctgaggagcatgagtgaaaatggagaccagttgggcagctgctgaagtgtgacatggggatgggaccttggaggtgagtggcattagggagggattgtgagaaatgacttgtaaatataccttgggaaggtaaaacaaagatgatttattgatgggaaggatggaattgatagaatgtgagggaaagggagaactcaaggggaatactctgattttttagcctgtcattggttggatggtgaagcaggcaacaaaaatgggggggcctgggcaaagattaggggggggggagccaagagtttcatttggagctcatcagtttgaaatctcagtgagacttccaaattgaataggcagttggatgcagagatgtggagcttgggcctggagatgcacattgtttggagatataaatggtgtttatagacctatggttttataatacatcccttggagagatagagagaaaccagagccaaagaccgaacccagggtcactccaccacttggaggctgggccagtggctggaatgcacagcagcacggggcctggtgtatagtaggtgttcaacaaatctttgttgctgaggaaatcagcaccagcagtagtgactgcttatgcagtttctggagcagcttgcttctgaagtcagattcatggatatcacaagctcgaagacaaacgaacagagatgttttgctcactttagttaatagatttgatcaattaaacctgtttttggaagtga

SEQ ID NO: 255549 - DNA, 1134 bp, Artificial Sequence
  derived and/or modified sequence
atgtccccagaatgcgccagggccgcaggtgatgccccactgcggagtctagagcaagccaacaggacccgctttccattctttagcgacgttaaaggcgatcatcggttggtgctagcggctgtggaaactactgtactcgtgttaatttttgcagtgagcctgctcggcaacgtatgtgccctggttctagtggcaaggcgtcgcaggaggggtgctacagcatgtttagttcttaatctgttttgcgcggacttacttttcatcagcgcaatcccgttagtgctggccgtgcgatggactgaagcatggctgctgggccctgtggcatgccatctcttattctatgtgatgacgctatccggatcggtgactattttgactctggcagccgtctctttggaacgcatggtctgtatcgtgcacctccaacgaggagttagaggccctgggcgtagagccagagcagttctgcttgccctgatttggggttacagtgctgtggccgcactgccattatgtgtgttctttcgtgtggtgccccagcggctgcccggagcagaccaggagattagcatctgcaccttaatttggccaacgatcccgggtgagataagttgggacgtctcgttcgtgactctaaattttctggtgcctggcctcgtgatagttataagctattcaaagatactccagacctccgagcacttgctggatgctagagccgtcgtgacccatagcgaaattactaaggccagcagaaagcggctcactgtgtctctagcttattctgagagccatcaaattcgtgtgtcacaacaggacttccgccttttccgcaccttgtttctcctaatggttagcttcttcataatgtggagccccattataattactatacttcttattcttatccaaaattttaagcaggacttagttatctggccatcgctgttcttttgggtggtggcctttacttttgccaactctgcgctcaacccaatcttatataatatgacgctgtgccgcaacgagtggaaaaaaattttctgttgtttttggtttcccgagaagggcgcaattctcacagacactagcgttaagagaaatgatctgtccattattagcgggtag

SEQ ID NO: 255550 - protein, 324 aa, Artificial Sequence
  derived and/or modified sequence
MPHLENVVLCRESQVSILQSLFGERHHFSFPSIFIYGHTASGKTYVTQTLLKTLELPHVFVNCVECFTLRLLLEQILNKLNHLSSSEDGCSTEITCETFNDFVRLFKQVTTAENLKDQTVYIVLDKAEYLRDMEANLLPGFLRLQELADRNVTVLFLSEIVWEKFRPNTGCFEPFVLYFPDYSIGNLQKILSHDHPPEYSADFYAAYINILLGVFYTVCRDLKELRHLAVLNFPKYCEPVVKGEASERDTRKLWRNIEPHLKKAMQTVYLREISSSQWEKLQKDDTDPGQLKGIRGSIETVTGDTSSANYQDTKVNTKEHSVRK

SEQ ID NO: 255551 - DNA, 975 bp, Artificial Sequence
  derived and/or modified sequence
atgccacatctggagaacgtggtgctctgcagagaaagccaggtaagcatcctccagtccctctttggcgagcgacatcattttagctttcctagcatttttatctacgggcacacagcctccggaaaaacctatgtcacgcagacattgctgaagacactcgaactgccccatgttttcgttaactgtgtggaatgcttcactctcagacttctgctcgagcagatcctgaacaagctgaatcacttgtcatcttcagaagacggttgcagtaccgagatcacctgcgagacattcaatgatttcgttcgacttttcaagcaagttaccacagcagaaaacttgaaggaccagactgtgtacatcgtgctagacaaagctgagtacctccgagacatggaggcgaatctgttacccggattcctccgcctgcaggaactggccgacagaaacgtgaccgttttgttcttgtctgaaattgtgtgggagaagtttaggcccaacacgggctgttttgagccctttgtgctgtacttcccggattactctatcggcaacctgcaaaaaattttatcacacgatcacccccctgagtactctgccgatttctacgccgcctacattaatatcctgctgggggtgttctatacagtatgccgggatttgaaagagttgcgacatctggctgttttgaactttcccaaatattgcgaaccggtggttaaaggcgaggccagtgagcgggacacaagaaagctgtggaggaacatagaaccccacctgaaaaaggcaatgcaaaccgtgtaccttagggaaatctccagtagccaatgggagaagctgcagaaagatgatacagatcccggccagctaaaaggaattcgtggcagtatcgaaaccgtcaccggcgacactagctccgctaattatcaggatacaaaggtgaataccaaggaacactcagtcagaaagtag

SEQ ID NO: 255552 - DNA, 975 bp, Artificial Sequence
  derived and/or modified sequence
atgccccacctggagaatgtggtgctgtgccgggagagccaggtgtccatcctgcagagcctgtttggagagcggcaccacttctccttccccagcatcttcatctacggccacacagccagcggcaagacctacgtgacccagaccctgctgaagaccctggagctgccccacgtgtttgtgaactgtgtggagtgcttcaccctgcggctgctgctggagcagatcctgaacaagctgaaccacctgagcagcagtgaagatggctgcagcacagagatcacctgtgagaccttcaatgactttgtgcggctcttcaagcaggtgaccacagctgagaacctgaaggaccagacagtgtacatcgtgctggacaaggccgagtacctgcgggacatggaggccaacctgctgcccggcttcctgcggctgcaggagctggccgacagaaatgtgacagtgctcttcctgtctgagatcgtgtgggagaagttccggcccaacacaggctgctttgagccctttgtgctgtacttcccagactacagcatcggcaacctgcagaagatcctgagccatgaccaccccccagagtacagcgctgacttctatgctgcctacatcaacatcctgctgggcgtcttctacacagtgtgccgggacctgaaggagctgcggcacctggccgtgctgaacttccccaagtactgtgagcctgtggtgaagggggaggccagcgagcgggacaccaggaagctgtggagaaatattgagccccacctgaagaaggccatgcagacagtgtacctgcgggagatcagcagcagccagtgggagaagctgcagaaggatgacacagaccccggccagctgaagggcatccggggcagcattgagaccgtgactggagacaccagcagcgccaactaccaggacaccaaggtgaacaccaaggagcacagcgtgaggaagtag

SEQ ID NO: 255553 - DNA, 975 bp, Artificial Sequence
  derived and/or modified sequence
atgccccacctggagaacgtggtgctgtgccgggagagccaggtgtccatactacagagtctgtttggagagaggcatcacttctcgttcccaagtattttcatatacggccatacagcgtctggaaagacctacgtgacgcaaaccctgctgaaaaccctcgagctcccacacgtgtttgtgaactgtgtggaatgttttaccctgcgcttactcttagagcagatcctgaacaagttgaatcatctgtccagttccgaggacggttgcagtactgagatcacttgtgagacctttaatgacttcgttaggctatttaagcaggtgacaactgctgaaaacttgaaggaccagaccgtatacatagtcctggacaaagccgagtatttacgcgacatggaggccaacctgttacccggatttcttcggctgcaagaactcgctgacagaaacgttacggtgctctttttgtcagagattgtgtgggaaaagttccggcctaatactggctgtttcgagcctttcgtgctgtacttccctgactattctattggcaatctgcaaaaaattcttagccacgatcatcctccagaatacagcgcggacttctacgctgcttatatcaatatcctgctaggggtgttttacactgtctgccgcgacctaaaagaactgagacacctggccgtcttaaacttcccaaaatattgcgagccggttgttaaaggcgaagccagtgaacgcgacacacggaaactgtggaggaatattgaaccacatcttaagaaggctatgcaaaccgtctacttacgggagatatcttcctcgcagtgggagaaattgcagaaggatgacacagaccctggccaacttaaaggcattcgcgggtctatagagaccgtgactggagacacctctagcgcaaactaccaggatacaaaggtgaacacaaaggagcattccgtgcgtaagtag

SEQ ID NO: 255554 - DNA, 1409 bp, Artificial Sequence
  derived and/or modified sequence
tgcaagggtcctgtgggctggctgcactggcctctgcggtggtgcctgccagaatgccccacttggaaaacgtggtgctttgtcgcgagtctcaagtgtccatcttgcagtccttgtttggagagagacatcatttcagctttccatccatttttatttatggacatactgctagtggaaagacctatgtaacacaaacgttgttgaaaactttagagctcccacatgtgtttgtgaattgtgttgaatgctttacattgaggctgcttttggaacaaattttaaacaaattgaatcatcttagttcttcagaggatggatgttctactgaaataacctgtgaaacatttaatgactttgttcgcttgtttaaacaagtaaccacagctgaaaatcttaaagatcagactgtatatattgttctagataaagcagagtatctaagagatatggaagcaaatcttttgcctggatttcttagattacaagaattggctgacagaaatgtgactgttctctttctcagtgaaattgtttgggaaaagtttcgtccaaatactggatgctttgagccgtttgtcttatatttccctgattacagcataggcaaccttcaaaagatcctgtcccatgatcatcctccagagtattcagctgatttctatgctgcctacattaacattcttcttggagttttctacactgtttgtcgagatttgaaagagctcagacatctggcagtacttaattttcctaaatattgtgaacccgtggttaaaggagaagcaagtgaacgtgatactcgcaaactgtggagaaatattgaacctcatttgaagaaagctatgcagactgtttatctcagggaaatatcaagttcccagtgggaaaagctacagaaagatgacacagatccggggcaactgaaaggtatcagaggaagtattgagacagttaccggagatacttcttcagctaattatcaagatactaaagttaatactaaagagcattcagtcaggaaatagtgttataaaagagaatttacttttcaagctataatgctattttgattaatgatttttctttaactgaagctctaatttaatgggaggaaataaaagtttgaataccagctttctattttctaaatattggattatatcatgaaaatcaagcagtttctatttctttaaatgcttttattaaagcaatctaattatgtgacagttttatctcattatgtttatatttcatgagttttatggaataaaatgtaattttatgttaatcggtttgggatatgcactttggtggttatgttttgaaaacattgtgcttttgtttaagaaaactactactttggattcatcccaaatattaaatagaactaattttacttaaaaaaa

SEQ ID NO: 255555 - DNA, 975 bp, Artificial Sequence
  derived and/or modified sequence
atgccacacctggagaacgtcgttctgtgccgggaatcacaggtgtcgattctgcaatcccttttcggcgagcgacaccacttcagctttccctccatatttatatatggtcacaccgcctcgggcaaaacctacgtaacacagactttgctcaaaacccttgagctgccccatgtattcgttaactgtgtcgagtgctttactctacgtcttctgctggaacaaattctgaacaagctcaatcaccttagtagctcagaggatggctgcagcacggagataacttgcgagactttcaacgattttgtaagactgttcaaacaggtgacaaccgcagaaaacttgaaggaccaaaccgtgtatattgttctggacaaggctgagtatctgcgggacatggaggccaatctgctcccaggctttttgcggttgcaagaacttgccgatcgaaatgttactgtgcttttcctgagtgaaatcgtgtgggagaagttccggcctaataccggatgctttgaacccttcgttttgtacttcccggattatagcatcggtaacctgcagaagatactgagccatgaccaccctcccgagtactcagctgatttctacgcagcctatataaatatactactcggcgtattttacaccgtgtgccgcgatctcaaggaactgaggcacctcgctgtgctgaattttcccaagtattgcgagccagtagttaagggcgaggctagcgaacgagacactaggaagctgtggaggaacatcgaacctcaccttaagaaagccatgcagactgtttatctgcgggagatttcttcatctcagtgggagaagctccagaaagacgatacagacccaggacagctcaagggtattcggggatcaatcgaaactgtcaccggcgatacatccagtgctaattatcaagatactaaagtgaacaccaaggagcactcggttcggaagtag

SEQ ID NO: 255556 - DNA, 975 bp, Artificial Sequence
  derived and/or modified sequence
atgccccacctggagaacgtggtgctgtgcagagagagccaggtgagcatcctgcagagcctgttcggcgagagacaccacttcagcttccccagcatcttcatctacggccacaccgccagcggcaagacctacgtgacccagaccctgctgaagaccctggagctgccccacgtgttcgtgaactgcgtggagtgcttcaccctgagactgctgctggagcagatcctgaacaagctgaaccacctgagcagcagcgaggacggctgcagcaccgagatcacctgcgagaccttcaacgacttcgtgagactgttcaagcaggtgaccaccgccgagaacctgaaggaccagaccgtgtacatcgtgctggacaaggccgagtacctgagagacatggaggccaacctgctgcccggcttcctgagactgcaggagctggccgacagaaacgtgaccgtgctgttcctgagcgagatcgtgtgggagaagttcagacccaacaccggctgcttcgagcccttcgtgctgtacttccccgactacagcatcggcaacctgcagaagatcctgagccacgaccacccccccgagtacagcgccgacttctacgccgcctacatcaacatcctgctgggcgtgttctacaccgtgtgcagagacctgaaggagctgagacacctggccgtgctgaacttccccaagtactgcgagcccgtggtgaagggcgaggccagcgagagagacaccagaaagctgtggagaaacatcgagccccacctgaagaaggccatgcagaccgtgtacctgagagagatcagcagcagccagtgggagaagctgcagaaggacgacaccgaccccggccagctgaagggcatcagaggcagcatcgagaccgtgaccggcgacaccagcagcgccaactaccaggacaccaaggtgaacaccaaggagcacagcgtgagaaagtag

SEQ ID NO: 255557 - protein, 122 aa, Artificial Sequence
  derived and/or modified sequence
MSTPARRRLMRDFKRLQEDPPAGVSGAPSENNIMVWNAVIFGPEGTPFEDVYADGSICLDILQNRWSPTYDVSSILTSIQSLLDEPNPNSPANSQAAQLYQENKREYEKRVSAIVEQSWRDC

SEQ ID NO: 255558 - DNA, 112 bp, Artificial Sequence
  derived and/or modified sequence
aacatcaaacgaaatcaaacggaattatcaaattgaatcgaagagaatcatcgaattgccacgaatgcaatcatctaatggtatggaatggaataatccatggacccagatg

SEQ ID NO: 255559 - DNA, 369 bp, Artificial Sequence
  derived and/or modified sequence
atgagcacccccgccagaagaagactgatgagagacttcaagagactgcaggaggacccccccgccggcgtgagcggcgcccccagcgagaacaacatcatggtgtggaacgccgtgatcttcggccccgagggcacccccttcgaggacgtgtacgccgacggcagcatctgcctggacatcctgcagaacagatggagccccacctacgacgtgagcagcatcctgaccagcatccagagcctgctggacgagcccaaccccaacagccccgccaacagccaggccgcccagctgtaccaggagaacaagagagagtacgagaagagagtgagcgccatcgtggagcagagctggagagactgctag

SEQ ID NO: 255560 - DNA, 369 bp, Artificial Sequence
  derived and/or modified sequence
atgtcaactccagccagaagacgactaatgcgggactttaaacggctccaggaagacccgccagcaggagtatctggagcccccagcgagaataacatcatggtctggaatgcagtcatctttggacccgaggggacacccttcgaagatgtctacgccgatggatccatctgtctggacattctgcaaaatcgttggtccccgacttacgacgtctccagtatcctgacaagtatacagtcgcttttggacgagccgaatccaaatagccccgcgaactctcaggccgcacaattgtatcaagagaataaaagagagtacgaaaagagagtgagcgcgatcgtggaacaaagttggcgcgattgttag

SEQ ID NO: 255561 - DNA, 369 bp, Artificial Sequence
  derived and/or modified sequence
atgagcaccccagcccggcggcggctgatgagggacttcaagaggctgcaggaggaccccccagctggggtgtctggggcccccagcgagaacaacatcatggtgtggaatgctgtgatctttggacctgagggcaccccatttgaagatgtgtatgcagatggcagcatctgcctggacatcctgcagaaccgctggagccccacctatgatgtgagcagcatcctgaccagcatccagagcctgctggatgagcccaaccccaacagccctgccaacagccaggccgcccagctgtaccaggagaacaagcgggagtatgagaagagggtgtctgccatcgtggagcagagctggagggactgctag

SEQ ID NO: 255562 - DNA, 369 bp, Artificial Sequence
  derived and/or modified sequence
atgagcacccccgcccggcggcggctgatgcgggacttcaagcggctgcaggaggatcccccagcaggggtaagcggcgccccctctgaaaataatatcatggtgtggaatgcggtgatatttggccctgaaggtaccccttttgaggacgtgtatgctgatggcagcatttgcctcgacatattacagaatagatggtcgccaacttatgatgtatccagcatcctaacctcgatccagtcattgctggatgagcctaaccctaactcccctgctaacagtcaggccgcccaactgtatcaagaaaacaaaagggagtatgaaaaaagggtcagtgctattgttgagcagagctggcgcgattgctag

SEQ ID NO: 255563 - DNA, 369 bp, Artificial Sequence
  derived and/or modified sequence
atgtccactccagctcgcagacggctgatgcgcgattttaagaggctccaggaggatccgcctgccggagtgtcaggggctccgagcgaaaataatataatggtgtggaatgccgtgatattcggaccggaaggaacccccttcgaagatgtctacgccgatgggtccatttgtctcgacattctgcagaatagatggtcccctacatacgatgtgtcctctatactgacgtcgatccaaagcctccttgacgaaccaaaccccaatagccctgcaaattcacaagcagcacagctgtaccaggaaaataagcgagagtatgagaagcgcgtctcagcaatagtcgaacaaagctggagggactgctag

SEQ ID NO: 255564 - DNA, 612 bp, Artificial Sequence
  derived and/or modified sequence
ccagtgtatgccccacccctgaccccgctcgcgacatgtccaccccggctcggcggcgcctcatgcgggacttcaagaggttgcaggaggatcctccagccggagtcagcggggctccgtccgagaacaacataatggtgtggaacgcggtcattttcgggcctgaagggaccccgtttgaggatgtctatgcagatggtagtatatgtctggacatacttcagaaccgttggagtccaacctatgatgtgtcttccattctaacatccatacagtctctgttggatgaacccaatcccaatagtccagcaaacagccaggctgctcagctgtaccaggagaacaaacgggaatatgaaaagcgtgtttctgcaatagtagaacaaagctggcgtgattgttgaccccgggtacagtttaaagaagctggccataagaaaaatatatattgatgtgtttgtcacctccctactcctgtcattacatttactttattaaaagcaaaataactgttgtgctgtttccatcttccttgccaagttttcctaccccttctaccctctccttaaacatcagaaaacaccctctatgaaatcaaatgtactgtacctg

SEQ ID NO: 255565 - protein, 183 aa, Artificial Sequence
  derived and/or modified sequence
MALLTAETFRLQFNNKRRLRRPYYPRKALLCYQLTPQNGSTPTRGYFENKKKCHAEICFINEIKSMGLDETQCYQVTCYLTWSPCSSCAWELVDFIKAHDHLNLGIFASRLYYHWCKPQQKGLRLLCGSQVPVEVMGFPKFADCWENFVDHEKPLSFNPYKMLEELDKNSRAIKRRLERIKQS

SEQ ID NO: 255566 - DNA, 552 bp, Artificial Sequence
  derived and/or modified sequence
atggcattattgaccgctgagacattccgcctgcagttcaacaataaacgcagactcaggagaccatactacccaagaaaggctctgctgtgttatcagctgactcctcagaatggaagtactccaaccagagggtatttcgaaaataagaagaaatgccacgctgaaatctgcttcataaatgaaatcaaatcaatgggcttggatgagacccaatgttaccaagtcacctgctatttgacgtggagcccgtgtagcagctgcgcctgggaactcgtggactttattaaagcacatgatcatttgaacctgggtattttcgcttccagactgtactaccattggtgcaagccccagcagaaggggctgcggctgttgtgtggaagtcaggtacccgtggaggtcatgggctttccgaaattcgccgactgttgggagaacttcgtagaccatgagaagcctctgtcatttaacccctacaagatgctggaagagctcgacaaaaacagccgggccatcaagcgccggctggaaagaataaaacagtcctag

SEQ ID NO: 255567 - DNA, 552 bp, Artificial Sequence
  derived and/or modified sequence
atggccctgctgacagctgagaccttccggctgcagttcaacaacaagaggcggctgcggcggccctactaccccaggaaggccctgctgtgctaccagctgaccccccagaatggcagcacccccacccggggctactttgagaacaagaagaagtgccacgccgagatctgcttcatcaatgagatcaagtccatgggcctggatgagacccagtgctaccaggtgacctgctacctgacctggagcccctgcagcagctgtgcctgggagctggtggacttcatcaaggcccatgaccacctgaacctgggcatctttgccagccggctgtactaccactggtgcaagccccagcagaagggcctgcggctgctgtgtggcagccaggtgcctgtggaggtgatgggcttccccaagtttgctgactgctgggagaactttgtggaccacgagaagcccctgtccttcaacccctacaagatgctggaggagctggacaagaacagccgggccatcaagaggcggctggagcgcatcaagcagagctag

SEQ ID NO: 255568 - DNA, 552 bp, Artificial Sequence
  derived and/or modified sequence
atggccctgctgaccgccgagaccttccggctgcagttcaacaacaagagacggttacgcagaccatattatcctcgaaaggcattgctgtgttaccagctcacaccgcaaaacggaagcaccccaactagaggctattttgaaaacaagaagaagtgtcatgccgagatctgcttcatcaatgaaattaagagtatgggcctggacgagacacaatgctaccaggtgacatgctacttgacatggtcaccatgctcatcatgtgcttgggagttggtggatttcatcaaagcccacgatcacctgaatctgggaatttttgcctctaggttatactaccactggtgtaagccccagcagaagggtctgcgacttctctgcggctcacaggtaccagtggaggtaatgggcttcccaaaatttgcggattgctgggagaatttcgtggatcacgagaagcctctatcttttaacccttacaagatgcttgaggagctcgataagaactcaagggccattaaaagacgtctagagcggattaagcagtcgtag

SEQ ID NO: 255569 - DNA, 552 bp, Artificial Sequence
  derived and/or modified sequence
atggccttgttgactgctgagactttccgcctccagtttaacaacaaaaggcgtctgcgacgcccatattacccccgaaaagccttactctgctatcagctcaccccgcagaatggatccacaccgactcgcggttacttcgaaaataaaaagaagtgccacgcggagatttgctttataaacgaaataaaaagcatgggactggatgaaacgcagtgttaccaggtaacttgctacctcacctggtctccctgctcctcctgtgcctgggagctggtagattttatcaaggctcacgatcatttaaacttgggcatctttgctagccggctctactaccactggtgcaaacctcagcaaaaaggcctacggttactgtgtggatcccaagtcccggttgaagttatggggttcccgaagttcgcggattgctgggaaaactttgttgaccacgagaagccgttatcatttaacccttacaagatgctggaggaactggacaaaaacagcagagctatcaagcggagactagaaaggataaagcagagctag

SEQ ID NO: 255570 - DNA, 1047 bp, Artificial Sequence
  derived and/or modified sequence
tgacttttgggagagctgaccttttgtgacttttgggagagctgccaaaagtgaaacttagtgcctcagacaagcaggggcaagtctgctaaggaagctgtggccagaagcacagatcagaaacacgatggctctgttaacagccgaaacattccgcttacagtttaacaacaagcgccgcctcagaaggccttactacccgaggaaggccctcttgtgttaccagctgacgccgcagaatggctccacgcccacgagaggctactttgaaaacaagaaaaagtgccatgcagaaatttgctttattaacgagatcaagtccatgggactggacgaaacgcagtgctaccaagtcacctgttacctcacgtggagcccctgctcctcctgtgcctgggagctggttgacttcatcaaggctcacgaccatctgaacctgggcatcttcgcctcccgcctgtactaccactggtgcaagccccagcagaaggggctgcggcttctgtgtggatcccaggtcccggtggaggtcatgggcttcccaaagtttgctgactgctgggaaaactttgtggaccacgagaaaccgctttccttcaacccctataagatgttagaggagctagataaaaacagtcgagccataaagcgacggcttgagaggataaagcagtcctgaagtgtggatgttttagagaatgacttaagaagtttgcagcttggacccgtatcccactcattatcaagaagcaactcaagatgactttccctggggcatgtcagttgcctcatagcctgctggtcctgtaagcaagcactaagctccacagtgccagttccttgccccaacctggccccatccaagtacagaagaccttcctttcctcctttttccatattgctttctgttctaagtgggtgaataattttataattgaaaaaataaagataaagtctgtaaatccagccgggtacggtggctcacgcctgtaatcctagcactttgggaggctgagatgctcggccaataaatttctattgtttatg

SEQ ID NO: 255571 - DNA, 552 bp, Artificial Sequence
  derived and/or modified sequence
atggccctgctgaccgccgagaccttcagactgcagttcaacaacaagagaagactgagaagaccctactaccccagaaaggccctgctgtgctaccagctgaccccccagaacggcagcacccccaccagaggctacttcgagaacaagaagaagtgccacgccgagatctgcttcatcaacgagatcaagagcatgggcctggacgagacccagtgctaccaggtgacctgctacctgacctggagcccctgcagcagctgcgcctgggagctggtggacttcatcaaggcccacgaccacctgaacctgggcatcttcgccagcagactgtactaccactggtgcaagccccagcagaagggcctgagactgctgtgcggcagccaggtgcccgtggaggtgatgggcttccccaagttcgccgactgctgggagaacttcgtggaccacgagaagcccctgagcttcaacccctacaagatgctggaggagctggacaagaacagcagagccatcaagagaagactggagagaatcaagcagagctag

SEQ ID NO: 255572 - protein, 483 aa, Artificial Sequence
  derived and/or modified sequence
MSVTKSTEGPQGAVAIKLDLMSPPESAKKLENKDSTFLDESPSESAGLKKTKGITVFQALIHLVKGNMGTGILGLPLAVKNAGILMGPLSLLVMGFIACHCMHILVKCAQRFCKRLNKPFMDYGDTVMHGLEANPNAWLQNHAHWGRHIVSFFLIITQLGFCCVYIVFLADNLKQVVEAVNSTTNNCYSNETVILTPTMDSRLYMLSFLPFLVLLVLIRNLRILTIFSMLANISMLVSLVIIIQYITQEIPDPSRLPLVASWKTYPLFFGTAIFSFESIGVVLPLENKMKNARHFPAILSLGMSIVTSLYIGMAALGYLRFGDDIKASISLNLPNCWLYQSVKLLYIAGILCTYALQFYVPAEIIIPFAISRVSTRWALPLDLSIRLVMVCLTCLLAILIPRLDLVISLVGSVSGTALALIIPPLLEVTTFYSEGMSPLTIFKDALISILGFVGFVVGTYQALDELLKSEDSHPFSNSTTFVR

SEQ ID NO: 255573 - DNA, 88 bp, Artificial Sequence
  derived and/or modified sequence
agcaacttcagcaaagtctcaggatacaaaatcgatgtgcaaaaatcacaagcattcttatacaccaacaacagataaacagagagcc

SEQ ID NO: 255574 - DNA, 1452 bp, Artificial Sequence
  derived and/or modified sequence
atgtccgtcactaagtccacagagggccctcagggagctgtggctattaagctggacctgatgtctccccccgagtcagcaaaaaagttagagaataaggacagcaccttcttagatgagagcccttcagaatctgccggcctgaagaaaactaaaggcattacagtattccaagccctgatccatctggtgaaagggaacatggggacgggcattctcggactcccacttgccgtgaaaaacgcaggaatcctgatgggtccgctgtctttattggtgatggggtttattgcctgccattgtatgcacatcttggtgaagtgtgcacaaagattttgcaagcgcctgaataaaccattcatggattacggggatactgtgatgcacggtcttgaggctaacccaaacgcctggttacagaatcacgcacattgggggcggcatattgtgtcatttttcctgattattacccagcttgggttctgctgtgtatacatcgtgtttctggccgataacctgaaacaggtcgtggaggccgtgaattccaccacaaacaactgctattcaaatgagactgtgatattgacacctacaatggactcccggttgtatatgctctccttcctgccatttcttgtgttgctggtcctcatcagaaatcttagaatcctcacgatcttctcaatgctagcaaatatctccatgctcgtgtcactggtgattattatacagtatataacccaggagataccagatccttccaggttgccgctggttgcgtcatggaagacctatcccctctttttcgggaccgcaatcttttcatttgagtccatcggggtggtcctacccctcgagaataaaatgaagaatgcccggcattttcctgccattcttagtctcgggatgtcaattgtcacctctctgtacatcggaatggccgctttgggttaccttagatttggcgacgacatcaaagctagtatcagtctgaacctgcccaactgctggctctaccagtcagtaaagctgctgtacatagccggcatcctttgcacttatgctctacagttctacgtgcctgctgaaatcataattccttttgctattagcagagtgtcaacaaggtgggccctcccacttgacctgtctattagactggtcatggtgtgtctgacatgcttgctcgctatcctaataccacgactggatctggtaatctccctggtaggatctgtctccggcactgcgctagcgctgatcattcctcccctgcttgaagtcaccaccttctatagcgagggcatgtccccactcaccatctttaaagatgccctgatctcaattctgggatttgtagggttcgttgtgggcacttaccaggccttagacgagctgttgaaaagcgaggattcccacccattctcaaattccacaacttttgttagatag

SEQ ID NO: 255575 - DNA, 1452 bp, Artificial Sequence
  derived and/or modified sequence
atgtctgtgaccaagagcacagagggcccccagggcgctgtggccatcaagctggacctgatgagccccccagagagcgccaagaagctggagaacaaggacagcaccttcctggatgagagccccagcgagagcgctggcctgaagaagaccaagggcatcaccgtcttccaggccctgatccacctggtgaagggcaacatgggcaccggcatcctgggcctgcccctggccgtgaagaatgccggcatcctgatgggccccctgagcctgctggtgatgggcttcatcgcctgccactgcatgcacatcctggtgaagtgtgcccagcgcttctgcaagaggctgaacaagcccttcatggactatggagacacagtgatgcacggcctggaggccaaccccaatgcctggctgcagaaccacgcccactggggccgccacatcgtgtccttcttcctgatcatcacccagctgggcttctgctgcgtgtacatcgtgttcctggccgacaacctgaagcaggtggtggaggccgtgaacagcaccaccaacaactgctacagcaatgagaccgtcatcctgacccccaccatggacagccggctgtacatgctgtccttcctgcccttcctggtgctgctggtgctgatccggaacctgcgcatcctgaccatcttctccatgctggccaacatctccatgctggtgtccctggtgatcatcatccagtacatcacccaggagatcccagaccccagccggctgcccctggtggcctcctggaagacctaccccctcttctttggaacagccatcttctcctttgagagcattggagtggtgctgcccctggagaacaagatgaagaatgcccggcacttccctgccatcctgagcctgggcatgagcatcgtgaccagcctgtacatcggcatggccgccctgggctacctgcgctttggagatgacatcaaggccagcatcagcctgaacctgcccaactgctggctgtaccagagcgtgaagctgctgtacatcgccggcatcctgtgcacctacgccctgcagttctacgtgcctgctgagatcatcatcccctttgccatcagccgggtgtccacccgctgggccctgcccctggacctgagcatccggctggtgatggtgtgcctgacctgcctgctggccatcctgatcccccggctggacctggtgatcagcctggtgggctctgtgtctggaacagccctggccctgatcatcccccccctgctggaggtgaccaccttctacagcgagggcatgagccccctgaccatcttcaaggatgccctgatcagcatcctgggctttgtgggctttgtggtgggcacctaccaggccctggatgagctgctgaagtctgaggacagccaccccttcagcaacagcaccacctttgtgaggtag

SEQ ID NO: 255576 - DNA, 1452 bp, Artificial Sequence
  derived and/or modified sequence
atgagcgtgaccaagagcaccgagggcccccagggcgccgtggccatcaagctggacttaatgtccccccccgagtcagccaagaaactggaaaacaaagattcgacttttctcgatgagagcccttcggaatccgcagggttgaagaagaccaaaggaataactgtgtttcaagcactcatccacctggttaaggggaatatgggcaccggcattctgggactgcccctggctgtgaagaatgcaggaatattgatgggacctctttcattgttggtcatggggttcatcgcatgtcactgcatgcacattttggtgaagtgcgctcagcggttctgtaagcgcctaaataagccattcatggactatggagacactgtgatgcatgggctcgaagcgaatcctaatgcctggttacagaaccacgctcactggggcaggcatattgtctccttctttttaattattacacagttgggtttctgctgtgtgtacattgtgttcttagccgacaacctgaagcaggtggtggaagcagtcaattctacaaccaacaactgctactcgaatgaaacagttattctcaccccgactatggatagtaggctgtacatgcttagcttcctgcccttcctagtgttattagtcctaatccggaatttgcggattctaaccatttttagtatgcttgcaaatatatcaatgctggtaagcctggtgataatcattcaatacattacccaggagatccccgatccatccaggctgcctctagtggcctcctggaaaacctaccctctattcttcggcaccgctattttctccttcgaaagcattggtgttgtgcttccattagagaacaagatgaagaacgcgaggcacttccctgctattcttagcctgggtatgagcatcgtgacctccctgtatatcggtatggctgctctggggtatctgagattcggggatgacatcaaagcctccattagtttaaacctgcctaattgttggttgtatcaatccgttaaactcctgtatatagccggaatcttgtgtacctacgcccttcagttttatgttcctgccgaaattataatcccctttgcaattagccgggtgagcactagatgggcactcccccttgatttgtctattagactggtgatggtgtgtctgacttgccttctggccattttgatcccccgtctggatctggttatcagcctggtgggatctgtttccggcacggccctggctctgataattccaccgcttctggaagttaccacattttatagcgaaggtatgagcccactgaccatttttaaggacgcgctcattagcatcctggggtttgttggcttcgttgtgggaacttatcaggctctcgatgagttgcttaagtctgaagattcacacccattttctaattcaacaacctttgttcggtag

SEQ ID NO: 255577 - DNA, 1452 bp, Artificial Sequence
  derived and/or modified sequence
atgtccgtgaccaaatccacagaaggaccccaaggcgcagtagccatcaagcttgacctgatgtccccaccagagtcagctaagaagcttgagaataaggactcaacttttctggatgagtctccctcagaatccgccggactgaagaaaactaagggaatcaccgtgttccaggccctcatacatctggttaagggaaatatgggcaccgggatccttggacttccactggcagttaaaaacgccggaatacttatgggacccctcagtctacttgtgatggggttcattgcgtgtcactgcatgcacatccttgtcaagtgcgcccaaagattttgcaaacgcttaaacaagcctttcatggattatggtgacactgtaatgcatgggttggaggctaatccaaatgcatggctccagaatcatgcgcactgggggcgacatatcgtttcattctttctgattattacccagctaggcttttgttgcgtatacattgtcttcctggcagacaacctcaagcaggtggtggaggccgttaacagcactactaataactgctacagtaacgaaaccgtcattctgacaccgacaatggactctagactctacatgctaagctttctgcccttcctggtcttgttggtgctgattagaaacctgaggatactgactatcttcagtatgttggcaaacataagcatgctggtgtcactggttatcataattcagtacatcacccaggagattcctgacccctccaggcttccactagtggcttcatggaaaacttatccgctcttcttcgggaccgcaatttttagcttcgagagcatcggcgtcgttctccccttggaaaataagatgaaaaacgcccgacattttcctgcaattttgagtctgggtatgagcatcgtgaccagcttgtacattggaatggccgctttgggctacttgcgtttcggcgacgacatcaaagcctctatttcactaaatctccctaattgctggctgtatcagagcgtgaagttgctgtatattgccggaattttgtgcacatatgccctgcagttttatgtacctgctgagattatcatcccttttgctatttcaagagtatctacgcgctgggccctaccattggacctctccattaggctcgtcatggtatgtctgacctgtctcctagccatcctgatcccccgactcgatctggtcatatcgctggtaggtagtgtgagcggaactgcactggccttgataatccctccccttcttgaagttaccacgttctacagtgagggaatgagccctctgacgattttcaaggacgccctgatttctatcctgggctttgtggggttcgttgttggcacataccaagccctcgacgagctgctgaaaagcgaagattctcacccattctctaactccaccacatttgtcaggtag

SEQ ID NO: 255578 - DNA, 3421 bp, Artificial Sequence
  derived and/or modified sequence
agcttggccagagccagcccgggcacacaccactgtgctggggtgtacatctacactagacaccttcctgcttccctccttccagagcagacctctttgtcaccccgagctccttgtttcttaagcagtcatgtctgtgacaaaaagtactgagggtccccagggagccgttgccatcaaattggaccttatgtcgcctcctgaaagtgccaagaagttggagaacaaggactctacattcttggatgaaagtccttcagagtcagcaggcttgaagaagaccaagggcataacagtgttccaggccttgattcacctggtgaaaggcaacatgggcacagggatcctgggactacccctcgctgtgaagaacgcgggcatcctgatgggcccactcagtctgctggtgatgggcttcattgcctgccactgtatgcacatcctggtcaagtgtgcccagcgcttctgtaagaggcttaacaagccctttatggactatggggacacggtgatgcatggactagaagccaaccccaacgcctggctccagaatcacgctcactggggaaggcatatcgtgagcttcttccttattatcacccaacttggcttctgctgtgtgtacattgtgtttttggctgataatttaaaacaggtagtggaagctgttaatagcacaaccaacaactgctattccaatgagacggtgattctgacccccaccatggactcgcgactctacatgctctccttcctgcccttcctggtgctgctggtcctcatccggaacctcaggatcttgaccatcttctccatgctggccaacatcagcatgctggtcagcttggtcatcatcatacagtacattacccaggaaatcccagaccccagccggttgccactggtagcaagctggaagacctaccctctcttcttcggaacagccattttttcttttgaaagcattggtgtggttctgcctctggaaaacaagatgaagaatgcccgccacttcccagccatcctgtctttgggaatgtccatcgtcacttccctatacattggcatggcggctctgggctacctgcggtttggagatgacatcaaggccagcataagccttaacctgcctaactgctggctgtaccagtctgtcaagcttctctacattgccggcatcctgtgcacctatgccctgcagttctacgtccctgcagaaatcatcatcccctttgccatctcccgggtgtcaacacgctgggcactgcctctggatctgtccattcgcctcgtcatggtctgcctgacatgcctcctggccatcctcatcccccgcctggacctggtcatctccctggtgggctccgtgagtggcaccgccctggccctcatcatcccaccgctcctggaggtcaccacgttctactcagagggcatgagccccctcaccatcttcaaggacgccctgatcagcatcctgggcttcgtgggctttgtggtggggacctaccaggccctggacgagctgctcaagtcagaagactctcaccccttttccaactccaccacttttgttcggtgagcctggcactgctccttgcctaccagcacccgacttttaattatatggatctctttttttttttttttttttttttgagacggagtttctgtcttgttgcccagactggagtacaatgatgcgatctcagctcaccacaacttcggcctcctgggttcaagcgattctcctgcctcagcctcccgagtagttgggattagaggcatagtccagcacgcctggctaattttgtatttttagtagagacggggtttctccatgttggtcaggctggtcttgaactcccgacctcaggtgatccacccaccccggcctcccaaaatgctgggatcacaggcgtgagccacctcgcctggccagatctcttttatatgcattatctttatgtcactgctttgccttttctctgggccaagtcatggtgaaacaagaaagctacaagctctaaatggtaattttttacatttttgttttgtttattacttcttcttttcatacctctggcattccactacattgtgagctttcccttggaaggctctggactctatccaagcttatgataattcacacaatgaatttcatacctagcgtggagctatgcaagaagcagccaccagagggccccaagtggcagcaactggccaaaggagatgcagccagctaagactgtccacactttggcagacaaccggttttcccttttctgggtctgttcaaaaagcaaacattaagggtgggcacataatccacaagccagaaagttgtgcacggctccagtgttgagatgggtagggccaagatgaccagtgtgaaaactctcagatagaaaggagccatgcatattaaatgaggggcaacaaacatttcaaacgattagataacattttctcccaactcaaagatcccaacaatgaataggaggcatggaagtagatgtgccaatggggagggatgaggagtgaacatgaatattatttgaatagactttacctcttaattcttgcaacatgcattcttgattacctactgtgtgccaaacaagattttgtagaatattgcaaaaatgaccataaattcctcgtgataatgtgactttgcacctgctcctatgaaaagatgaagtctgtatctgtatcccttaaatttttttgcttgtttgtcggttttgttttgtgttttgtttttttgagatgaagtctcgctctgttgcccaggctggagtgcaatggcacaatctcggctcactgcaacctccacctcctgggttcaagcgattcttctgcctcagcctcccaagtagctaggattacaagtgcctgccactatgcctggctaatttttgtttttcgtagagatggggttttaccatgttggccaggctggtctcaaactcctgacctcaggtgatccacttgcctcggcctcccaaagtgctgagattacaagtgtgagccaccacgcccagcctctcccctttaaatttgatcttggccttgtaacttgctttggccaatgggacattagtaaatgtgatgcagtcagaggtttggtaataacctatgcatcaggacttacatcacttgctgctctatggagttgagaccaccaagtaaagcatcctgggctagcctaccggaggatcagagaccatgtggaacataaatgaatcatcccagttgagccctgtccgcagatcaaccagcctaccaacttccagacacgagtaaagccatcctagactatatccaaccccagtcaggctgacacagaccataagaattgtacagataatccacagaactgtgataaataataaagatgtttgtaattttaata

SEQ ID NO: 255579 - DNA, 1452 bp, Artificial Sequence
  derived and/or modified sequence
atgagcgtgaccaagagcaccgagggcccccagggcgccgtggccatcaagctggacctgatgagcccccccgagagcgccaagaagctggagaacaaggacagcaccttcctggacgagagccccagcgagagcgccggcctgaagaagaccaagggcatcaccgtgttccaggccctgatccacctggtgaagggcaacatgggcaccggcatcctgggcctgcccctggccgtgaagaacgccggcatcctgatgggccccctgagcctgctggtgatgggcttcatcgcctgccactgcatgcacatcctggtgaagtgcgcccagagattctgcaagagactgaacaagcccttcatggactacggcgacaccgtgatgcacggcctggaggccaaccccaacgcctggctgcagaaccacgcccactggggcagacacatcgtgagcttcttcctgatcatcacccagctgggcttctgctgcgtgtacatcgtgttcctggccgacaacctgaagcaggtggtggaggccgtgaacagcaccaccaacaactgctacagcaacgagaccgtgatcctgacccccaccatggacagcagactgtacatgctgagcttcctgcccttcctggtgctgctggtgctgatcagaaacctgagaatcctgaccatcttcagcatgctggccaacatcagcatgctggtgagcctggtgatcatcatccagtacatcacccaggagatccccgaccccagcagactgcccctggtggccagctggaagacctaccccctgttcttcggcaccgccatcttcagcttcgagagcatcggcgtggtgctgcccctggagaacaagatgaagaacgccagacacttccccgccatcctgagcctgggcatgagcatcgtgaccagcctgtacatcggcatggccgccctgggctacctgagattcggcgacgacatcaaggccagcatcagcctgaacctgcccaactgctggctgtaccagagcgtgaagctgctgtacatcgccggcatcctgtgcacctacgccctgcagttctacgtgcccgccgagatcatcatccccttcgccatcagcagagtgagcaccagatgggccctgcccctggacctgagcatcagactggtgatggtgtgcctgacctgcctgctggccatcctgatccccagactggacctggtgatcagcctggtgggcagcgtgagcggcaccgccctggccctgatcatcccccccctgctggaggtgaccaccttctacagcgagggcatgagccccctgaccatcttcaaggacgccctgatcagcatcctgggcttcgtgggcttcgtggtgggcacctaccaggccctggacgagctgctgaagagcgaggacagccaccccttcagcaacagcaccaccttcgtgagatag

SEQ ID NO: 255580 - protein, 289 aa, Artificial Sequence
  derived and/or modified sequence
MKTLPAMLGTGKLFWVFFLIPYLDIWNIHGKESCDVQLYIKRQSEHSILAGDPFELECPVKYCANRPHVTWCKLNGTTCVKLEDRQTSWKEEKNISFFILHFEPVLPNDNGSYRCSANFQSNLIESHSTTLYVTDVKSASERPSKDEMASRPWLLYRLLPLGGLPLLITTCFCLFCCLRRHQGKQNELSDTAGREINLVDAHLKSEQTEASTRQNSQVLLSETGIYDNDPDLCFRMQEGSEVYSNPCLEENKPGIVYASLNHSVIGPNSRLARNVKEAPTEYASICVRS

SEQ ID NO: 255581 - DNA, 870 bp, Artificial Sequence
  derived and/or modified sequence
atgaagaccctgcccgccatgctgggcaccggcaagctgttctgggtgttcttcctgatcccctacctggacatctggaacatccacggcaaggagagctgcgacgtgcagctgtacatcaagagacagagcgagcacagcatcctggccggcgaccccttcgagctggagtgccccgtgaagtactgcgccaacagaccccacgtgacctggtgcaagctgaacggcaccacctgcgtgaagctggaggacagacagaccagctggaaggaggagaagaacatcagcttcttcatcctgcacttcgagcccgtgctgcccaacgacaacggcagctacagatgcagcgccaacttccagagcaacctgatcgagagccacagcaccaccctgtacgtgaccgacgtgaagagcgccagcgagagacccagcaaggacgagatggccagcagaccctggctgctgtacagactgctgcccctgggcggcctgcccctgctgatcaccacctgcttctgcctgttctgctgcctgagaagacaccagggcaagcagaacgagctgagcgacaccgccggcagagagatcaacctggtggacgcccacctgaagagcgagcagaccgaggccagcaccagacagaacagccaggtgctgctgagcgagaccggcatctacgacaacgaccccgacctgtgcttcagaatgcaggagggcagcgaggtgtacagcaacccctgcctggaggagaacaagcccggcatcgtgtacgccagcctgaaccacagcgtgatcggccccaacagcagactggccagaaacgtgaaggaggcccccaccgagtacgccagcatctgcgtgagaagctag

SEQ ID NO: 255582 - DNA, 870 bp, Artificial Sequence
  derived and/or modified sequence
atgaagactttacccgccatgctgggaactggcaagctgttctgggtgtttttccttatcccttatcttgatatctggaacatccacggtaaggaatcgtgcgacgttcagctctacatcaagcgccagtctgagcacagtattcttgcaggcgacccgtttgagctggagtgccccgttaaatactgcgctaacaggcctcatgtgacttggtgcaagttgaatggaaccacctgcgttaagctcgaggacaggcaaacatcttggaaggaggagaagaatatcagcttctttattctgcactttgagcctgtgttgcccaacgacaacggaagttacaggtgctccgcaaatttccagtcaaacctgatcgagagccactcgaccacactgtatgtgaccgacgtgaaaagcgcttccgagagacccagcaaggatgagatggccagcaggccctggcttctttatcgactgctccccctgggcggtctgcccttactaatcaccacctgtttttgcctgttttgctgtctacgacgacatcaggggaaacaaaacgagttatcagacactgccggtcgagaaatcaaccttgtcgacgcccacctcaagagtgagcaaacagaagcaagtactcggcagaattctcaggtacttctctcagagacagggatctatgataacgatcctgacctgtgttttcgtatgcaggaggggtcagaggtttatagcaacccttgcttagaagaaaacaagcctgggatcgtctatgccagcctgaatcactctgtgatcgggccaaatagccggctggcccggaacgtaaaagaggcacccacagaatatgcatccatatgcgttaggtcctag

SEQ ID NO: 255583 - DNA, 870 bp, Artificial Sequence
  derived and/or modified sequence
atgaagaccctgcctgccatgctgggcaccgggaagctgttctgggtgttcttcctgatcccctacctggacatctggaacatccacggcaaggagagctgtgatgtgcagctgtacatcaagaggcagagcgagcacagcatcctggccggggacccctttgagctggagtgccctgtgaagtactgtgccaaccggccccacgtgacctggtgcaagctgaatggcaccacctgtgtgaagctggaggaccggcagacctcctggaaggaggagaagaacatctccttcttcatcctgcactttgagcctgtgctgcccaatgacaatggcagctaccgctgcagcgccaacttccagagcaacctgattgagagccacagcaccaccctgtatgtgacagatgtgaagagcgccagcgagcggcccagcaaggatgagatggccagccggccctggctgctgtaccgcctgctgcccctgggcggcctgcccctgctgatcaccacctgcttctgcctcttctgctgcctgcggcggcaccagggcaagcagaatgagctgagtgacacagctggccgggagatcaacctggtggatgcccacctgaagtctgagcagacagaggccagcacccggcagaacagccaggtgctgctgtctgaaacaggcatctatgacaatgaccctgacctgtgcttcaggatgcaggagggcagcgaggtgtacagcaacccctgcctggaggagaacaagccaggcatcgtgtatgccagcctgaaccacagcgtgattggccccaacagccggctggccagaaatgtgaaggaggcccccacagaatatgccagcatctgtgtgcgctcctag

SEQ ID NO: 255584 - DNA, 870 bp, Artificial Sequence
  derived and/or modified sequence
atgaagaccctgcccgccatgctgggcaccggcaagctgttctgggtattcttcctgattccttacctagatatttggaacattcacggcaaagaaagctgtgatgtgcaactgtatatcaagcgtcaaagcgagcactctattttggcaggcgacccctttgagctggaatgcccggtgaagtactgcgctaaccggcctcatgtgacctggtgtaagttgaacgggaccacttgcgtgaaactggaggacaggcaaacatcatggaaagaagagaagaacatctccttcttcatactccatttcgagcccgtgcttccaaacgacaatggtagctatcgctgctctgcgaatttccagtctaacctaattgagtcacacagcacgactctatatgtgaccgatgtcaaatccgcatctgaacggccttcaaaggacgagatggcatccaggccttggttattataccggctgttgccccttggcgggctgcccctgctgatcacaacctgtttctgcttgttctgctgcctgaggaggcatcagggaaagcagaacgagctgagtgacactgctggcagagagataaacctggttgatgcacacttgaaaagcgaacagacggaagcctctacccgccagaactctcaagtccttctgtccgagaccggcatttacgataatgacccagacctctgctttaggatgcaggaaggctctgaggtatacagcaacccctgcctcgaagaaaacaaacccggcatagtgtacgctagtctgaaccatagcgtgataggcccgaacagtcggcttgcaagaaacgtgaaggaggcccctacagaatacgcctccatttgtgtgcggtcatag

SEQ ID NO: 255585 - DNA, 870 bp, Artificial Sequence
  derived and/or modified sequence
atgaagaccctccccgcaatgctgggaaccggtaaactgttctgggtgttttttctcatcccttacctggacatctggaatatacatggaaaagaaagctgcgacgtacagctgtatattaagagacagtccgaacacagcatcctcgccggtgatccttttgaattggagtgtcctgtcaaatattgtgccaaccggccacacgtcacttggtgcaaactgaacgggaccacctgcgtcaaactcgaggacaggcagacgagctggaaagaagagaaaaacatctctttctttattcttcacttcgagccagtgttacctaacgacaacgggagttaccgctgcagcgccaatttccagagtaacctcatagagagccactctaccacactttacgtgacagatgttaagtccgcctctgagagaccctcaaaggacgagatggcttcgcgaccttggttgctgtacagacttttacccctgggcggactgcccctgcttatcaccacctgtttttgtttgttttgttgcttgagacgacaccaaggcaagcagaacgaactatctgacactgcaggaagagagatcaacctggttgatgcccatttgaagtcagaacaaacagaggcatctacgaggcaaaattcacaggtacttctgtccgagactggcatttatgataacgatcctgatctttgtttcaggatgcaggaagggtccgaagtatactctaatccttgcctagaagaaaataaaccaggaatcgtatacgcttccttgaaccattctgtaatcggtccgaactccaggctggctcggaacgtgaaggaagctcctactgaatatgccagcatctgcgtacgatcttag

SEQ ID NO: 255586 - DNA, 3213 bp, Artificial Sequence
  derived and/or modified sequence
gtctttctgttcactttttttcacaaaatcatccaggctcttcctactctcctctcttaccacctctctcttcttttttttttttttttagttatttcacagatgccactggggtaggtaaactgacccaactctgcagcactcagaagacgaagcaaagccttctacttgagcagtttttccatcactgatatgtgcaggaaatgaagacattgcctgccatgcttggaactgggaaattattttgggtcttcttcttaatcccatatctggacatctggaacatccatgggaaagaatcatgtgatgtacagctttatataaagagacaatctgaacactccatcttagcaggagatccctttgaactagaatgccctgtgaaatactgtgctaacaggcctcatgtgacttggtgcaagctcaatggaacaacatgtgtaaaacttgaagatagacaaacaagttggaaggaagagaagaacatttcatttttcattctacattttgaaccagtgcttcctaatgacaatgggtcataccgctgttctgcaaattttcagtctaatctcattgaaagccactcaacaactctttatgtgacagatgtaaaaagtgcctcagaacgaccctccaaggacgaaatggcaagcagaccctggctcctgtatcgtttacttcctttggggggattgcctctactcatcactacctgtttctgcctgttctgctgcctgagaaggcaccaaggaaagcaaaatgaactctctgacacagcaggaagggaaattaacctggttgatgctcaccttaagagtgagcaaacagaagcaagcaccaggcaaaattcccaagtactgctatcagaaactggaatttatgataatgaccctgacctttgtttcaggatgcaggaagggtctgaagtttattctaatccatgcctggaagaaaacaaaccaggcattgtttatgcttccctgaaccattctgtcattggaccgaactcaagactggcaagaaatgtaaaagaagcaccaacagaatatgcatccatatgtgtgaggagttaagtctgtttctgactccaacagggaccattgaatgatcagcatgttgacatcattgtctgggctcaacaggatgtcaaataatatttctcaatttgagaatttttactttagaaatgttcatgttagtgcttgggtcttaagggtccataggataaatgattaaaatttctctcagaaacttatttgggagctttttatattatagccttgaataacaaaatctctccaaaactggttgacatcatgagtagcagaatagtagaacgtttaaacttagctacattttacccaatatacaaactcgatcttgcctttgaagctattggaaagacttgtagggaaaagaggtttgtgttacctgcatcagttcactacacactcttgaaaacaaaatgtcccaatttgactaaccaaccataaatacagtaatgattgtatatttcaagtcagtcttccaaaataagaaatttttgctgtgtcagtctaagaatggtgtttcttaaatgcaaaggagaaatcattttaggcttgatgtaagaaaatgaaaataataaatggtgcaataaaaatatagaatataccaattggatatagggtagatgttccacatacctggcaaacaaatgcttatatctactctgttagattgataagcaaatataggtattaatggagcagtcaacgtatagcacatttatgaggaaagtagagactcactgggtcacatagactaatggataggaatgtgacataatgctgctgaattaatatacttatgggcatctgaatagtttaaaagttagtcagaataggtatcactgggcaagtgaagatagcttaaactgcttcatgcttgacttgatagcaagttaaagtgcaattaatggaatggaggaaaacccagaatatttaattggtctgtaggggtcaatttgctttcattcaccacatctgcatcttgctgttcttcttactaaggaatcagggcaaatcatctgtagtgacatattttagtttgctaatcatttattttaaaatactgaggttgcagccacttaagagtatagcaaaagatggattcagatttttggactttccaaagtacttgagttaaactatttcaaaaatagcctataattttattcaacagtttgaggctattcgaattctcaggtgctgctactgaataatgtaatagtcttcatacaaagtggatagcaaaggttaaaatccatttcaacaaatatgtgagctgagctgctgcacaaaggaatgtgatgtgtgtgtgtgtgtgtgtgtgtgtgtgtgttaggtggggtgggtgacaacagaaatggtgcacgagaaactgatcaaattgacattatattttcagtttgcttatgaagctcaaaatactagagtaaatgggtcattaaagaaaataatatgtgaaattatggagtttagaatacaagtggggtatatatacaaaaagacaaaactgaggttttgtggtggagagattttcttaagtaacactggcattaagttttagctccttagatttgggggtgcaaatattcttttgagtcactgttattttgccaattacacctagaatttcaagcaaccaattcgagataggctgttttagccaggctgcatttgtggacaacttatgtaagaaagacatgttagaatagctgcttgtggtattcttaaaaatagaaacaggaaatatggggaggatacatttagctgtcctcttatcagatgaacacacgaaattgaacagttccttcatgattctctcaaacttaaaagcaaaatatttctgtcttatttaaaatatccttagtatgtcttatagtaaagataatgctgataatgatttcatctctaagatgtattaatatatttgtactgtttgccaaaatcacaaatcatttatgtttttattccttttcaaaatggtgtcagagacatacatgcattttcccaaatgactctacttcactattatttacatggcttatttcattagtttatagagggtttgagaaaaagaatatgtagataatttaatggtttttcacaaattttaagcttgtgattgtgctcaatgagaaggtaaagttattaaaacttatttgaaatc

SEQ ID NO: 255587 - protein, 914 aa, Artificial Sequence
  derived and/or modified sequence
MANINLKEITLIVGVVTACYWNSLFCGFVFDDVSAILDNKDLHPSTPLKTLFQNDFWGTPMSEERSHKSYRPLTVLTFRLNYLLSELKPMSYHLLNMIFHAVVSVIFLKVCKLFLDNKSSVIASLLFAVHPIHTEAVTGVVGRAELLSSIFFLAAFLSYTRSKGPDNSIIWTPIALTVFLVAVATLCKEQGITVVGICCVYEVFIAQGYTLPLLCTTAGQFLRGKGSIPFSMLQTLVKLIVLMFSTLLLVVIRVQVIQSQLPVFTRFDNPAAVSPTPTRQLTFNYLLPVNAWLLLNPSELCCDWTMGTIPLIESLLDIRNLATFTFFCFLGMLGVFSIRYSGDSSKTVLMALCLMALPFIPASNLFFPVGFVVAERVLYVPSMGFCILVAHGWQKISTKSVFKKLSWICLSMVILTHSLKTFHRNWDWESEYTLFMSALKVNKNNAKLWNNVGHALENEKNFERALKYFLQATHVQPDDIGAHMNVGRTYKNLNRTKEAEESYMMAKSLMPQIIPGKKYAARIAPNHLNVYINLANLIRANESRLEEADQLYRQAISMRPDFKQAYISRGELLLKMNKPLKAKEAYLKALELDRNNADLWYNLAIVHIELKEPNEALKNFNRALELNPKHKLALFNSAIVMQESGEVKLRPEARKRLLSYINEEPLDANGYFNLGMLAMDDKKDNEAEIWMKKAIKLQADFRSALFNLALLYSQTAKELKALPILEELLRYYPDHIKGLILKGDILMNQKKDILGAKKCFERILEMDPSNVQGKHNLCVVYFEEKDLLKAERCLLETLALAPHEEYIQRHLNIVRDKISSSSFIEPIFPTSKISSVEGKKIPTESVKEIRGESRQTQIVKTSDNKSQSKSNKQLGKNGDEETPHKTTKDIKEIEKKRVAALKRLEEIERILNGE

SEQ ID NO: 255588 - protein, 148 aa, Artificial Sequence
  derived and/or modified sequence
MANINLKEITLIVGVVTACYWNSLFCGFVFDDVSAILDNKDLHPSTPLKTLFQNDFWGTPMSEERSHKSYRPLTVLTFRLNYLLSELKPMSYHLLNMIFHAVVSVIFLKVCKLFLDNKSSVIASLLFAVHPIHTEAVTGVVGRAELLS

SEQ ID NO: 255589 - DNA, 2745 bp, Artificial Sequence
  derived and/or modified sequence
atggccaacatcaacctgaaggagatcaccctgatcgtgggcgtggtgaccgcctgctactggaacagcctgttctgcggcttcgtgttcgacgacgtgagcgccatcctggacaacaaggacctgcaccccagcacccccctgaagaccctgttccagaacgacttctggggcacccccatgagcgaggagagaagccacaagagctacagacccctgaccgtgctgaccttcagactgaactacctgctgagcgagctgaagcccatgagctaccacctgctgaacatgatcttccacgccgtggtgagcgtgatcttcctgaaggtgtgcaagctgttcctggacaacaagagcagcgtgatcgccagcctgctgttcgccgtgcaccccatccacaccgaggccgtgaccggcgtggtgggcagagccgagctgctgagcagcatcttcttcctggccgccttcctgagctacaccagaagcaagggccccgacaacagcatcatctggacccccatcgccctgaccgtgttcctggtggccgtggccaccctgtgcaaggagcagggcatcaccgtggtgggcatctgctgcgtgtacgaggtgttcatcgcccagggctacaccctgcccctgctgtgcaccaccgccggccagttcctgagaggcaagggcagcatccccttcagcatgctgcagaccctggtgaagctgatcgtgctgatgttcagcaccctgctgctggtggtgatcagagtgcaggtgatccagagccagctgcccgtgttcaccagattcgacaaccccgccgccgtgagccccacccccaccagacagctgaccttcaactacctgctgcccgtgaacgcctggctgctgctgaaccccagcgagctgtgctgcgactggaccatgggcaccatccccctgatcgagagcctgctggacatcagaaacctggccaccttcaccttcttctgcttcctgggcatgctgggcgtgttcagcatcagatacagcggcgacagcagcaagaccgtgctgatggccctgtgcctgatggccctgcccttcatccccgccagcaacctgttcttccccgtgggcttcgtggtggccgagagagtgctgtacgtgcccagcatgggcttctgcatcctggtggcccacggctggcagaagatcagcaccaagagcgtgttcaagaagctgagctggatctgcctgagcatggtgatcctgacccacagcctgaagaccttccacagaaactgggactgggagagcgagtacaccctgttcatgagcgccctgaaggtgaacaagaacaacgccaagctgtggaacaacgtgggccacgccctggagaacgagaagaacttcgagagagccctgaagtacttcctgcaggccacccacgtgcagcccgacgacatcggcgcccacatgaacgtgggcagaacctacaagaacctgaacagaaccaaggaggccgaggagagctacatgatggccaagagcctgatgccccagatcatccccggcaagaagtacgccgccagaatcgcccccaaccacctgaacgtgtacatcaacctggccaacctgatcagagccaacgagagcagactggaggaggccgaccagctgtacagacaggccatcagcatgagacccgacttcaagcaggcctacatcagcagaggcgagctgctgctgaagatgaacaagcccctgaaggccaaggaggcctacctgaaggccctggagctggacagaaacaacgccgacctgtggtacaacctggccatcgtgcacatcgagctgaaggagcccaacgaggccctgaagaacttcaacagagccctggagctgaaccccaagcacaagctggccctgttcaacagcgccatcgtgatgcaggagagcggcgaggtgaagctgagacccgaggccagaaagagactgctgagctacatcaacgaggagcccctggacgccaacggctacttcaacctgggcatgctggccatggacgacaagaaggacaacgaggccgagatctggatgaagaaggccatcaagctgcaggccgacttcagaagcgccctgttcaacctggccctgctgtacagccagaccgccaaggagctgaaggccctgcccatcctggaggagctgctgagatactaccccgaccacatcaagggcctgatcctgaagggcgacatcctgatgaaccagaagaaggacatcctgggcgccaagaagtgcttcgagagaatcctggagatggaccccagcaacgtgcagggcaagcacaacctgtgcgtggtgtacttcgaggagaaggacctgctgaaggccgagagatgcctgctggagaccctggccctggccccccacgaggagtacatccagagacacctgaacatcgtgagagacaagatcagcagcagcagcttcatcgagcccatcttccccaccagcaagatcagcagcgtggagggcaagaagatccccaccgagagcgtgaaggagatcagaggcgagagcagacagacccagatcgtgaagaccagcgacaacaagagccagagcaagagcaacaagcagctgggcaagaacggcgacgaggagaccccccacaagaccaccaaggacatcaaggagatcgagaagaagagagtggccgccctgaagagactggaggagatcgagagaatcctgaacggcgagtag

SEQ ID NO: 255590 - DNA, 447 bp, Artificial Sequence
  derived and/or modified sequence
atggccaacatcaacctgaaggagatcaccctgatcgtgggcgtggtgaccgcctgctactggaacagcctgttctgcggcttcgtgttcgacgacgtgagcgccatcctggacaacaaggacctgcaccccagcacccccctgaagaccctgttccagaacgacttctggggcacccccatgagcgaggagagaagccacaagagctacagacccctgaccgtgctgaccttcagactgaactacctgctgagcgagctgaagcccatgagctaccacctgctgaacatgatcttccacgccgtggtgagcgtgatcttcctgaaggtgtgcaagctgttcctggacaacaagagcagcgtgatcgccagcctgctgttcgccgtgcaccccatccacaccgaggccgtgaccggcgtggtgggcagagccgagctgctgagctag

SEQ ID NO: 255591 - DNA, 2745 bp, Artificial Sequence
  derived and/or modified sequence
atggccaatataaatctgaaagagatcacactgatcgtgggcgtcgtgaccgcgtgttactggaactcgttgttctgcggcttcgtattcgacgatgtaagcgctatcctagataacaaggacctgcaccccagcacacccctgaagacactgtttcagaatgacttctggggcacaccaatgagcgaagaacgttcccataagtcttatagacctctgacagtgctcacatttcggctcaattatctgctgtcagagctgaagccaatgtcctaccatctgctgaacatgatctttcacgccgtggtgagtgtgattttcctgaaggtgtgtaagttgtttcttgataataaaagctctgtcattgcctcacttctctttgctgtacacccaatccatacagaggcagttaccggggttgtgggacgcgcggagctgttgtcatcaattttctttcttgcagccttcctcagctacacccgaagtaaaggccctgataattccatcatctggacccccatagccctcacagtgttcctcgtagccgttgctaccctttgtaaggagcaagggatcaccgttgtgggaatctgttgcgtctacgaggtgttcatcgcccaggggtatactctcccactgctgtgtacaacggctggccaattcctgagaggcaagggctccattccattcagtatgctgcagacccttgtgaagctgattgtgctcatgttttccaccttgcttctggtcgtgatcagagtgcaagtgatccagagccaactgcctgtcttcacccgttttgacaacccagccgcagtgtccccaacacccacaagacagttgacgtttaactatctgctcccagtgaatgcctggcttcttctgaatccaagtgagctgtgttgcgattggacgatggggacgattccgctcattgagtctctactggatattagaaacctggcaaccttcacgttcttctgttttctgggtatgcttggcgtgttcagcatacgttactcaggagatagcagcaaaactgtgctgatggccctatgcctcatggccctaccattcataccagcatccaatttgtttttcccagtcgggttcgtggttgcagagagggtgctgtatgtcccttcgatggggttttgcatacttgtggcccatggatggcaaaaaatttcaactaagtccgtcttcaagaagctgtcatggatctgcttgtctatggtgatcctgactcattcattaaaaacatttcatagaaactgggactgggagagcgaatacactctgtttatgtcagccttgaaggtgaataagaacaacgcaaagctgtggaataatgtgggccacgctcttgagaacgagaagaactttgagagggccttaaagtactttttgcaagctacccacgtgcagccagacgacatcggagcgcatatgaatgtcggtaggacatacaagaatctcaatcggactaaggaagccgaggagtcatatatgatggctaagagcttgatgccacaaattattcctggcaaaaagtatgctgcaagaatcgcccctaaccatctgaatgtttacatcaatctcgccaacctgattagggccaatgagtcccgtcttgaggaggccgaccagctttaccgacaagccattagcatgcgccccgactttaagcaggcatatatctctcgaggcgagctgctgcttaagatgaacaagcctctgaaggccaaagaggcctacctgaaagcgttggagctggatcgcaacaatgcagacctgtggtacaatctcgccatcgtacacattgagcttaaagagcctaacgaggcgttgaaaaacttcaatcgggcgctggagctaaaccccaagcataagctggccctgttcaattcagctatagtgatgcaagaaagtggggaagtgaagctgcgaccggaagcccgcaaaagattattgagttatatcaatgaagaaccactcgacgcgaacggctacttcaacctgggcatgctggcaatggatgataagaaagataatgaggcggagatttggatgaaaaaagccatcaagctccaggctgattttcggagtgctctctttaatctagccctgctgtactcgcagacagcgaaggagctgaaggcgctgccgattttagaagagctgctccggtactacccagatcacatcaaggggcttatcttgaagggtgatatcctgatgaaccagaagaaagacatcttaggggcaaaaaagtgtttcgagcgcattctagagatggatccaagtaatgttcaaggcaaacataatctgtgcgtggtgtatttcgaagagaaggacctcctcaaagcagaacggtgcctactggaaaccctggccctcgctccacatgaagagtatatccagaggcacctgaacattgtgagggacaagatctcttcctctagctttattgagcccatcttcccgacgtctaagatatccagtgtcgaaggaaagaagataccaaccgagtcggtgaaagaaatccgcggggaaagccggcagacacaaattgtgaagacatccgataacaagtcgcagtctaaatcaaataagcagttgggaaaaaacggagatgaggagaccccccacaagactactaaagacattaaggagatcgagaagaagcgggtggcagcactcaaaaggctcgaggagatcgaaaggatcctgaacggcgagtag

SEQ ID NO: 255592 - DNA, 447 bp, Artificial Sequence
  derived and/or modified sequence
atggccaatatcaacctcaaagaaatcaccctcattgtgggcgtggtaaccgcttgttactggaacagtctattctgcgggttcgtcttcgatgacgtatctgccatacttgacaataaggacttacacccgagcactccgctgaagaccctatttcagaacgatttctgggggactccaatgtccgaggaacgctcccacaaatcctatcgacccctcactgtgcttaccttccgcctgaactacctcctgtccgagctgaagcccatgagttaccatcttctgaacatgatttttcatgccgtagtgtccgtcatattcctgaaggtctgtaaactctttctggacaataagtcctcagtcatcgcgtcactgctgttcgcggtgcatcctattcacacggaggccgtaactggggtggtaggtcgagccgaactgctcagttag

SEQ ID NO: 255593 - DNA, 2745 bp, Artificial Sequence
  derived and/or modified sequence
atggccaacatcaacctgaaggagatcaccctcatcgtgggcgtggtgacagcctgctactggaacagcctcttctgtggctttgtgtttgatgatgtgtctgccatcctggacaacaaggacctgcaccccagcacccccctgaagaccctcttccagaatgacttctggggcacccccatgtctgaggagaggagccacaagagctaccggcccctgactgtgctgaccttccggctgaactacctgctgtctgagctgaagcccatgagctaccacctgctgaacatgatcttccacgctgtggtgtctgtcatcttcctgaaggtgtgcaagctgttcctggacaacaagagcagcgtcatcgccagcctgctgtttgctgtgcaccccatccacacagaggccgtgactggagtggtgggccgggcagagctgctgagcagcatcttcttcctggccgccttcctgagctacaccaggagcaaaggaccagacaacagcatcatctggacccccatcgccctgactgtgttcctggtggccgtggccaccctgtgcaaggagcagggcatcaccgtggtgggcatctgctgcgtgtatgaggtgttcatcgcccagggctacaccctgcccctgctgtgcaccacagctggccagttcctgcggggcaagggcagcatccccttctccatgctgcagaccctggtgaagctgattgtgctgatgttcagcaccctgctgctggtggtgatccgggtgcaggtgatccagagccagctgcccgtcttcaccaggtttgacaacccagctgctgtgagccccacccccacccggcagctgaccttcaactacctgctgcctgtgaatgcctggctgctgctgaaccccagcgagctgtgctgtgactggaccatgggcaccatccccctcatcgagagcctgctggacatccggaacctggccaccttcaccttcttctgcttcctgggcatgctgggcgtcttcagcatccgctacagcggggacagcagcaagacagtgctgatggccctgtgcctgatggccctgcccttcatcccagccagcaacctcttcttccctgtgggctttgtggtggccgagcgggtgctgtatgtgcccagcatgggcttctgcatcctggtggcccacggctggcagaagatcagcaccaagagcgtcttcaagaagctgtcctggatctgcctgtccatggtgatcctgacccacagcctgaagaccttccacaggaactgggactgggagagcgagtacaccctcttcatgtctgccctgaaggtgaacaagaacaatgccaagctgtggaacaacgtgggccacgccctggagaatgagaagaactttgagcgggccctgaagtacttcctgcaggccacccacgtgcagccagatgacatcggggcccacatgaatgtgggccgcacctacaagaacctgaacagaaccaaggaggccgaggagagctacatgatggccaagagcctgatgccccagatcatccctgggaagaagtatgctgccagaattgcccccaaccacctgaatgtgtacatcaacctggccaacctgatccgggccaatgaaagccggctggaggaggccgaccagctgtaccggcaggccatctccatgaggccagacttcaagcaggcctacatcagcagaggagagctgctgctgaagatgaacaagcccctgaaggccaaggaggcctacctgaaggccctggagctggacaggaacaatgctgacctgtggtacaacctggccatcgtgcacatcgagctgaaggagcccaatgaggccctgaagaacttcaacagagccctggagctgaaccccaagcacaagctggccctcttcaacagcgccatcgtgatgcaggagagcggggaggtgaagctgcggcctgaggccaggaagaggctgctgagctacatcaatgaggagcccctggatgccaacggctacttcaacctgggcatgctggccatggatgacaagaaggacaatgaagctgagatctggatgaagaaggccatcaagctgcaggccgacttccgcagcgccctcttcaacctggccctgctgtacagccagacagccaaggagctgaaggccctgcccatcctggaggagctgctgcgctactacccagaccacatcaagggcctcatcctgaagggggacatcctgatgaaccagaagaaggacatcctgggcgccaagaagtgctttgagcgcatcctggagatggaccccagcaatgtgcagggcaagcacaacctgtgtgtggtgtactttgaggagaaggacctgctgaaggccgagcgctgcctgctggagaccctggccctggcccctcatgaggagtacatccagaggcacctgaacatcgtgcgggacaagatcagcagcagcagcttcatcgagcccatcttccccaccagcaagatcagctctgtggagggcaagaagatccccacagaatctgtgaaggagatccggggggagagccggcagacccagatcgtgaagaccagtgacaacaagagccagagcaagagcaacaagcagctgggcaagaatggagatgaggagaccccccacaagaccaccaaggacatcaaggagattgagaagaagagggtggccgccctgaagaggctggaggagattgagcgcatcctgaatggagagtag

SEQ ID NO: 255594 - DNA, 447 bp, Artificial Sequence
  derived and/or modified sequence
atggccaacatcaacctgaaggagatcaccctcatcgtgggcgtggtgacagcctgctactggaacagcctcttctgtggctttgtgtttgatgatgtgtctgccatcctggacaacaaggacctgcaccccagcacccccctgaagaccctcttccagaatgacttctggggcacccccatgtctgaggagaggagccacaagagctaccggcccctgactgtgctgaccttccggctgaactacctgctgtctgagctgaagcccatgagctaccacctgctgaacatgatcttccacgctgtggtgtctgtcatcttcctgaaggtgtgcaagctgttcctggacaacaagagcagcgtcatcgccagcctgctgtttgctgtgcaccccatccacacagaggccgtgactggagtggtgggccgggcagagctgctgtcctag

SEQ ID NO: 255595 - DNA, 2745 bp, Artificial Sequence
  derived and/or modified sequence
atggccaacatcaacctgaaggagatcaccctgatcgtgggcgtggtgacagcatgttactggaactcacttttctgtgggttcgtgttcgacgatgtgtccgccattcttgataacaaggacctccaccctagtacacctctcaagacattattccagaatgatttctgggggacccctatgtccgaagaaaggagccataaatcctaccggcccctgacagtgttaacattccgtcttaactatctgctgagtgagcttaaacctatgtcttaccatctgctgaatatgatctttcatgctgtagtttctgtcatcttcctaaaggtgtgtaaactgttccttgacaacaagagtagcgttattgcatcccttctctttgccgttcatccaatccacacagaagctgtgactggggtcgtggggcgtgctgaactgctgtcttctatctttttcttggctgccttcctttcatatacacgtagtaaaggacccgataactcaattatttggacacccatcgcgcttacagtctttctggttgcagtggcaaccctttgtaaggagcagggtatcacagtcgttgggatctgctgtgtgtatgaagtgttcattgctcagggctacacccttcctcttctctgtacaaccgccgggcagtttttgcggggtaagggatccattccttttagtatgctacagaccctggtaaagctgatagtgctcatgttcagtacactcctgctggtggtaatcagagttcaggtgattcaatcccagctaccggtgtttactcggtttgacaacccagccgcagtttcccccactcccacccgccagctgacctttaattatctacttcccgtgaacgcctggttgttgctgaacccctcggagttatgttgtgactggactatgggtactatccccctgatcgaatccttgttggatatccggaatctggccactttcactttcttttgtttcctgggcatgctgggggtgtttagcattaggtattctggggattcctccaaaacagttctcatggcactgtgcttgatggctctgccattcatccctgcttctaaccttttttttcccgtggggtttgtggttgccgaaagggttctttacgttccctccatgggtttctgtattttagtggcgcacggttggcaaaagatctctaccaaatccgtgttcaagaagctatcctggatttgtctatccatggtaatcctgacacactcattgaaaacattccacaggaactgggattgggagagcgagtatactttatttatgagtgccctgaaggtcaataaaaacaacgccaaattgtggaataacgttggtcacgcactggaaaatgagaagaatttcgaaagggcgctcaagtacttcctgcaggccacccacgtgcagcccgacgacatcggagcacacatgaacgttggaaggacctataagaacctgaaccggactaaggaagcagaagaaagttacatgatggccaagagcttgatgccacaaatcatccctgggaagaaatacgcggccagaattgctccgaaccatctgaatgtctatattaaccttgccaacctaatcagagccaacgagtctcgactggaagaggcagatcaactttaccggcaggccatctccatgagacccgatttcaaacaggcgtacatatcacgaggagaattactgctgaagatgaataaaccgctgaaggccaaagaggcctacctgaaggcactggagcttgacaggaacaatgcagatctctggtacaacctggcaatcgtacacattgagcttaaggagccgaacgaggctctgaagaactttaatagagccttggaactgaaccccaaacacaaactggcgctgtttaactcagcgattgtaatgcaggaatccggggaggtcaagctacggcccgaggcccggaaacgcctgctgtcctacatcaacgaggagcctctggatgctaatggttatttcaacctgggaatgctcgcaatggacgacaaaaaggataatgaggcggagatctggatgaagaaagctatcaagctgcaagccgacttccggtccgcactgtttaatctggctctgctctactcccagacggccaaggaactaaaggctcttcccatcctggaggaactgttgagatactaccctgaccacattaaaggactgattctcaaaggcgacatcctgatgaatcagaagaaggacatcctgggcgcgaaaaagtgttttgagcggatcctggagatggacccttcaaacgtgcagggtaaacacaacttgtgtgtggtatattttgaagagaaggatctcctgaaagcagagaggtgcttactggagacgctcgctctcgctccacatgaagaatacatccagcgccatcttaacatcgtccgcgacaagatctcctcatcttctttcatcgaaccgatattccctacatccaagatcagcagtgtagagggcaaaaaaatccccaccgagagtgtaaaagagatccggggtgagagtcgacagacacagatcgtgaagactagcgataataaaagtcagtcaaagtcaaataagcagctgggcaagaatggcgacgaggagaccccccacaagactacgaaagatattaaagagattgaaaagaaaagggtagccgccctcaaacgcctggaggaaattgaaaggattcttaacggggagtag

SEQ ID NO: 255596 - DNA, 447 bp, Artificial Sequence
  derived and/or modified sequence
atggccaacatcaacctgaaggagatcaccctgatcgtgggcgtggtgacagcctgctattggaattctctattttgtggcttcgtatttgatgatgtctccgccattctggacaacaaagaccttcacccctccacacccctgaaaacactgttccagaacgatttctggggtacacctatgtcggaggagcgttcgcacaagtcatatcgccccctgaccgtgctcaccttccgcttgaactacctactgtctgagctcaaacctatgtcatatcacctgctaaatatgattttccacgcagttgtatctgttatctttttgaaagtgtgtaagttgtttctagataacaagagtagcgtgatcgcttctctgctgtttgctgttcatcctattcataccgaggcggtgactggggtcgtcggcagggcagaactgctgagctag

SEQ ID NO: 255597 - DNA, 2745 bp, Artificial Sequence
  derived and/or modified sequence
atggccaatataaacctcaaggagatcaccctgatcgttggggtggtgaccgcttgctattggaacagccttttctgcgggtttgtgtttgacgatgtgtctgccattctggacaataaggatcttcatcccagcactcctctaaaaacattgttccaaaatgacttttggggcacacccatgagcgaggagcgatcgcacaagtcttaccggcctctgacagttcttacattcaggttgaactacttactttccgagcttaaacccatgtcttatcatctcctgaatatgatattccacgcggtggtttccgtcatctttctgaaggtgtgtaaattgtttttggataacaagagcagcgtcatagctagtcttcttttcgcagtgcaccctatccacactgaggctgttactggagtcgtgggacgagcagaattactctcatccattttctttttggctgcattcctaagttatacgcgttcaaaggggcctgataacagcatcatctggacacccatagccctgaccgtatttcttgtcgccgtcgcaaccttgtgcaaggagcaggggattacagtggtggggatttgctgtgtgtatgaggtgtttatagcacagggttacactttaccccttctttgcaccacagcagggcaattcctcagggggaaaggaagcattcctttctctatgctgcagaccttggtgaagttgatcgttctgatgttctctaccctactgctcgtggtgataagggtgcaggtaatacagagccaattgcctgtgttcacgcgattcgacaatccagccgcagtgtccccaacccctacccgccagctaacgtttaattatttattacccgttaacgcctggctcctgttaaatccttcagagttgtgctgtgattggacgatgggcactatcccactgattgagtccttgctggacatccggaacctggctacctttactttcttttgcttcctaggaatgctcggagtgttttcaatcagatactcaggagatagcagcaaaacagtactcatggctctgtgtctgatggcattgccctttatcccagccagtaacctgtttttccccgtgggcttcgttgtggccgaacgggtgctgtatgtgccatcaatgggcttttgcatcctggtcgcccacggctggcaaaagatctccactaaaagtgtgtttaagaagcttagctggatctgcctcagtatggtgattttaacacattccctgaaaactttccatcggaactgggactgggaatccgagtatacgctatttatgtcagctcttaaggtgaataagaataatgctaaactgtggaataatgtggggcacgcgctcgagaacgagaagaactttgagcgggcactcaagtatttcctgcaggcaacacatgtccagcctgacgacatcggggcacacatgaatgtcgggagaacttataaaaacctgaaccgcactaaagaagctgaagaatcatatatgatggctaaaagcctaatgccacaaatcatcccaggaaagaagtatgccgcaagaatcgctcctaatcacctgaatgtgtacatcaacctggccaatctgattagagccaatgagtctcgcctggaggaggccgaccagctgtacaggcaggccatcagtatgcgtcccgattttaagcaggcatacatatcgcgaggcgagctccttctcaagatgaataaaccgctgaaggcaaaagaggcatacctgaaggcattggaacttgacagaaataatgccgatctgtggtacaacctagccatcgtgcacatagagttaaaggagccgaacgaggccctcaagaacttcaaccgggcattagagctaaaccccaaacataagcttgccctatttaatagtgccatcgtaatgcaggagtcaggcgaggttaagctgcgccctgaagctcgcaaacgcttactgtcttacattaatgaggaacccctagatgcgaatggctactttaatctagggatgctggccatggatgacaagaaggataacgaagctgagatctggatgaaaaaagcaatcaaactgcaggcagacttccgctccgctctcttcaacttggcgctgctgtatagccagaccgccaaagagctcaaggcattaccaatcctcgaggagctgctgcggtactatcctgatcatatcaagggcctaattctgaaaggagatattttgatgaatcagaaaaaagatatcctgggcgcaaagaaatgctttgagcgaatcctcgaaatggatcctagcaatgtgcaaggaaagcataacctgtgtgtcgtgtactttgaggagaaggatctgctgaaggccgagcgttgcctgcttgaaaccctggcacttgccccacatgaagagtacatacagcgtcacctgaatatcgttagggataaaatttcgtcttcaagcttcattgagcccattttccctacaagcaagatatcgtccgtggaaggcaagaagataccaacagagtcggtcaaggagataaggggagagagtcgccagactcagatcgtgaaaacctctgacaataagagccagagtaagagtaataagcagctcggaaagaatggcgatgaggaaaccccccacaaaacaaccaaagacatcaaggagattgagaagaagagggtggccgctttgaaacgactggaggaaattgaaaggatcctaaacggcgagtag

SEQ ID NO: 255598 - DNA, 447 bp, Artificial Sequence
  derived and/or modified sequence
atggcgaatattaacctgaaggaaatcacccttatcgtgggagtggtcaccgcctgttactggaacagcttgttttgcgggtttgtctttgatgatgtgagcgccatcctggataacaaagatctgcatccaagtactccgctgaagactttgtttcagaacgatttctggggaactcctatgtctgaagaacgctcacataaatcttaccgaccactgactgtgctgactttccgtctcaactaccttctctcagagctgaagccgatgtcctatcacctgcttaacatgatttttcatgccgtggtgagcgtgatctttctcaaagtatgcaagctcttcttagacaacaagagcagtgtgatagcttcgcttttgtttgccgttcacccaatccatacagaggccgtcaccggtgttgtgggcagggccgagcttctgtcctag

SEQ ID NO: 255599 - DNA, 7203 bp, Artificial Sequence
  derived and/or modified sequence
atgcaacgcgtaagactgcgacggtaccggggcggcggggaaggaccgagaggcgggaggagcagcggctcaggcgcctgcaaactggtggcctgaacgaggtagaccatgactgtggtttcagtggcgtcactcgctgggctgctcttcctgaggttttcctaagccatcccctggcggaaccgcccccagtttttgtccagaagtgcttatagaaaagatggctaatattaacctaaaagaaataaccttaatagtaggtgtggttactgcctgctattggaacagcctcttttgtggttttgtttttgatgatgtttcagcaatactggataacaaagacttgcatccatctacacctttaaaaactttatttcaaaatgacttctggggaacccctatgtctgaggagagaagccacaagtcttaccgtcccttaacagtattgacatttcgcttaaattatttgttaagtgaactaaaaccaatgtcatatcatctcctgaatatgatttttcatgctgtggttagtgtgatatttctcaaagtatgcaaactttttctggacaacaagagtagtgtgattgcttctttactttttgcagtgcacccaatacatacagaagcagtaacaggagttgttggaagagcagaacttttgtcatctatcttttttctagcagcttttttgtcatataccagatcaaaaggaccagacaattccataatatggactccaattgccttgacagtgtttttagtggctgttgcaacattatgtaaagaacaaggaataacagttgtaggaatttgctgtgtgtatgaagtgtttattgcccaggggtatactttgccattactatgtactactgctggacagtttctccgtggaaagggtagcattccattttctatgctgcagacactagtaaaactcattgtcttgatgttcagtacattattacttgttgtgattagagtccaggttattcaatcccaacttccagtattcaccaggtttgataacccagctgctgtaagcccaactcctacaaggcaactaacttttaactacctccttcctgtgaatgcttggttgttattaaatccttcagagctctgctgtgattggaccatgggaacaataccacttatagagtcattactagatattcgaaatctggccacatttactttcttttgttttctggggatgttgggagtattcagtatcagatactctggtgattcctccaagactgttttaatggcgctttgtttaatggcattaccatttattcctgcatcgaaccttttttttccagttggatttgttgttgccgagcgagtattatatgttcccagcatggggttctgtattttggtagcccatggatggcagaaaatatcaacaaaaagtgtatttaaaaagctatcctggatttgtctgtctatggtgatactcactcattccttaaaaacattccacagaaattgggattgggagtctgaatatacattgtttatgtcagccttgaaggtaaataaaaataatgccaaactttggaataatgtgggtcatgctctggaaaatgaaaagaactttgagagagctttgaaatacttcttacaggctacccatgttcagccagatgatattggtgcccatatgaatgtaggaagaacttataaaaatttaaatagaaccaaagaagctgaagaatcttacatgatggctaaatcactgatgcctcaaattattcctggtaaaaaatatgcagccagaattgcccctaaccacctaaatgtttatatcaatctggctaacctgatccgagcaaatgagtcccgactggaagaagcagatcagctgtaccgtcaagcaataagcatgaggcccgacttcaagcaggcttacattagcagaggagaattgcttttaaaaatgaataaacctcttaaagcaaaggaagcatatcttaaagcactagagctggacagaaataatgcagatctttggtacaacttggcaattgtacatattgaacttaaagaaccaaatgaagccctaaaaaactttaatcgtgctctggaactaaatccaaagcataaactagcattattcaactctgctatagtaatgcaagaatcaggtgaggttaaactcagacctgaagctagaaaacgacttctaagttatataaatgaagagccactagatgctaatgggtatttcaatttgggaatgcttgccatggatgacaaaaaggacaatgaagcagagatttggatgaagaaagccataaagttacaagccgacttccgaagtgctttgtttaatctggctctcctgtattcccagactgcaaaggaattaaaggctttgccaattttggaggagttactcagatactaccctgatcatatcaagggcctcattttaaaaggagacattctgatgaatcaaaagaaagatatactaggagcaaaaaaatgttttgaaaggattttggagatggatccaagcaatgtgcaaggaaaacacaatctttgtgttgtttattttgaagaaaaagacttattaaaagctgaaagatgccttcttgaaacactggcattagcaccacatgaagaatatattcagcgccatttgaatatagtcagggataagatttcctcatctagttttatagagccaatattcccaaccagtaagatttcaagtgtggaaggaaagaaaattccaactgaaagtgtaaaagaaattagaggtgaatccagacaaacacaaatagtaaaaacaagtgataataaaagtcagtctaaatccaacaaacaattaggaaaaaatggagacgaagagacaccccacaaaacaacaaaagacatcaaagaaattgagaagaaaagagttgctgctttaaaaagactagaagagattgaacgtattttaaatggtgaataacattaatatttatcgtgacaatggtatcaaagaacatcaatccgtatcatgtgattgcttttactgggagctttgaaaaaaagttcaagggttcctaatggtcaatcatgagctgccttgaagtaggatcaaaataagattttcattaaagacctgtattatcccaggatgtatattatgtatcgctgttttcagagtgtgggtgaatatagcagaaatattacagcggaagtgacaaatttacaacttttattatagaaagaaggtgtttctggcaatgtaatctttactgctctcaattaaaaataattttgaggcctgaatgataatcccttgaggacaaatccaacatgtgctggtttattctgttaattcccatttatttgcctacttcatttttcttgcacctcttagaatctaactatgaattgaaaacacttaagtaattctgtttaatcaagggatttacactacaaaagaatgctggctttttttatgttgtattccttagttgagttttagaaggaatgcttgatgaaacattttaaaataagtcatgacatgttagcttgagaatgtattttcataattgtatacttgtttttaactttaaatgtaatttttaatcaggtaaagtttgacacatgtatagctacatacacacatttttaatggtgctcatatatactgtattttttgttgtttagttttacttattgagagtgtcacaacatgaatcacataatcatgattttttttttttacttttactccccaaattattcatgtttcttagatcgtagtcattgagaagtcccaataactctaaacttttgagttataacgtagtaaacttctctttcatctttgtgttagctctgtagtcttaacctggattttaatttttttgtttccaaagtcacaattgaattattcttagataccttaagccactgaattcagttctgtttgactgaaagcaaaacaacgtgacagtttattttcaaacactaacttcttgatattttgttatggtatatctttttattaaatatttattttgactaagctttcataaaatatttgaagctattttaatcatcaagtatggaaaacaaattactattgcattttcctatatatgcatatattatggattaaccagaattgtatcatttttggcctaatgtctggatataaaagataattagcctactatagtattaataaatttttcagttggtttgggcaaatttaaacctgaaaaataggttaaaaagtagttacaaattaaacttactaatttatacctgattttttttcttgaattaaagtacattttaaatgagctttataataccttaaaaagttggttctaatttaaaatatgaaagctctggctatcatcctgggatagtaatttctaattatatagtatttcaaaactatatattttttagttcctttgagataactaatttctaattatatatgtttcaaaaaccatatcctgtattttttttaagaattgttttataaataggtcataagatacaaggtctgcattagaagacccactcttactaggttccctaaggatctgccatagatttttttttttttttttttttttttaggtagtttaaagcaagcactgataccagtgggagttggtcttgatctaggagattctgttaagcatccaaaaacaatgcctaatttcagttcttaggttatggcttgtgactccagataaaagatggagaatacctcatgtactgtgacttgaaaatgaattcttaaaattcttaggctctctccatgtatctttcttaaggaaaagtttctgagtgtgatctctcttttgccatagtatcaagtggagggtagttcagaaaagttaataggaaatcttttgtgacagcagactataatagaagtttgagtaatattttaataaatttatataattcaaatgataaaaatgtatcaatgttatccaatgatttttattaaaaaattaccttattattagaactgtgcctattacataaaaagtgctcatgtatttgaattttaaataatttatttaaatcaagaccaccataagtcattaataatttaataattgttttaaatcagtggttttcaaccctcacttcatattagaatcatctgaggacttttaatatggaatccacctcataacaattaagtctaaatttctggaagatggagccatgcttgtttttccaaaagctctttgagtgattctaatttgtagtcagagttgaagaccactgctctaaattagtgcaggaaaatgcttttatttctcccatgttaacttttaaaactagtaatgtacccagttaagttttgatggtttaaattccactaaagaacatattcttctaataactagcatttattacatgaaatttaagagtttaagttccatcaaactagcccttgtgtaagattattatttcttctctataacttcaaaatagatatttcattcaaactgttcaggtgagaaaacataatggatttttttttttttcctctggagctgcctgttcagtgagatggaggaggtgggcacatttaaggtcagttcactaacctatggttcagagttctgatcatatggaagtttggaaaagagagcttatcacaggtttgtatgctggtgaatggatagttttaattctcactgtctcaaaagagaatcagctctccagcagttctagaaaagctttgacaatccccaaggggcagtgttaccttactccttcactgcttcttagaaggtagaattaagtttctggaattgcacctacatgttttcttattaacattcagaattgggaatattaatttttccagtgagtagttttctgaaattggtaacttggagagtaaaataacgtattttgcttttcaattttgtgtttgtttacttttatgtaaaaatttgatatgtgaattacacagttctaataaaacctcatgccttttcattacatctaatttgaactctcaacttcatgttacagaatgctttaaagatgctttaatgaaaagtattaagaaaatatatagatttgtatgtcagtttatacttcagaaatccatatatttgtcatatttatttttttagaaacctcctaattggataactagatggtatttaaaatgaatgcccaaaaatatcttgtacctttgtccaaaagtttatctgttggaagccgccagccattcatgtagagagtttataagaaaataatttaaaattgtatgcattttatattactatggtatctgtgtaccatatttctaagtattcattattaaattggtacttcttaaaaccataacctggcttgccttttagtgttaaaaaaatacaacattgtatatagagatttcttttatgaagaagagctgacgtaatttattagcagtgatctgagaaagacattaaataagtttctgagagtgatacattttcaaacatgaggagtgacaaccaccaaattaagaaaaggaaacaactcagacttggaattttatacgaatttcatttctatatgtgcctggtattgcctctggcataacttagaggaaattgttctacctatatgtcctcagtttcttcatctacaagttgggaaaaacattttcctcttaaaattgtgaagaggatttatatatttatatgatatattgtatatattaatatatttaaattgcttagagtttctagcacatagcaaataataaatattagttattagtataaacataaggcttaaagtcttggatttgatgcatatgacttaatttgtatttgtgctagtagctgtaatgtcagtgacaggataacaagcaaatgattagaaatctaatagtaatgcttgttcctttgctatctatgctaacaagtacatagatagcctaagataaattatacttaggatgaagctaaaatgcataactgagacaccttaaaattgtactaccttgtgctgttcactgccatcagggaggtagcataaaatgaaagataaagtctgaagactggatccaggcaaattcatgttctttctttgtaactcactttcttcgtcaacatttctgtgactcaatggatagcatatttccatcaagtagcacgtataacgtgatgctttcatgtttctgccttaaataaaataaccctcaaaaaacca

SEQ ID NO: 255600 - DNA, 574 bp, Artificial Sequence
  derived and/or modified sequence
atgcaacgcgtaagactgcgacggtaccggggcggcggggaaggaccgagaggcgggaggagcagcggctcaggcgcctgcaaactggtggcctgaacgagtttttgtccagaagtgcttatagaaaagatggctaatattaacctaaaagaaataaccttaatagtaggtgtggttactgcctgctattggaacagcctcttttgtggttttgtttttgatgatgtttcagcaatactggataacaaagacttgcatccatctacacctttaaaaactttatttcaaaatgacttctggggaacccctatgtctgaggagagaagccacaagtcttaccgtcccttaacagtattgacatttcgcttaaattatttgttaagtgaactaaaaccaatgtcatatcatctcctgaatatgatttttcatgctgtggttagtgtgatatttctcaaagtatgcaaactttttctggacaacaagagtagtgtgattgcttctttactttttgcagtgcacccaatacatacagaagcagtaacaggagttgttggaagagcagaacttttgtcat

SEQ ID NO: 255601 - protein, 551 aa, Artificial Sequence
  derived and/or modified sequence
MARGAEGGRGDAGWGLRGALAAVALLSALNAAGTVFALCQWRGLSSALRALEAQRGREQREDSALRSFLAELSRAPRGASAPPQDPASSARNKRSHSGEPAPHIRAESHDMLMMMTYSMVPIRVMVDLCNSTKGICLTGPSGPPGPPGAGGLPGHNGLDGQPGPQGPKGEKGANGKRGKMGIPGAAGNPGERGEKGDHGELGLQGNEGPPGQKGEKGDKGDVSNDVLLAGAKGDQGPPGPPGPPGPPGPPGPPGSRRAKGPRQPSMFNGQCPGETCAIPNDDTLVGKADEKASEHHSPQAESMITSIGNPVQVLKVTETFGTWIRESANKSDDRIWVTEHFSGIMVKEFKDQPSLLNGSYTFIHLPYYFHGCGHVVYNNSLYYHKGGSNTLVRFEFGQETSQTLKLENALYFDRKYLFANSKTYFNLAVDEKGLWIIYASSVDGSSILVAQLDERTFSVVQHVNTTYPKSKAGNAFIARGILYVTDTKDMRVTFAFDLLGGKQINANFDLRTSQSVLAMLAYNMRDQHLYSWEDGHLMLYPVQFLSTTLNQ

SEQ ID NO: 255602 - protein, 427 aa, Artificial Sequence
  derived and/or modified sequence
MVDLCNSTKGICLTGPSGPPGPPGAGGLPGHNGLDGQPGPQGPKGEKGANGKRGKMGIPGAAGNPGERGEKGDHGELGLQGNEGPPGQKGEKGDKGDVSNDVLLAGAKGDQGPPGPPGPPGPPGPPGPPGSRRAKGPRQPSMFNGQCPGETCAIPNDDTLVGKADEKASEHHSPQAESMITSIGNPVQVLKVTETFGTWIRESANKSDDRIWVTEHFSGIMVKEFKDQPSLLNGSYTFIHLPYYFHGCGHVVYNNSLYYHKGGSNTLVRFEFGQETSQTLKLENALYFDRKYLFANSKTYFNLAVDEKGLWIIYASSVDGSSILVAQLDERTFSVVQHVNTTYPKSKAGNAFIARGILYVTDTKDMRVTFAFDLLGGKQINANFDLRTSQSVLAMLAYNMRDQHLYSWEDGHLMLYPVQFLSTTLNQ

SEQ ID NO: 255603 - DNA, 1656 bp, Artificial Sequence
  derived and/or modified sequence
atggcaagaggcgctgaagggggcagaggggacgccggctgggggctgagaggtgccctggccgctgtcgctttgctttctgccctgaacgctgccggaacagtattcgccctttgccagtggagaggactgagctcagccctacgggctcttgaagcgcagcggggccgtgaacagcgggaggactccgccctgcggtcctttcttgcggaactctcaagggctccacggggagcctccgcaccgcctcaagaccctgcgagttcagcccgcaataaacggtcacatagcggggagcctgcacctcatatcagagccgaaagtcacgacatgctcatgatgatgacatattcaatggtgccaatcagggttatggtcgacctttgcaactccacgaagggcatatgtctcacgggtccttcaggccctcctgggcctcccggagctggggggctgcccggacacaatgggctggatggtcagccaggacctcaaggcccgaaaggggagaaaggcgctaacgggaagaggggcaagatgggtattcctggggcagccgggaatcctggcgagcgtggggaaaagggcgatcacggcgaattgggcctacagggtaatgaggggccaccaggacagaagggggagaagggtgataagggcgacgtttcgaacgatgtacttctggccggtgcaaaaggggaccagggccccccgggtcctcccggtccccccggtcctcctggtccccctggacctcccggcagccggagggccaaaggcccacgccagccatccatgttcaacggacaatgcccaggggagacctgtgctattccaaatgatgacacactggtcgggaaagcagacgagaaggcatctgaacatcattccccacaggcagagagcatgatcacgtcaatcggcaacccggttcaggtgctgaaagtcaccgagacttttggaacatggatcagggaatcggcgaacaaaagcgacgacaggatttgggtgactgagcatttcagtggcatcatggtcaaggagttcaaggatcagccgagtctactgaacggcagttacacatttattcacttgccctactactttcatggatgtgggcacgtagtctataataatagtttatattatcacaagggaggctcaaacacactggtcaggtttgagttcgggcaggagacaagtcagacacttaagctggaaaatgcgctatattttgatcgaaagtacttgttcgcaaattcaaaaacctatttcaacctcgccgtggatgagaagggcttatggatcatctacgcttccagcgttgatggatccagtatcctggttgcacagctcgatgaaagaactttcagtgtagtccagcatgtgaatactacttaccccaagagcaaagcaggaaacgccttcatcgcccgcggaattctctacgttacggatactaaagacatgagagtcaccttcgcatttgatctactcggagggaagcagattaacgctaactttgacctgaggactagccagtcagtcctggctatgctggcgtataatatgagggaccagcatctctacagctgggaggatgggcatttaatgctttatcccgtgcagttcttgtccactactctcaatcagtag

SEQ ID NO: 255604 - DNA, 4971 bp, Artificial Sequence
  derived and/or modified sequence
aaaggctgccagggccgcaggctgccaagccctgccctgcccaaggcgcatagagcatggcccgaggcgctgagggaggccgtggggacgcgggttggggcctgcgtggcgccctggcggccgtggcgctgctctcggcgctcaacgctgcgggcacggtgttcgcgctgtgccagtggcgcgggctgagctcggcgctgcgggctttggaggcgcagcggggccgggagcagcgcgaggacagtgccctgcgctccttcctggccgagttgagccgcgcgccgcgcggggcgtccgcaccaccccaagacccggccagctcagctcgcaacaagcgcagccacagcggcgagcccgcgccgcatatccgcgccgagagccatgacatgctgatgatgatgacctactccatggtgccgatccgagtgatggtggacctgtgcaacagcaccaagggcatctgcctcacaggaccttctggaccaccaggacctccgggagccggcgggttgccaggacacaacggattggatggacagcctggtcctcagggcccaaaaggagaaaaaggagcaaatggaaaaagaggaaaaatggggatacctggagctgcaggaaatccaggggaaaggggagaaaagggagaccatggtgaactgggcctgcagggaaatgagggcccaccagggcagaagggagaaaagggtgacaaaggagatgtgtccaacgacgtgctcctggcaggtgccaaaggtgaccaaggcccacccggtccacctgggcccccaggccctccaggtcctccagggccccctggaagcagaagagccaaaggccctcggcagccaagcatgttcaacggccagtgcccaggtgagacttgtgccataccaaatgatgataccttggttggaaaagctgatgagaaagccagtgaacaccattccccacaagcagaatccatgatcacttccattggaaacccagtgcaagtactgaaagtgacagagacatttgggacttggataagagagtctgctaacaagagtgatgaccggatttgggtgacagagcatttttcaggcatcatggttaaggaattcaaggatcagccctcacttctgaatggcagttacacgttcatccaccttccatactatttccatggctgtgggcacgttgtttacaacaactctctctactaccacaaagggggttctaataccctagtgagatttgaatttggccaggaaacatcccaaactctgaagcttgaaaatgccttgtattttgatcgaaaatacctttttgcaaattccaaaacttacttcaatctagctgtagatgaaaagggcctttggattatctatgcgtcaagtgtggacggctcgagcattcttgtagcacaactggatgagaggacattctcagtggtgcaacacgtcaataccacgtaccctaaatccaaggctggcaacgccttcattgcccgaggaatcctctatgtcacagacaccaaagatatgagggtcacatttgcctttgatttgttaggagggaaacagatcaatgcaaactttgatttaagaacttcccagtctgttcttgccatgttagcatacaacatgagagatcagcatttatattcatgggaagatggccatttaatgctttatcctgtgcagtttttgtcaactaccttaaatcagtgatgtgctgcattcggctcccttcagcaaatttcaggggttttctgggaccagttctcccccaacaggaaacttgtttttttaacgtcagccagatatttagaaaataacctcaaaagtgtttatatggtcagtgagccccgcttagtgaaatagcaacagattggaagttgaaatggctgagatttggtgatctccccacagctggctctgcaagttacctctttctccttgggccttagtttccccattggtaatctgaattggctaagatgattggggagattttctgtacctgtaggtaatttggtgattcttggtggctgctcttctcacaacttttatgtatctgcttctgtcgtttagcttttttagccacatgctgaccaaatttacctttgagttgataagtccagtggcttgagtagtgaatccctcagtgctgacttatatcttgttctttgaaaaaatgcattgactctttaagacatctaaagtatcacattatccataatttattgcttttctttgcatctgcacctgccaccacagaataaccattaccctcagctgctgattgggcagctctgagattagcaaaagccagggacagctacatgttcaggtttttttttttttttttttttcaataagctattttttttcttttcttattttaaatagagagagagtcttgctatgtttcccaggctggtcttgaactcctggggctcaagtgatcctcctgccttggcctcccaaaatgctggattacaggcatgtgtgcctggcccaggtttcttaataaaacagaatcatgatcttccaggttccccccagtttctgatcatgttgatttgtagctgtggatcatgaacactgaatcctcagatcactctgacttcttatgcttctcctgtggatccactatcaaagtactaaatgctgtgtaagtagacgttaatctggctggaaccatgggaagcactttgcagtgttcagaagagaggctccatttgtggctattatgtagaactgggccagagccagtccattgcctgtttttttaaataaggttttactgagcacagccacactcatttgtttatgcagtacggcctgacattgcttttgctctgcaacagcagagtcgagtcattgcaacaaagagcatatggccccacagtgcctaaaatattgaccagctacccctttatggaaaaagattgctgactcctgataaagaatataaagtgagcctgattcttgaaaaaatcagaaccagagcctgttttgttttgttctaaactaagaagccgcataggatgtgacttgcgttttgagtagaggggaaggctgataacggcgtaagatgaagtggccctccacaaaggctggttaggggacagttctttctctaacatagttttaaaggatgtgatctggtccccttggatgccaggagagaatccagttgaacttgctcctaaatgctcttaaatatgcatattttctgccaactcacttctttaaacatctttcagcccagcgctgcggccccgggaagggccactgcgaatagagaggaagctggaaaagttcctggggctctgcagccaggaaggggaaccagggcaaatcttatgtaaagatttttcagcaacttgtcccaatttgtgtgtattctgaaactttctctttgggaccaaattcattctcaatggccctgagttcaatatattattaacagcagtattttaaaacttagggttgaactgggcatggtggcacataactgcaatcccagctactttggaggcagggatgggaggatcacttgaggccaggatctcaggaccagcctagagagatcccatctctaaaaaataaaatataagaaaataaaacttaggggatatacagatttaaatattcaaatctccctgctcccctgaaagtccccaggcagctgtcaatgacttgtttgttgtgttctcaatatgatggctatttgaaacttcacctacttttcattagattggttgtaccatgtcaccttagcttttaaaaatactcttttcagattcacgttctctaacaaagagtctcatgttcaagatcaatatgtctaataagtgctggtgtccttttaaagtatttaaatatatatgttgctgttgctgaatacaggagaccaggttaggaatatagtttcataataatagtacatacaatactaattgtatataaggtagcaaccaaaagaggttgttaattagcacatattccttttagaaaaatgtttcagaaacctcagtcttgatatctgagctatctgggctcccttacttgtgagtaagggatcatgctcaccactggagaagcttacaccgggactttttttcttttttcttttttttttgctatgacagagtaatgctaacgtaaggacaactgagtttgatcagtgtttaatcgcagtgggtaatcttatctgattgtctttaaaagtgaaaaggattaagattttattctttcttgtaaacattacttgattttttaaagaagttttgggctcactgctaaaatagagtatacaactgaatgtttttaagtcaagatactgttttaggagtttaccctctcatttataaccaaagttgctctaaaacactttccaaatatctgcacttctgatgtcagaatcaaaccagataattctctaattcttctttaatctaaagtagatagcttcccactggaaagtaaacaaaaccatccctcccaacctcaaagctaggccacactctatttcaaggcattttctttcagctgataaggtgtcctcctgaagccaagtaggtggttctggtctccaagtatcgttaagcacaggtgctatgacagaaaaagttctggggtggaagttttaagatgaggagttctgatcttaggcatcttaacagtcacaaggtgaaaagtcaaatgaaacagtacaattcttgatgagtgaggtgtcatcttccaaccacacagaggacgttttggctatgatcatctgatggcaagtgaaggagaaatgagtgatagggctttgcgttttcatccagatgctgtggccctgtgtttcacagcattaagagccataatttccaacctgcacagatcctgaacaacaaatgaataacgatgaatgtctttttggttgtaatttaacaagtcaaataaaataatcattgctgagcacaatcacatgttgaaa

SEQ ID NO: 255605 - DNA, 1656 bp, Artificial Sequence
  derived and/or modified sequence
atggcccggggagctgagggcggcagaggagatgctggctggggcctgcggggggccctggccgctgtggccctgctgagcgccctgaatgctgctggcaccgtgtttgccctgtgccagtggaggggcctgagcagcgccctgcgggccctggaggcccagaggggccgggagcagagagaagattctgccctgcgctccttcctggccgagctgagccgggcccccaggggggccagcgccccaccccaggaccctgccagcagcgccaggaacaagaggagccacagcggggagcccgccccccacatccgggcagagagccatgacatgctgatgatgatgacctacagcatggtgcccatccgggtgatggtggacctgtgcaacagcaccaagggcatctgcctgaccggccccagcggccccccaggccccccaggagctgggggcctgcccggccacaacggcctggatggccagcccggcccccagggccccaagggggagaagggggccaacgggaagaggggcaagatgggcatccctggagctgctggcaaccctggagagcggggggagaagggggaccacggggagctgggcctgcagggcaatgaaggacctcctggccagaagggggagaagggggacaagggagatgtgtccaatgatgtgctgctggccggggccaagggggaccagggccccccaggccccccaggccccccaggccccccaggccccccaggccccccaggcagccggcgggccaagggcccccggcagcccagcatgttcaacggccagtgccctggagagacctgtgccatccccaatgatgacaccctggtgggcaaggcagatgagaaggccagcgagcaccacagcccccaggccgagagcatgatcaccagcatcggcaaccctgtgcaggtgctgaaggtgacagagaccttcggcacctggatccgggagagcgccaacaagagtgatgaccgcatctgggtgacagagcacttcagcggcatcatggtgaaggagttcaaggaccagcccagcctgctgaatggcagctacaccttcatccacctgccctactacttccacggctgcggccacgtggtgtacaacaacagcctgtactaccacaagggcggcagcaacaccctggtgcgctttgaatttggccaggagaccagccagaccctgaagctggagaatgccctgtactttgacaggaagtacctgtttgccaacagcaagacctacttcaacctggccgtggatgagaagggcctgtggatcatctatgccagctctgtggatggcagcagcatcctggtggcccagctggatgagaggaccttctctgtggtgcagcacgtgaacaccacctaccccaagagcaaggctggaaatgccttcatcgcccggggcatcctgtatgtgacagacaccaaggacatgagggtgacctttgcctttgacctgctgggcggcaagcagatcaatgccaactttgacctgcggaccagccagagcgtgctggccatgctggcctacaacatgagggaccagcacctgtacagctgggaggatggccacctgatgctgtaccctgtgcagttcctgagcaccaccctgaaccagtag

SEQ ID NO: 255606 - DNA, 1656 bp, Artificial Sequence
  derived and/or modified sequence
atggcccggggcgccgagggcggccggggcgacgccggctggggcctacgcggagccctcgccgctgtggccctgctctccgcactgaatgcagctggaactgtgtttgctctgtgccagtggagagggttgtctagcgcactcagggcactggaggctcagagaggacgggagcaacgcgaggactctgccctgcggtccttcctcgccgagctcagtcgcgctccacgaggggcaagtgccccccctcaagacccagcttcttccgcccggaacaagcggagtcactctggcgaacccgctccacatatccgagccgagtctcatgatatgcttatgatgatgacttatagcatggtgcccatacgtgtgatggtcgacctgtgcaacagcacaaagggcatctgcctgaccggcccatcgggacccccaggaccccccggagccgggggtctgcctggtcataacggcctcgacggccagcctggaccccagggacctaagggggagaagggcgccaacggaaagcggggaaaaatgggcattcccggagctgctgggaatccaggcgagcggggagaaaagggtgatcacggtgagctgggattgcagggcaacgagggccctccgggacagaaaggggagaaaggggataaaggggatgtgtcaaacgacgtgctcctagctggcgccaaaggagatcaggggccccccggaccccccggacctcctgggcccccaggacctcctggtccacctggttccagaagagccaaaggaccgaggcagccgtctatgtttaatggacaatgtcctggggaaacctgcgccatcccgaatgacgacaccctggtgggcaaagccgacgagaaggcgtctgagcaccattccccgcaggcggaatccatgattacttccattggcaacccagtccaagtcctgaaggtgaccgagacgttcggcacctggataagagagtcggctaataagtcagatgatcgcatctgggtaaccgagcacttcagtgggatcatggtcaaggaattcaaggaccaacccagcctcctgaatggttcttatacatttatccatctgccttactacttccacggttgtggccatgtagtatataacaattccctctactatcataaagggggctctaatacgcttgtgaggttcgagttcggacaggagacctcacagacactgaagctggagaacgccctctactttgaccgaaaatacctctttgccaattccaagacatatttcaacctggccgtagacgagaagggtctctggatcatatacgcctcgtcagtcgatggcagcagtatcctggtggctcagcttgacgagcgcaccttctccgtggttcagcatgtgaataccacctatcctaaatctaaagctggtaatgccttcatagcccggggaatactgtatgtgactgatacgaaggacatgcgggtcacattcgcttttgacctactcggaggcaaacagatcaacgcaaactttgacttgcgcacgtcgcagtctgtgctggcgatgctggcatataacatgagagaccagcatttgtatagctgggaagatggccatctgatgctgtacccggtgcagtttctctctacaacattgaaccaatag

SEQ ID NO: 255607 - DNA, 1656 bp, Artificial Sequence
  derived and/or modified sequence
atggcacgcggtgcggagggcggtaggggtgatgccggatggggactgcgcggagcactggctgccgttgctttgctcagcgccttaaatgcagctggcaccgtattcgccctgtgccaatggcgtgggttatcatcagctttgagagccctagaagctcaaaggggtagggagcaacgggaggattcggcgctgaggagtttcctcgccgaactgtctcgggctcctcgcggagcctccgcccctccccaggaccctgcgtcctcggcaagaaacaaaagatcgcattctggagagccagcgccacacataagagcggaatcccatgacatgttgatgatgatgacttattccatggtcccaataagagtcatggtggacctctgcaactcaaccaaagggatctgcctaactggtccctcgggaccaccgggtcctcccggtgccggaggtctgcctggccacaacggcctggacgggcagccgggtccacagggtcctaaaggggagaaaggagctaacggtaaacgtgggaagatgggtattccaggcgcagcgggtaatccaggtgagagaggagaaaagggagaccatggggagctggggctgcagggcaacgagggcccacctggacaaaaaggcgagaagggtgacaaaggtgatgtctccaacgacgttctcctggctggagccaagggtgaccagggaccccctggccctccagggcctccgggaccccctggtcccccaggacccccaggttcaagacgggcaaaaggaccaagacagccatctatgtttaatggacagtgtccgggagagacatgcgcaatacccaacgatgacaccttagtcggaaaagccgacgagaaggctagtgaacaccactcccctcaggctgagagcatgatcaccagcatcggtaatcctgtgcaggtgctgaaggttactgaaacattcggcacttggattcgggaaagcgctaacaaatctgatgacaggatctgggtcactgaacatttttcaggcattatggtgaaggaattcaaggaccagccatctctgcttaacggcagttacacgtttatccaccttccttattactttcatggctgcggtcatgtggtttacaacaactcactatattaccacaaggggggatctaacacgctggttcgatttgagtttggccaggaaacatctcagaccctgaaactcgaaaatgccctctatttcgatcggaagtatctgttcgcaaactctaaaacttacttcaacctggctgtggacgaaaaggggctatggataatctatgcctcgtctgtggacggcagctccattcttgttgctcaattggatgagcgtaccttcagtgtggtgcagcacgttaacacgacatatcctaaaagcaaggccggtaacgccttcattgcacgtgggattctgtatgtgaccgatacgaaggatatgcgcgtgactttcgccttcgacctgctcggaggcaagcagattaacgctaacttcgacctacggacttcccaaagcgtccttgcgatgctcgcctacaatatgagagatcagcatctatattcgtgggaagatggccatctgatgttgtaccccgtccagtttctcagtacaaccctgaatcaatag

SEQ ID NO: 255608 - DNA, 1656 bp, Artificial Sequence
  derived and/or modified sequence
atggccagaggcgccgagggcggcagaggcgacgccggctggggcctgagaggcgccctggccgccgtggccctgctgagcgccctgaacgccgccggcaccgtgttcgccctgtgccagtggagaggcctgagcagcgccctgagagccctggaggcccagagaggcagagagcagagagaggacagcgccctgagaagcttcctggccgagctgagcagagcccccagaggcgccagcgcccccccccaggaccccgccagcagcgccagaaacaagagaagccacagcggcgagcccgccccccacatcagagccgagagccacgacatgctgatgatgatgacctacagcatggtgcccatcagagtgatggtggacctgtgcaacagcaccaagggcatctgcctgaccggccccagcggcccccccggcccccccggcgccggcggcctgcccggccacaacggcctggacggccagcccggcccccagggccccaagggcgagaagggcgccaacggcaagagaggcaagatgggcatccccggcgccgccggcaaccccggcgagagaggcgagaagggcgaccacggcgagctgggcctgcagggcaacgagggcccccccggccagaagggcgagaagggcgacaagggcgacgtgagcaacgacgtgctgctggccggcgccaagggcgaccagggcccccccggcccccccggcccccccggcccccccggcccccccggcccccccggcagcagaagagccaagggccccagacagcccagcatgttcaacggccagtgccccggcgagacctgcgccatccccaacgacgacaccctggtgggcaaggccgacgagaaggccagcgagcaccacagcccccaggccgagagcatgatcaccagcatcggcaaccccgtgcaggtgctgaaggtgaccgagaccttcggcacctggatcagagagagcgccaacaagagcgacgacagaatctgggtgaccgagcacttcagcggcatcatggtgaaggagttcaaggaccagcccagcctgctgaacggcagctacaccttcatccacctgccctactacttccacggctgcggccacgtggtgtacaacaacagcctgtactaccacaagggcggcagcaacaccctggtgagattcgagttcggccaggagaccagccagaccctgaagctggagaacgccctgtacttcgacagaaagtacctgttcgccaacagcaagacctacttcaacctggccgtggacgagaagggcctgtggatcatctacgccagcagcgtggacggcagcagcatcctggtggcccagctggacgagagaaccttcagcgtggtgcagcacgtgaacaccacctaccccaagagcaaggccggcaacgccttcatcgccagaggcatcctgtacgtgaccgacaccaaggacatgagagtgaccttcgccttcgacctgctgggcggcaagcagatcaacgccaacttcgacctgagaaccagccagagcgtgctggccatgctggcctacaacatgagagaccagcacctgtacagctgggaggacggccacctgatgctgtaccccgtgcagttcctgagcaccaccctgaaccagtag

SEQ ID NO: 255609 - protein, 549 aa, Artificial Sequence
  derived and/or modified sequence
MDFLIVLVCLIFSVLSTIEQYAALATGTLFWMEIVLVVFFGTEYVVRLWSAGCRSKYVGLWGRLRFARKPISIIDLIVVVASMVVLCVGSKGQVFATSAIRGIRFLQILRMLHVDRQGGTWRLLGSVVFIHRQELITTLYIGFLGLIFSSYFVYLAEKDAVNESGRVEFGSYADALWWGVVTVTTIGYGDKVPQTWVGKTIASCFSVFAISFFALPAGILGSGFALKVQQKQRQKHFNRQIPAAASLIQTAWRCYAAENPDSSTWKIYIRKAPRSHTLLSPSPKPKKSVVVKKKKFKLDKDNGVTPGEKMLTVPHITCDPPEERRLDHFSVDGYDSSVRKSPTLLEVSMPHFMRTNSFAEDLDLEGETLLTPITHISQLREHHRATIKVIRRMQYFVAKKKFQQARKPYDVRDVIEQYSQGHLNLMVRIKELQRRLDQSIGKPSLFISVSEKSKDRGSNTIGARLNRVEDKVTQLDQRLALITDMLHQLLSLHGGSTPGSGGPPREGGAHITQPCGSGGSVDPELFLPSNTLPTYEQLTVPRRGPDEGS

SEQ ID NO: 255610 - DNA, 1650 bp, Artificial Sequence
  derived and/or modified sequence
atggactttctcattgtcttggtgtgcctgatcttctcggtactgtcgaccattgagcagtatgcagccttggccacaggaactttattttggatggagatcgtgctagtcgtcttctttggcactgagtacgtcgtgcgtctatggtctgcgggctgccgatcaaaatacgtgggcctctggggacggcttcgttttgcccgaaagccaatttcgattattgacttgatcgtggttgtagcaagcatggtcgttctgtgcgtgggcagtaaagggcaggtgtttgcaacttctgccattagggggataagattcctccagatattaagaatgcttcatgtggaccgtcaaggcgggacctggcgactactgggctcagtggtctttattcatcggcaagaactgatcaccacgttgtacataggcttcctcgggctcatctttagtagttactttgtgtacctggccgagaaggacgcagtgaatgagtcaggaagagtggaatttggatcatacgctgatgcgttgtggtggggcgtcgtgactgtgaccaccattgggtacggagataaggtgccccaaacatgggtgggcaaaactatcgcctcttgtttttcggtgtttgctatatcattcttcgccctccctgcgggaatactcggatctggctttgccctaaaagtgcagcagaaacagaggcagaagcacttcaacagacagatacccgctgccgcttccctgatacagaccgcctggcgatgttacgctgctgaaaacccagactcttcaacatggaagatttacattaggaaggcacctcgatcacacacgttgctgtccccctcacctaagcctaaaaaaagtgtggtagtgaagaaaaaaaaatttaagctggacaaggacaacggcgttactccaggggagaagatgcttacggtgccacacataacatgtgaccctcctgaagaacgccgactggaccacttcagcgtggacggctatgattcctctgtgaggaagtcacctacacttttggaggtgagcatgccacatttcatgcggaccaactccttcgcagaggacctcgatctcgagggggaaaccctgctgaccccgattacgcacatcagccagttgcgggagcatcaccgggccaccattaaggtgattagaagaatgcagtactttgtcgccaaaaaaaagtttcagcaagcacgaaaaccatacgatgttagggacgtgattgaacagtattctcagggacatctcaacctgatggttaggataaaggaacttcagcggaggctagaccagtcgatcgggaagccatctctgttcattagcgtgtccgagaaaagtaaggatagaggctccaacaccatcggcgccagactcaatcgagtggaagacaaagtgactcagctcgatcagaggctggcactgatcacagatatgctgcaccagctgctgtccttgcacggcgggtcaactccgggatccggaggcccaccgcgcgaagggggcgctcacattacccagccctgtgggtccggtggttcggtggaccctgagctttttctgccatcaaacaccctgcccacgtatgaacagctgacagtccccaggcgaggaccagacgagggctcttag

SEQ ID NO: 255611 - DNA, 1650 bp, Artificial Sequence
  derived and/or modified sequence
atggacttcctgattgtgctggtgtgcctgatcttctctgtgctgagcaccatcgagcagtatgctgccctggccaccggcaccctcttctggatggagatcgtgctggtggtgttcttcggcacagaatatgtggtgcggctgtggagcgctggctgccgcagcaaatatgtgggcctgtggggccgcctgcgctttgccaggaagcccatcagcatcatcgacctgattgtggtggtggcctccatggtggtgctgtgtgtgggcagcaagggccaggtgtttgccaccagcgccatccggggcatccgcttcctgcagatcctgaggatgctgcacgtggaccggcagggcggcacctggaggctgctgggctctgtggtgttcatccaccggcaggagctgatcaccaccctgtacatcggcttcctgggcctcatcttcagcagctactttgtgtacctggccgagaaggatgctgtgaatgaaagtggccgggtggagtttggcagctatgcagatgccctgtggtggggcgtggtgacagtgaccaccatcggctacggggacaaggtgccccagacctgggtgggcaagaccatcgccagctgcttctctgtgtttgccatctccttctttgccctgcctgctggcatcctgggcagcggctttgccctgaaggtgcagcagaagcagaggcagaagcacttcaaccggcagatcccagctgctgccagcctcatccagacagcctggcgctgctacgccgctgagaacccagacagcagcacctggaagatctacatcaggaaggcccccaggagccacaccctgctgagccccagccccaagcccaagaagtctgtggtggtgaagaagaagaagttcaagctggacaaggacaacggggtgaccccaggagagaagatgctgactgtgccccacatcacctgtgaccccccagaggagcggcggctggaccacttctctgtggatggctatgacagctctgtgaggaagagccccaccctgctggaggtgtccatgccccacttcatgaggaccaacagctttgctgaggacctggacctggagggggagaccctgctgacccccatcacccacatcagccagctgcgggagcaccaccgggccaccatcaaggtgatccggaggatgcagtactttgtggccaagaagaagttccagcaggccaggaagccctatgatgtgagagatgtgattgagcagtacagccagggccacctgaacctgatggtgcgcatcaaggagctgcagaggcggctggaccagagcatcggcaagcccagcctcttcatctctgtgtctgagaagagcaaggaccggggcagcaacaccatcggggcccggctgaacagagtggaggacaaggtgacccagctggaccagaggctggccctgatcacagacatgctgcaccagctgctgagcctgcatggaggcagcaccccaggcagcggcggccccccccgggagggcggggcccacatcacccagccctgtggcagcggcggctctgtggaccctgagctgttcctgcccagcaacaccctgcccacctatgagcagctgactgtgccccggcggggcccagatgagggcagctag

SEQ ID NO: 255612 - DNA, 1650 bp, Artificial Sequence
  derived and/or modified sequence
atggacttcctgatcgtgctggtgtgcctgatcttcagcgtgctgagcacgattgagcaatatgccgccctggcaacagggaccttgttttggatggaaattgtgctagtggtctttttcggcaccgagtacgtagttaggctctggagtgcgggatgcagatccaagtacgttggtttgtgggggagactcaggtttgccaggaagcctatctccatcatagatttaatcgtggttgtggcaagcatggtagtgctgtgtgtaggttctaaggggcaagtgtttgcaacttctgccatcagaggcatacggtttttacagatcctgcgtatgcttcacgtggatcgtcaggggggaacgtggcggctgctagggtcggttgtgttcatccatagacaggagctgattaccaccctttacatcggctttctcgggctgatcttttccagctattttgtctaccttgcagagaaggatgcagtaaatgaaagcggccgggttgagtttggtagctatgccgacgctctctggtggggggtcgttaccgttactactatcgggtatggggataaggtcccacagacatgggtaggcaagaccattgccagctgcttctctgtgttcgccatatcatttttcgcattacctgccggcattctggggtctggattcgccctgaaggtccagcagaagcagagacagaaacacttcaataggcaaatcccggccgccgcctcactgattcagactgcatggcgttgctatgccgcggaaaaccctgattccagcacttggaagatctacatccgcaaggccccacggtctcacacgctcctgtcaccaagccctaagcctaaaaagtccgtcgtggtgaagaaaaagaagttcaagttggataaggataatggtgttactccaggagaaaagatgctcaccgtgccacatattacatgtgatcctcccgaggagcgacggttagatcacttcagtgtggatggatacgatagctcagtgcgcaaaagcccgacattactcgaagtatccatgcctcacttcatgcggactaactccttcgcagaagacttggacctggagggagaaacactgctgaccccaattactcacatctctcagctgcgcgagcaccacagggcaactataaaagtgattcgccgcatgcagtactttgtggctaaaaagaagttccagcaggccagaaagccctatgatgttagggacgtcattgaacaatactcacagggacatctgaatctcatggttcgtatcaaagagctgcagcgtcgcttggaccagagcataggaaaaccgtctctctttatctccgtgtccgaaaagtctaaggatcgaggctccaacacaattggggcccggctaaacagagtcgaagataaagtgacccagctggatcagagactcgcccttatcacggatatgctgcaccagttgctatcactgcatggcgggtctacaccaggctccggcggccctcccagggagggaggcgcgcatatcactcagccctgcggatcaggggggtccgtggaccccgaactgtttctgccctccaacacattgcctacatacgagcagcttactgtgccacgcaggggaccggatgaaggcagttag

SEQ ID NO: 255613 - DNA, 2159 bp, Artificial Sequence
  derived and/or modified sequence
ctcttcccttcctcccctgcagcttccatggcctggggctgtgagaggcccgggaaggcactgtctttgcgcctgcacatgtgtgtgtctggagtgtaggatggcactggtgccgggcctggatttactcagcccagatcacggctgcttttgtttacgtggcccctgctctcacccacaactccaggtttctggctctcgggaatttgaggcctgtggctgctgtggaccctgggaaagagcctgtgcttcctgagccagtgcggggcctggcatggacttcctcatcgtcctggtctgcctcatcttcagcgtgctgtccaccatcgagcagtatgccgccctggccacggggactctcttctggatggagatcgtgctggtggtgttcttcgggacggagtacgtggtccgcctctggtccgccggctgccgcagcaagtacgtgggcctctgggggcggctgcgctttgcccggaagcccatttccatcatcgacctcatcgtggtcgtggcctccatggtggtcctctgcgtgggctccaaggggcaggtgtttgccacgtcggccatcaggggcatccgcttcctgcagatcctgaggatgctacacgtcgaccgccagggaggcacctggaggctcctgggctccgtggtcttcatccaccgccaggagctgataaccaccctgtacatcggcttcctgggcctcatcttctcctcgtactttgtgtacctggctgagaaggacgcggtgaacgagtcaggccgcgtggagttcggcagctacgcagatgcgctgtggtggggggtggtcacagtcaccaccatcggctatggggacaaggtgccccagacgtgggtcgggaagaccatcgcctcctgcttctctgtctttgccatctccttctttgcgctcccagcggggattcttggctcggggtttgccctgaaggtgcagcagaagcagaggcagaagcacttcaaccggcagatcccggcggcagcctcactcattcagaccgcatggaggtgctatgctgccgagaaccccgactcctccacctggaagatctacatccggaaggccccccggagccacactctgctgtcacccagccccaaacccaagaagtctgtggtggtaaagaaaaaaaagttcaagctggacaaagacaatggggtgactcctggagagaagatgctcacagtcccccatatcacgtgcgaccccccagaagagcggcggctggaccacttctctgtcgacggctatgacagttctgtaaggaagagcccaacactgctggaagtgagcatgccccatttcatgagaaccaacagcttcgccgaggacctggacctggaaggggagactctgctgacacccatcacccacatctcacagctgcgggaacaccatcgggccaccattaaggtcattcgacgcatgcagtactttgtggccaagaagaaattccagcaagcgcggaagccttacgatgtgcgggacgtcattgagcagtactcgcagggccacctcaacctcatggtgcgcatcaaggagctgcagaggaggctggaccagtccattgggaagccctcactgttcatctccgtctcagaaaagagcaaggatcgcggcagcaacacgatcggcgcccgcctgaaccgagtagaagacaaggtgacgcagctggaccagaggctggcactcatcaccgacatgcttcaccagctgctctccttgcacggtggcagcacccccggcagcggcggcccccccagagagggcggggcccacatcacccagccctgcggcagtggcggctccgtcgaccctgagctcttcctgcccagcaacaccctgcccacctacgagcagctgaccgtgcccaggaggggccccgatgaggggtcctgaggaggggatggggctgggggatgggcctgagtgagaggggaggccaagagtggccccacctggccctctctgaaggaggccacctcctaaaaggcccagagagaagagccccactctcagaggccccaataccccatggaccatgctgtctggcacagcctgcacttgggggctcagcaaggccacctcttcctggccggtgtgggggccccgtctcaggtctgagttgttaccc

SEQ ID NO: 255614 - DNA, 1650 bp, Artificial Sequence
  derived and/or modified sequence
atggattttctaatcgtcctggtttgcctgatatttagtgtgctttccactatcgagcagtatgctgcacttgcaaccggcaccttgttttggatggagatcgtgttagtcgtgttcttcggaacagagtacgtggtccgtctgtggtctgcgggatgccgctctaagtatgtgggcctttggggaagacttaggttcgcacgcaagcctatcagtattattgatttaatcgtggttgtggcttcaatggtggtgctgtgtgtgggtagtaaagggcaagtattcgcaaccagtgcgatccgtggaatccggttcctgcagatcctccggatgctgcacgtggatcggcaaggcggaacgtggcggctgctgggctctgttgtcttcattcatcgacaggaattaattactactctatacattggtttcttgggacttatattcagctcgtattttgtgtacctggccgagaaagacgctgttaatgaatccgggagagtggagttcggctcctacgccgatgccctctggtggggcgtggtcacagtcacgaccattggttacggtgacaaggtgccccagacgtgggttggtaagactattgcgagctgtttcagcgtgtttgctattagcttctttgccttacctgcaggaattttagggagcgggtttgcccttaaggttcagcagaagcagcgccaaaagcatttcaatcgacagatccccgctgccgcaagcctgatccagaccgcctggcggtgttacgccgcagagaaccccgattcctccacttggaagatatatatccgaaaggcccctcggagtcacacgttgctgagtcctagcccaaagccaaagaaatcagtggtggttaaaaaaaaaaagtttaaacttgacaaagacaatggagtgacacccggagaaaagatgctgaccgtgccacatattacctgtgatcctcctgaagagaggcgtctggatcacttttccgtggacggttatgattcctcggtgagaaagtcgcccacgctcttggaggtctcaatgcctcactttatgcggactaacagctttgccgaggatctcgacctggagggggagactctgctcacccctattacgcacattagtcagcttagggaacaccatagagctacaatcaaagtgatacgtcgtatgcagtacttcgtggccaaaaagaagttccagcaggccaggaaaccttacgatgtgcgcgacgtaattgagcagtactctcagggacatttgaaccttatggtgcggatcaaggaacttcaacggcgtctggaccagagcatcggcaaaccctcactgtttatcagcgtgtcagagaaatcaaaggaccggggatccaatacaattggagcgaggttgaaccgcgttgaagacaaggtgacccagctcgatcagagactcgcattaatcactgacatgctccatcagctgctgagcttgcacggcggttcaaccccagggtcgggcggaccacccagggagggtggagcccacataactcagccctgtggttcaggcggatctgtggacccggagttgtttctccctagcaacacgctgccaacctacgaacaattaaccgttccacggagaggcccagatgaggggagctag

SEQ ID NO: 255615 - DNA, 1650 bp, Artificial Sequence
  derived and/or modified sequence
atggacttcctgatcgtgctggtgtgcctgatcttcagcgtgctgagcaccatcgagcagtacgccgccctggccaccggcaccctgttctggatggagatcgtgctggtggtgttcttcggcaccgagtacgtggtgagactgtggagcgccggctgcagaagcaagtacgtgggcctgtggggcagactgagattcgccagaaagcccatcagcatcatcgacctgatcgtggtggtggccagcatggtggtgctgtgcgtgggcagcaagggccaggtgttcgccaccagcgccatcagaggcatcagattcctgcagatcctgagaatgctgcacgtggacagacagggcggcacctggagactgctgggcagcgtggtgttcatccacagacaggagctgatcaccaccctgtacatcggcttcctgggcctgatcttcagcagctacttcgtgtacctggccgagaaggacgccgtgaacgagagcggcagagtggagttcggcagctacgccgacgccctgtggtggggcgtggtgaccgtgaccaccatcggctacggcgacaaggtgccccagacctgggtgggcaagaccatcgccagctgcttcagcgtgttcgccatcagcttcttcgccctgcccgccggcatcctgggcagcggcttcgccctgaaggtgcagcagaagcagagacagaagcacttcaacagacagatccccgccgccgccagcctgatccagaccgcctggagatgctacgccgccgagaaccccgacagcagcacctggaagatctacatcagaaaggcccccagaagccacaccctgctgagccccagccccaagcccaagaagagcgtggtggtgaagaagaagaagttcaagctggacaaggacaacggcgtgacccccggcgagaagatgctgaccgtgccccacatcacctgcgacccccccgaggagagaagactggaccacttcagcgtggacggctacgacagcagcgtgagaaagagccccaccctgctggaggtgagcatgccccacttcatgagaaccaacagcttcgccgaggacctggacctggagggcgagaccctgctgacccccatcacccacatcagccagctgagagagcaccacagagccaccatcaaggtgatcagaagaatgcagtacttcgtggccaagaagaagttccagcaggccagaaagccctacgacgtgagagacgtgatcgagcagtacagccagggccacctgaacctgatggtgagaatcaaggagctgcagagaagactggaccagagcatcggcaagcccagcctgttcatcagcgtgagcgagaagagcaaggacagaggcagcaacaccatcggcgccagactgaacagagtggaggacaaggtgacccagctggaccagagactggccctgatcaccgacatgctgcaccagctgctgagcctgcacggcggcagcacccccggcagcggcggcccccccagagagggcggcgcccacatcacccagccctgcggcagcggcggcagcgtggaccccgagctgttcctgcccagcaacaccctgcccacctacgagcagctgaccgtgcccagaagaggccccgacgagggcagctag

SEQ ID NO: 255616 - protein, 161 aa, Artificial Sequence
  derived and/or modified sequence
MASQNRDPAATSVAAARKGAEPSGGAARGPVGKRLQQELMTLMMSGDKGISAFPESDNLFKWVGTIHGAAGTAVGSIRTSSTVCLLSGPRETQDSSKPLVWGLGWDMRLLLELTLQLFLQMPEPNIDSPLNTHAAELWKNPTAFKKYLQETYSKQVTSQEP

SEQ ID NO: 255617 - DNA, 486 bp, Artificial Sequence
  derived and/or modified sequence
atggccagccagaacagagaccccgccgccaccagcgtggccgccgccagaaagggcgccgagcccagcggcggcgccgccagaggccccgtgggcaagagactgcagcaggagctgatgaccctgatgatgagcggcgacaagggcatcagcgccttccccgagagcgacaacctgttcaagtgggtgggcaccatccacggcgccgccggcaccgccgtgggcagcatcagaaccagcagcaccgtgtgcctgctgagcggccccagagagacccaggacagcagcaagcccctggtgtggggcctgggctgggacatgagactgctgctggagctgaccctgcagctgttcctgcagatgcccgagcccaacatcgacagccccctgaacacccacgccgccgagctgtggaagaaccccaccgccttcaagaagtacctgcaggagacctacagcaagcaggtgaccagccaggagccctag

SEQ ID NO: 255618 - DNA, 486 bp, Artificial Sequence
  derived and/or modified sequence
atggcctcacagaaccgggacccggccgccacaagcgtggccgctgcaagaaagggtgctgagccatcaggaggagcagcaagaggaccggtgggcaagagactgcagcaggagctcatgacattgatgatgtcgggagacaaaggaatctccgcgtttcctgagagcgataatttattcaaatgggtgggcactatacacggcgctgctggcacagcagtgggatctatcaggactagcagcactgtgtgcctcctgagtggaccccgggagacccaggactcttctaaacctctggtgtggggcctggggtgggacatgaggctgctcctcgaactcaccctccagctgttcctgcagatgccagaacctaacatcgactcacccttaaacacccatgctgctgaattgtggaaaaatcccacagccttcaagaagtacctccaggagacctatagcaaacaagtgaccagtcaagagccatag

SEQ ID NO: 255619 - DNA, 486 bp, Artificial Sequence
  derived and/or modified sequence
atggccagccagaacagagatcctgctgccacctctgtggccgccgccaggaaaggagctgagcccagcggcggggccgcccggggccctgtgggcaagaggctgcagcaggagctgatgaccctgatgatgtctggggacaagggcatcagcgccttccctgagagtgacaacctcttcaagtgggtgggcaccatccatggagctgctggaacagctgtgggcagcatccgcaccagcagcacagtgtgcctgctgagcggcccccgggagacccaggacagcagcaagcccctggtgtggggcctgggctgggacatgaggctgctgctggagctgaccctgcagctgttcctgcagatgcctgagcccaacatcgacagccccctgaacacccacgccgctgagctgtggaagaaccccacagccttcaagaagtacctgcaggagacctacagcaagcaggtgaccagccaggagccctag

SEQ ID NO: 255620 - DNA, 486 bp, Artificial Sequence
  derived and/or modified sequence
atggccagccagaaccgggaccccgccgccaccagcgtggccgccgcccggaagggcgctgaacccagtgggggggccgcgagagggcctgttggcaaaaggttacagcaagagttgatgaccctgatgatgagtggagataaaggaatttccgcttttcctgagagtgataacttgttcaaatgggttggcactatccacggagcggccggcactgccgtagggtccattcgaacttcctcaactgtgtgtctacttagcggaccaagagaaacacaggattccagtaagcccctggtgtggggtctggggtgggacatgagactgctccttgagctgactctccagctgttcctgcaaatgccagaaccgaacatcgactccccactgaatacacacgccgccgaattgtggaagaatcctaccgccttcaagaaatacctgcaggagacatacagtaaacaggtgaccagtcaggagccttag

SEQ ID NO: 255621 - DNA, 486 bp, Artificial Sequence
  derived and/or modified sequence
atggcttctcagaatcgcgacccagcggcaacctctgtggcggctgcccgtaagggtgctgagcctagcggaggcgctgcgaggggcccagtcggaaagagactgcagcaggagcttatgaccctgatgatgagcggtgacaaggggatttccgccttccccgagtcagacaatctttttaagtgggtagggaccatccacggagctgccggtactgccgtcgggagtatcagaacgagcagcaccgtgtgcttgctgtccggccctcgcgaaactcaagatagctccaaacctctggtctggggcctaggctgggatatgagactgctcttagaacttactcttcagctttttctccagatgccagaaccgaatatcgattcacccctcaatacacatgccgcagaactctggaagaaccccactgccttcaaaaagtatctccaggagacctactccaaacaagtgactagccaggagccctag

SEQ ID NO: 255622 - DNA, 737 bp, Artificial Sequence
  derived and/or modified sequence
cgcagtcctgcagttgcagtcgtgttctccgagttcctgtctctctgccaacgccgcccggatggcttcccaaaaccgcgacccagccgccactagcgtcgccgccgcccgtaaaggagctgagccgagcgggggcgccgcccggggtccggtgggcaaaaggctacagcaggagctgatgaccctcatgatgtctggcgataaagggatttctgccttccctgaatcagacaaccttttcaaatgggtagggaccatccatggagcagctggaacagcagtggggagcatcagaaccagctcaacagtttgtctactgtccggtcccagagaaactcaagattctagcaagccccttgtgtggggcttgggttgggacatgaggctgctgctggagcttactctgcaactgtttctccaaatgccagaacccaacattgatagtcccttgaacacacatgctgccgagctctggaaaaaccccacagcttttaagaagtacctgcaagaaacctactcaaagcaggtcaccagccaggagccctgacccaggctgcccagcctgtccttgtgtcgtctttttaatttttccttagatggtctgtcctttttgtgatttctgtataggactctttatcttgagctgtggtatttttgttttgtttttgtcttttaaattaagcctcggttgagcccttgtatattaaataaatgcatttttgtccttttttagacaa

SEQ ID NO: 255623 - protein, 50 aa, Artificial Sequence
  derived and/or modified sequence
MASQNRDPAATSVAAARKGAEPSGGAARGPVGKRLQQELMTLMNPTLIVP

SEQ ID NO: 255624 - protein, 150 aa, Artificial Sequence
  derived and/or modified sequence
MASQNRDPAATSVAAARKGAEPSGGAARGPVGKRLQQELMTLMVYEDLRYKLSLEFPSGYPYNAPTVKFLTPCYHPNVDTQGNICLDILKEKWSALYDVRTILLSIQSLLGEPNIDSPLNTHAAELWKNPTAFKKYLQETYSKQVTSQEP

SEQ ID NO: 255625 - DNA, 453 bp, Artificial Sequence
  derived and/or modified sequence
atggccagccagaacagagaccccgccgccaccagcgtggccgccgccagaaagggcgccgagcccagcggcggcgccgccagaggccccgtgggcaagagactgcagcaggagctgatgaccctgatggtgtacgaggacctgagatacaagctgagcctggagttccccagcggctacccctacaacgcccccaccgtgaagttcctgaccccctgctaccaccccaacgtggacacccagggcaacatctgcctggacatcctgaaggagaagtggagcgccctgtacgacgtgagaaccatcctgctgagcatccagagcctgctgggcgagcccaacatcgacagccccctgaacacccacgccgccgagctgtggaagaaccccaccgccttcaagaagtacctgcaggagacctacagcaagcaggtgaccagccaggagccctag

SEQ ID NO: 255626 - DNA, 453 bp, Artificial Sequence
  derived and/or modified sequence
atggctagtcagaacagagatccagctgcaacttcagttgctgccgccagaaagggagccgaaccatctggcggcgctgccaggggtcccgtcgggaagagactgcagcaggaattaatgactttaatggtctacgaagacttgaggtataaactaagtctggagttcccatctgggtatccatataatgcccctactgtaaagtttctcacaccatgttaccaccccaacgtggatacgcagggtaatatatgcttggatatcttgaaagaaaagtggtcggctttgtacgacgtgcgaaccatactgttatccattcagtcgctgctcggcgaacctaatatagactcacccctcaatactcacgcagcggaactatggaagaatcccacagccttcaagaaataccttcaagagacctattctaaacaggttacatcacaggagccttag

SEQ ID NO: 255627 - DNA, 453 bp, Artificial Sequence
  derived and/or modified sequence
atggccagccagaacagagatcctgctgccacctctgtggccgccgccaggaaaggagctgagcccagcggcggggccgcccggggccctgtgggcaagaggctgcagcaggagctgatgaccctgatggtgtatgaggacctgcgctacaagctgagcctggagttccccagcggctacccctacaatgcccccaccgtgaagttcctgaccccctgctaccaccccaacgtggacacccagggcaacatctgcctggacatcctgaaggagaagtggagcgccctgtatgatgtgaggaccatcctgctgagcatccagagcctgctgggggagcccaacatcgacagccccctgaacacccatgctgctgagctgtggaagaaccccacagccttcaagaagtacctgcaggagacctacagcaagcaggtgaccagccaggagccctag

SEQ ID NO: 255628 - DNA, 453 bp, Artificial Sequence
  derived and/or modified sequence
atggccagccagaaccgggaccccgccgccaccagcgtggccgccgccagaaagggggccgagccatcaggcggcgctgctcgtggcccagtggggaagcggctccagcaggaactgatgactctcatggtctacgaggacctgcgctacaagttgtcattggagtttccgtccgggtatccgtacaacgctcccacagtcaaattcctcacaccctgttaccatccgaacgtggacacccagggaaacatctgcttggacatcctaaaggaaaaatggagtgccctgtacgacgttcgtactatactgctgtctattcagtcattacttggcgaaccaaatatcgattcgcccctgaacactcatgcggccgagttgtggaagaacccaacagccttcaaaaagtatctgcaggaaacatatagtaaacaagtgacttctcaggaaccttag

SEQ ID NO: 255629 - DNA, 453 bp, Artificial Sequence
  derived and/or modified sequence
atggcctcacagaaccgtgaccccgcagctacgtcagtagcggctgctcggaaaggggctgaaccaagcggcggtgccgctagaggtccagtgggcaagcggctccagcaggagttaatgacactgatggtttacgaggatctgcggtacaagctgagcttggagttcccttcagggtatccgtacaacgctccaaccgtgaaattcctgacaccctgctatcatcccaacgttgacactcaaggaaacatctgcctggatattctgaaggagaagtggtcagcgctctatgacgtgcgtaccatactgctctccattcagtctctgctgggcgaaccaaatattgatagtccgctcaatacccatgccgctgaactttggaagaacccaaccgcctttaaaaagtatctccaagaaacatattcaaaacaggtaaccagccaggaaccttag

SEQ ID NO: 255630 - DNA, 665 bp, Artificial Sequence
  derived and/or modified sequence
tctctctgccaacgccgcccggatggcttcccaaaaccgcgacccagccgccactagcgtcgccgccgcccgtaaaggagctgagccgagcgggggcgccgcccggggtccggtgggcaaaaggctacagcaggagctgatgaccctcatggtatatgaagacctgaggtataagctctcgctagagttccccagtggctacccttacaatgcgcccacagtgaagttcctcacgccctgctatcaccccaacgtggacacccagggtaacatatgcctggacatcctgaaggaaaagtggtctgccctgtatgatgtcaggaccattctgctctccatccagagccttctaggagaacccaacattgatagtcccttgaacacacatgctgccgagctctggaaaaaccccacagcttttaagaagtacctgcaagaaacctactcaaagcaggtcaccagccaggagccctgacccaggctgcccagcctgtccttgtgtcgtctttttaatttttccttagatggtctgtcctttttgtgatttctgtataggactctttatcttgagctgtggtatttttgttttgtttttgtcttttaaattaagcctcggttgagcccttgtatattaaataaatgcatttttgtccttttttagacaa

SEQ ID NO: 255631 - DNA, 423 bp, Artificial Sequence
  derived and/or modified sequence
atgaccctgatgatgagcggcgacaagggcatcagcgccttccccgagagcgacaacctgttcaagtgggtgggcaccatccacggcgccgccggcaccgtgtacgaggacctgagatacaagctgagcctggagttccccagcggctacccctacaacgcccccaccgtgaagttcctgaccccctgctaccaccccaacgtggacacccagggcaacatctgcctggacatcctgaaggagaagtggagcgccctgtacgacgtgagaaccatcctgctgagcatccagagcctgctgggcgagcccaacatcgacagccccctgaacacccacgccgccgagctgtggaagaaccccaccgccttcaagaagtacctgcaggagacctacagcaagcaggtgaccagccaggagccctag

SEQ ID NO: 255632 - DNA, 423 bp, Artificial Sequence
  derived and/or modified sequence
atgactctgatgatgagcggcgataaaggaatttccgcctttcctgagagtgacaatctctttaagtgggttggaaccatccatggtgccgccggcacagtttatgaggatcttcgatacaagctgagcctcgaatttccatcagggtatccttataacgcccctaccgttaagttcttaacgccatgttatcaccctaacgtagacacacagggcaatatatgtctggatattctcaaagaaaaatggtcggccctctatgatgttaggactattctgctcagcatacagtccctgctcggcgagcccaatattgacagcccactgaacacacatgccgctgagctgtggaagaacccgaccgcattcaaaaagtacctgcaggaaacttactctaagcaggtcacttctcaggagccctag

SEQ ID NO: 255633 - DNA, 423 bp, Artificial Sequence
  derived and/or modified sequence
atgacgctgatgatgagcggtgacaagggaataagtgcattcccagagagcgataatctgttcaagtgggtagggacaatccacggagctgccggcactgtctacgaagatcttcggtataagctgagcctggaattcccttctggatatccatacaatgctcctactgttaaatttctcacgccctgttatcaccctaacgttgatactcaggggaatatctgtcttgacatcctgaaagaaaagtggagtgcactctatgacgtgcggactatcctcctgtcgattcagagccttttaggtgaacctaacattgactcacccctgaatacccatgcagcagaattgtggaaaaatcctacggcatttaaaaagtacctgcaggaaacttattccaagcaagtcacgtctcaggagccttag

SEQ ID NO: 255634 - DNA, 423 bp, Artificial Sequence
  derived and/or modified sequence
atgaccctgatgatgtctggggacaagggcatcagcgccttccctgagagtgacaacctcttcaagtgggtgggcaccatccacggggctgctggcaccgtgtatgaggacctgcgctacaagctgagcctggagttccccagcggctacccctacaatgcccccaccgtgaagttcctgaccccctgctaccaccccaacgtggacacccagggcaacatctgcctggacatcctgaaggagaagtggagcgccctgtatgatgtgaggaccatcctgctgagcatccagagcctgctgggggagcccaacatcgacagccccctgaacacccatgctgctgagctgtggaagaaccccacagccttcaagaagtacctgcaggagacctacagcaagcaggtgaccagccaggagccctag

SEQ ID NO: 255635 - DNA, 423 bp, Artificial Sequence
  derived and/or modified sequence
atgaccctgatgatgagcggcgacaagggcatcagcgccttccccgagtccgacaacttatttaaatgggtagggactatccatggagcggccgggaccgtgtacgaagacctccgctacaaactgtcactggaattcccttccgggtatccgtacaatgctccgaccgtgaagttcctgactccctgctatcatcccaacgtggatacccagggaaacatctgtctagatatcctgaaagaaaagtggagcgccctgtacgatgtgcggacaatactgctgagtattcagagtctgttaggtgaacctaacatcgattctccccttaatactcacgccgccgaactctggaaaaaccctactgcatttaaaaaatacctgcaggagacttatagcaagcaggtgacaagtcaggagccatag

SEQ ID NO: 255636 - DNA, 423 bp, Artificial Sequence
  derived and/or modified sequence
atgaccctgatgatgagcggcgacaagggcatcagcgccttccccgagtctgataacctattcaaatgggttggtacaatccacggtgctgccgggacagtgtatgaggacctccgatacaagctgagtctggagtttccaagcggctatccctataacgcacccaccgtaaagtttctgaccccctgctatcatcctaacgtagatacgcagggcaacatctgtttagatattctgaaggagaaatggtcagccctttatgatgtgcggacaattctcttatccatacagtccctgctgggggaacccaatatcgacagtcccctgaatacgcacgcggccgagctatggaaaaaccctaccgctttcaaaaagtatcttcaagagacatattcaaaacaggtgaccagccaagagccttag

SEQ ID NO: 255637 - DNA, 423 bp, Artificial Sequence
  derived and/or modified sequence
atgacccttatgatgagtggtgacaaagggatttctgctttcccagagtctgacaatcttttcaaatgggtaggcaccattcatggcgcagccggtaccgtctacgaagatctgagatataaattatccctcgagtttccctcaggctatccgtataatgccccaacagtcaagtttctcacgccatgctatcacccaaatgtagacactcagggcaacatctgtctcgatattctgaaagaaaaatggtctgctctgtacgatgtccgtacaatccttctgagtattcagtctctgcttggggaaccaaatatcgactcacctctgaatactcatgccgctgagttatggaagaatcccacagcttttaaaaaatatttgcaagaaacctactcaaaacaagtcaccagccaggaaccatag

SEQ ID NO: 255638 - DNA, 423 bp, Artificial Sequence
  derived and/or modified sequence
atgacgcttatgatgagtggagataaggggatctcggcttttccggagagtgataatctttttaagtgggtgggaactatccacggtgccgcaggcactgtgtacgaagaccttcggtacaaactgagcttggagtttccaagcggatacccgtacaatgcgcctacagttaaatttctcactccttgttaccacccaaacgttgacacccagggcaatatatgtctcgatattctaaaagagaaatggtcggctctttatgacgtgcgaaccattctgcttagcattcagagcttattaggcgagcccaacatcgactccccactcaacacgcacgctgccgagctgtggaagaatccgaccgcgttcaagaagtaccttcaagagacctatagtaagcaagtcacatcccaggaaccttag

SEQ ID NO: 255639 - protein, 636 aa, Artificial Sequence
  derived and/or modified sequence
MKCKCPVICFNAKDFVRIVLQFFGNDGSWKHVADFIGLDPRIAAWLIDPSDATPSFEDLVEKYCEKSITVKVNSTYGNSSRNIVNQNVRENLKTLYRLTMDLCSKLKDYGLWQLFRTLELPLIPILAVMESHAIQVNKEEMEKTSALLGARLKELEQEAHFVAGERFLITSNNQLREILFGKLKLHLLSQRNSLPRTGLQKYPSTSEAVLNALRDLHPLPKIILEYRQVHKIKSTFVDGLLACMKKGSISSTWNQTGTVTGRLSAKHPNIQGISKHPIQITTPKNFKGKEDKILTISPRAMFVSSKGHTFLAADFSQIELRILTHLSGDPELLKLFQESERDDVFSTLTSQWKDVPVEQVTHADREQTKKVVYAVVYGAGKERLAACLGVPIQEAAQFLESFLQKYKKIKDFARAAIAQCHQTGCVVSIMGRRRPLPRIHAHDQQLRAQAERQAVNFVVQGSAADLCKLAMIHVFTAVAASHTLTARLVAQIHDELLFEVEDPQIPECAALVRRTMESLEQVPLKVSLSAGRSWGHLVPLQEAWLRQAHVALSLPATAWLPLGPLPAPSPHPCIFRLHFVCSPRQQWEERTGFQQSIVWPSPRSPALYAPGRINPLGLGWPAIPWSKCLCKALLIL

SEQ ID NO: 255640 - protein, 311 aa, Artificial Sequence
  derived and/or modified sequence
MAVGSQDYGLWQLFRTLELPLIPILAVMESHAIQVNKEEMEKTSALLGARLKELEQEAHFVAGERFLITSNNQLREILFGKLKLHLLSQRNSLPRTGLQKYPSTSEAVNIQGISKHPIQITTPKNFKGKEDKILTISPRAMFVSSKGHTFLAADFSQIELRILTHLSGDPELLKLFQESERDDVFSTLTSQWKDVPVEQVTHADREQTKKVVYAVVYGAGKERLAACLGVPIQEAAQFLESFLQKYKKIKDFARAAIAQCHQTGCVVSIMGRRRPLPRIHAHDQQLRAQAERQAVNFVVQAQSQHLCVEVP

SEQ ID NO: 255641 - protein, 900 aa, Artificial Sequence
  derived and/or modified sequence
MENYEALVGFDLCNTPLSSVAQKIMSAMHSGDLVDSKTWGKSTETMEVINKSSVKYSVQLEDRKTQSPEKKDLKSLRSQTSRGSAKLSPQSFSVRLTDQLSADQKQKSISSLTLSSCLIPQYNQEASVLQKKGHKRKHFLMENINNENKGSINLKRKHITYNNLSEKTSKQMALEEDTDDAEGYLNSGNSGALKKHFCDIRHLDDWAKSQLIEMLKQAAALVITVMYTDGSTQLGADQTPVSSVRGIVVLVKRQAEGGHGCPDAPACGPVLEGFVSDDPCIYIQIEHSAIWDQEQEAHQQFARNVLFQTMKCKCPVICFNAKDFVRIVLQFFGNDGSWKHVADFIGLDPRIAAWLIDPSDATPSFEDLVEKYCEKSITVKVNSTYGNSSRNIVNQNVRENLKTLYRLTMDLCSKLKDYGLWQLFRTLELPLIPILAVMESHAIQVNKEEMEKTSALLGARLKELEQEAHFVAGERFLITSNNQLREILFGKLKLHLLSQRNSLPRTGLQKYPSTSEAVLNALRDLHPLPKIILEYRQVHKIKSTFVDGLLACMKKGSISSTWNQTGTVTGRLSAKHPNIQGISKHPIQITTPKNFKGKEDKILTISPRAMFVSSKGHTFLAADFSQIELRILTHLSGDPELLKLFQESERDDVFSTLTSQWKDVPVEQVTHADREQTKKVVYAVVYGAGKERLAACLGVPIQEAAQFLESFLQKYKKIKDFARAAIAQCHQTGCVVSIMGRRRPLPRIHAHDQQLRAQAERQAVNFVVQGSAADLCKLAMIHVFTAVAASHTLTARLVAQIHDELLFEVEDPQIPECAALVRRTMESLEQVQALELQLQVPLKVSLSAGRSWGHLVPLQEAWGPPPGPCRTESPSNSLAAPGSPASTQPPPLHFSPSFCL

SEQ ID NO: 255642 - DNA, 1911 bp, Artificial Sequence
  derived and/or modified sequence
atgaaatgtaagtgtcccgtcatttgttttaatgcaaaggactttgtgcggatcgttctgcaattcttcgggaacgacgggagctggaagcacgtcgctgatttcatagggttggacccccgaattgcagcatggctgatcgatccatccgacgccaccccatccttcgaggatcttgtggagaagtattgcgagaagtctataacagtgaaggtgaacagtacctatgggaatagctccagaaacatcgtgaaccagaatgtgcgggagaatctgaagactctgtaccggctgaccatggatctctgcagtaagctgaaggattacggcctgtggcagcttttccgaacgttagagctgcccctgattccaatcctcgcagtaatggagtcccacgctatccaagtgaacaaggaggaaatggaaaaaacttctgcattgctcggcgctcgcctgaaagagctagaacaagaggctcactttgtagccggagagaggtttctgatcaccagtaataaccaactgcgagagatcttgtttggtaaactgaagctgcatttgttaagccagagaaattccctgcccaggacgggcctgcagaaatacccttcaacctctgaggccgtgctgaatgcccttagagatttgcacccgctgccgaaaatcattcttgagtacaggcaagtccacaagataaagtcgacttttgtagatggcctactagcttgcatgaagaagggcagcatttcatccacttggaaccagaccggaaccgtcaccggaaggctgagcgccaagcaccctaacatccagggaatttctaaacaccctatccagattactacgcctaagaattttaagggtaaggaggataaaatcctaacaatctctcctcgggctatgtttgttagcagtaaaggccacacattcctcgcagctgatttctcacaaatcgaattgcgaatcctgactcacctgagtggtgacccggaacttctcaagttattccaggagtctgagcgggatgacgtgttttcgacccttacctcgcaatggaaagatgttccagtggagcaagtcactcatgcagaccgtgagcagaccaagaaggtcgtctacgctgtcgtgtacggagccgggaaggaaaggcttgcagcctgcctcggtgtaccaatacaggaagccgcacaattcttggagagctttttacagaagtataagaagatcaaggattttgctcgtgcggccattgcacagtgtcaccagacaggctgcgtggtcagtatcatgggcagacgccggccccttcctcgaatccacgctcacgatcagcaactcagggcccaggccgaaagacaggccgttaattttgtcgtgcagggatccgcggctgatctgtgtaaactggccatgatacatgtctttactgcggtagccgcctcccacaccctgactgcccggttggtcgcccagatccatgacgagctcctttttgaggtggaagatccacaaatccccgaatgcgccgctttggtcaggcgcacaatggagtccttggaacaggttccactgaaagtcagcttgtctgccgggcggagctgggggcacttagttcccttacaggaagcatggcttcgccaggctcatgttgcattaagcttgcccgcaaccgcgtggttgccactgggacctctccctgctccctctcctcatccatgcatctttcggctgcacttcgtttgcagtccacgacagcagtgggaagaacgcacaggattccagcaatcgatcgtctggccatctcccagatcccccgccttgtacgcgcctggacggatcaaccctttgggcctgggatggcccgccatcccctggtctaagtgcctgtgcaaagctctcttgattttatag

SEQ ID NO: 255643 - DNA, 936 bp, Artificial Sequence
  derived and/or modified sequence
atggccgtgggatctcaagactatggtctgtggcagttgttccggacactggaactgccgctaatcccaatactcgctgtgatggagtcgcatgccattcaagtgaacaaagaagagatggagaagacgtcggcgctgttaggcgccagactcaaagagctggaacaggaagctcattttgtcgctggcgagcgcttcctcatcacatctaataatcagctgcgcgagatactgtttggtaagttgaagctgcacctgctttcccagagaaacagcctgcctcggaccggcctgcagaaatatccctccacaagtgaagcagtgaatatacagggtatatctaagcatcctattcagatcaccactccgaaaaattttaaggggaaggaggacaaaattctgacaatcagtccccgtgcaatgttcgtttcatccaagggccatactttccttgcagctgatttctctcaaattgagcttagaatccttacccatctgagcggagacccggagctgctgaaactattccaggaaagtgaacgcgatgacgtgttctctacgcttacctctcagtggaaggacgtgcccgtcgagcaggttacccatgcagaccgggagcaaactaagaaagtcgtatatgcggtagtttatggcgccggcaaagagcgcttggctgcgtgcctgggggtccccatacaagaggctgcacagttcctggaaagcttcctccagaagtacaaaaaaatcaaggatttcgccagggcagctatcgcacagtgtcatcagaccgggtgcgtggtgtcgatcatggggcgaaggcgtcctctgccccgcattcacgcccatgaccagcagctccgtgcacaggcagaaaggcaagcggtcaacttcgtggtacaggcccagtctcagcatttgtgcgtggaggttccctag

SEQ ID NO: 255644 - DNA, 2703 bp, Artificial Sequence
  derived and/or modified sequence
atggagaactacgaggccctcgtcggattcgacttgtgcaacacacccctctccagcgtggcacagaagattatgtcggccatgcacagcggcgacttagtggatagtaagacctggggtaagagcaccgaaacaatggaagttattaataaaagtagtgtgaagtactctgtgcagctggaagacaggaaaactcagagtcctgagaagaaggacctgaagtcactacgctcacaaacaagtcgcggttctgccaaactgtctccccagtctttctccgtccggctgacagatcagctgtccgccgatcagaagcagaaaagtatttcctccctcaccttatcttcttgcctcattccccagtataaccaggaggcgtccgtcctgcagaaaaagggccataaaaggaagcatttcctgatggagaatataaacaacgagaacaaagggtctataaatttaaaacgaaagcacatcacctataataatctgtcagagaagacaagcaaacagatggccctggaagaagatacagatgacgctgaggggtacttaaatagcggcaattcgggggcacttaaaaaacatttttgtgacatcagacacttagatgattgggccaaaagccaactcatcgagatgctgaaacaagcagccgcccttgtgatcacggtaatgtatacagacggcagcacgcagctgggagctgaccagacccctgtcagcagtgtgagaggtattgtggtgcttgtaaaacgacaggctgagggtggccatggttgccccgacgcccctgcctgtggccctgtgcttgagggtttcgtgtccgacgacccgtgtatttacatccagatcgagcactccgcgatctgggaccaggagcaggaggcccaccagcagttcgcccgaaacgtcctgttccagacaatgaaatgtaaatgcccagtgatctgctttaatgcaaaagactttgtaaggattgtcctgcagttctttgggaatgacggctcctggaagcacgtggctgacttcatcggcctggatccaagaattgccgcctggctaattgacccgagtgatgccacccctagcttcgaagaccttgtagagaagtattgtgagaagtccataactgtcaaggtgaacagcacttacggaaattcttcccggaacattgttaatcagaatgtgagggaaaatttaaaaaccttgtaccgactgacaatggatctctgcagcaagctgaaggactacggcctgtggcaactgttccggactctggaattgcctttgatcccgatcctggcggtgatggaaagccacgccatccaggttaacaaagaagagatggaaaaaacttccgccctattaggggcacgcctcaaggagctggagcaggaggcacattttgtggccggtgagcgattcctgattacctccaataaccagctgagggagatcctgtttggaaagctgaaactccacctgctctcacagaggaacagcttgccacgaactggactccagaaatatcccagtaccagcgaagcagtcctgaatgctttaagggacctgcatcccctgccgaagatcatcctcgagtacaggcaggttcacaaaattaagtccaccttcgtcgacggactgctcgcctgcatgaaaaaggggtctatatcaagcacatggaaccagactggaacagtgaccggcagactgtctgctaagcatccaaatatccaggggatttccaaacatcccatccagatcacgacgccaaagaacttcaaaggcaaggaggacaagatactcactatctccccaagggcaatgttcgtttccagcaagggccatacctttctggccgcagattttagtcagattgagcttcgaattttgactcatctgtccggcgacccagagttgctgaagctttttcaggaaagcgaacgggatgacgtgttctccaccctcacctcgcaatggaaggacgtgcctgtcgaacaagtgacccacgccgaccgtgagcagacgaagaaggtggtttatgcagtggtctacggggccggcaaggagcgactcgcagcctgtctcggcgtgcctatccaggaagcagctcagttcctggagagctttctgcagaaatataagaaaattaaagattttgcgagggccgctattgcccagtgtcatcagacaggctgtgttgtgtcaattatggggcgacgaaggccacttcctcgaatacacgctcatgaccagcagctgagagcccaggccgagcggcaggcggtaaatttcgtcgtgcaaggttctgccgccgatctatgtaagttggccatgattcatgtgtttacagctgtggctgcaagccataccttgacggcccgcctggtggcacagatccacgatgaactcctgtttgaggttgaagatccgcaaattccagaatgcgccgccttagttcgtaggaccatggaaagtctggaacaggtgcaagcactggagttgcagttgcaagttcctctcaaagtcagtctctccgcgggccgttcatggggtcatctcgtaccactccaggaagcatggggcccaccgcctgggccgtgtagaactgagtcaccttctaattccctggccgctcctggttctccggcctccacccagccaccacctctacacttcagtccaagtttctgtctttag

SEQ ID NO: 255645 - DNA, 2703 bp, Artificial Sequence
  derived and/or modified sequence
atggagaactacgaagcgctggtgggatttgatctctgcaatacccctttaagcagcgtcgcccaaaagattatgtccgctatgcatagcggcgacctcgttgattccaagacttggggaaagtcaacagagactatggaggtgatcaataagtcgagcgtgaaatatagcgtgcagctggaggatcgcaaaacacagagccctgagaaaaaggacctcaaaagtctgcgttcccagacatcgagaggatcggctaagctctctccccagagtttttccgtcagacttaccgatcaactcagcgctgatcagaagcagaagagcataagctcccttacgttatcctcctgcctcatccctcagtataaccaggaagcgtctgtgctgcagaagaagggccataaacggaaacattttctgatggagaatattaataacgagaataagggttccattaaccttaagcggaaacatatcacttataacaacctcagcgaaaaaacttctaagcagatggccctcgaggaggataccgacgacgccgagggctatctgaactccgggaacagcggagcgctgaaaaaacatttttgcgacatccggcatttagatgactgggccaagtctcaactgattgaaatgctgaagcaagccgccgccctggtgatcaccgtgatgtacacggacgggagcacccaactcggcgccgatcaaacaccagtctcttcagtaagaggcattgtcgtcctggtcaagagacaggctgaaggcggacacgggtgccccgatgctcccgcctgtggtccagtcctggaaggattcgtgtcagacgacccctgtatttatattcagattgaacacagtgctatctgggaccaggaacaagaggcgcatcagcagtttgccaggaacgtgttgtttcagacgatgaaatgcaagtgccccgttatatgcttcaatgccaaagatttcgtgcgcatcgtcctgcaattttttggaaacgatggctcctggaagcatgtcgcggatttcatcggtctggaccctagaattgccgcctggctgatcgatcccagcgacgccacacccagctttgaagacctcgtggaaaaatattgcgaaaaaagtataaccgtgaaggtgaactcgacctacggcaactcatcacggaacatcgtgaaccagaacgtgagggagaacttgaagactctctaccgcttaactatggacctttgttccaagttgaaggactacggtctttggcagctgtttagaacattggagctgccactgatccctattctggcggttatggagagtcatgcgatacaggtaaacaaagaggaaatggaaaaaacttcagctctcctgggcgcgcggctcaaagaactcgagcaggaagctcacttcgtggccggcgaacgtttcctaataacctcaaataaccagttgcgtgagattctgttcggtaaactcaagctgcacctcttaagccaacgcaactcactgcccagaaccgggctgcagaagtacccttcgacttccgaggccgtgctcaacgccctcagggatcttcacccactccccaagatcattttagagtacaggcaggtgcacaagattaaatcaacatttgtggatggtttgcttgcttgcatgaagaaagggagcatatcaagtacttggaatcagaccggtaccgtgaccggtcgcctgtccgctaaacaccccaacatacagggaatctctaagcacccgattcagataactacaccgaagaactttaagggcaaagaagacaaaatactcaccatctcccctcgcgctatgtttgttagctctaaaggccacacttttctggccgccgactttagccagattgagcttcggatccttactcacttgtctggggacccagaactccttaagttatttcaagagtccgaaagggacgatgtcttttctacactcacttcacaatggaaggatgtccctgtggagcaggtgacccacgccgatagagagcagacaaagaaggtggtttatgctgttgtctacggcgccgggaaagaaagattagcagcttgcctcggtgtacctatccaggaggcggctcagtttttagaaagcttcttacagaagtacaagaagataaaggatttcgccagagctgcgatcgcccaatgccaccagacaggctgcgtggtttcgattatgggccgacgacggccactgccccgaattcatgctcacgaccaacagctacgcgcccaggccgagcgtcaggccgttaactttgtggtgcaaggtagcgccgcagacctttgtaagttagctatgatccacgtattcacagccgtggccgcctcccatacgttgactgcgaggctagtcgcgcagatccatgatgagctgctgttcgaagtggaagacccacagattcccgaatgtgctgccctggtgagacgaacaatggagtccctggagcaagtccaggccctggagttacaattgcaggtcccactgaaggtaagtctgagcgctggtcgttcttggggtcatctcgtgccactgcaggaagcatggggcccacctcctggaccttgcaggacagaatccccctctaattccctcgctgctccgggtagtcctgcctcaactcagcctccaccattacacttttcaccaagcttctgcttatag

SEQ ID NO: 255646 - DNA, 1911 bp, Artificial Sequence
  derived and/or modified sequence
atgaagtgcaagtgccctgtgatctgcttcaatgccaaggactttgtgcgcatcgtgctgcagttctttggaaatgatggctcctggaagcacgtggccgacttcatcggcctggaccccagaattgctgcctggctgattgaccccagtgatgccacccccagctttgaggacctggtggagaagtactgtgagaagagcatcaccgtgaaggtgaacagcacctacggcaacagcagcagaaatattgtgaaccagaatgtgcgggagaacctgaagaccctgtaccgcctgaccatggacctgtgcagcaagctgaaggactatggcctgtggcagctgttccgcaccctggagctgcccctcatccccatcctggccgtgatggagagccacgccatccaggtgaacaaggaggagatggagaagaccagcgccctgctgggcgcccggctgaaggagctggagcaggaggcccactttgtggccggggagcgcttcctgatcaccagcaacaaccagctgcgggagatcctgtttgggaagctgaagctgcacctgctgagccagaggaacagcctgcccaggacaggcctgcagaagtaccccagcaccagcgaggccgtgctgaatgccctgcgggacctgcaccccctgcccaagatcatcctggagtaccggcaggtgcacaagatcaagagcacctttgtggatggcctgctggcctgcatgaagaagggcagcatcagcagcacctggaaccagacaggcaccgtgacaggccgcctgagcgccaagcaccccaacatccagggcatcagcaagcaccccatccagatcaccacccccaagaacttcaagggcaaggaggacaagatcctgaccatcagcccccgggccatgtttgtgagcagcaagggccacaccttcctggccgctgacttcagccagatcgagctgcgcatcctgacccacctgagcggggaccctgagctgctgaagctgttccaggagagcgagagagatgatgtgttcagcaccctgaccagccagtggaaggatgtgcctgtggagcaggtgacccatgctgaccgggagcagaccaagaaggtggtgtatgctgtggtgtatggagctgggaaggagcggctggccgcctgcctgggcgtgcccatccaggaggccgcccagttcctggagagcttcctgcagaagtacaagaagatcaaggactttgcccgggccgccatcgcccagtgccaccagacaggctgtgtggtgtccatcatgggcagaagaagacccctgccccgcatccacgcccatgaccagcagctgcgggcccaggccgagcggcaggccgtgaactttgtggtgcagggcagcgctgctgacctgtgcaagctggccatgattcatgtgttcaccgctgtggccgccagccacaccctgacagcccggctggtggcccagatccatgatgagctgctgtttgaggtggaggacccccagatcccagaatgtgccgccctggtgcggaggaccatggagagcctggagcaggtgcccctgaaggtgtccctgtctgctggccgctcctggggccacctggtgcccctgcaggaggcctggctgcggcaggcccacgtggccctgagcctgcctgccacagcctggctgcccctgggccccctgcctgcccccagcccccacccctgcatcttccggctgcactttgtgtgcagcccccggcagcagtgggaggagaggacaggcttccagcagagcatcgtgtggcccagccccaggagccctgccctgtatgcccctggccgcatcaaccccctgggcctgggctggccagccatcccctggagcaagtgcctgtgcaaggccctgctgatcctgtag

SEQ ID NO: 255647 - DNA, 936 bp, Artificial Sequence
  derived and/or modified sequence
atggctgtgggcagccaggactatggcctgtggcagctgttccgcaccctggagctgcccctcatccccatcctggccgtgatggagagccacgccatccaggtgaacaaggaggagatggagaagaccagcgccctgctgggcgcccggctgaaggagctggagcaggaggcccactttgtggccggggagcgcttcctgatcaccagcaacaaccagctgcgggagatcctgtttgggaagctgaagctgcacctgctgagccagaggaacagcctgcccaggacaggcctgcagaagtaccccagcaccagcgaggccgtgaacatccagggcatcagcaagcaccccatccagatcaccacccccaagaacttcaagggcaaggaggacaagatcctgaccatcagcccccgggccatgtttgtgagcagcaagggccacaccttcctggccgctgacttcagccagatcgagctgcgcatcctgacccacctgagcggggaccctgagctgctgaagctgttccaggagagcgagagagatgatgtgttcagcaccctgaccagccagtggaaggatgtgcctgtggagcaggtgacccatgctgaccgggagcagaccaagaaggtggtgtatgctgtggtgtatggagctgggaaggagcggctggccgcctgcctgggcgtgcccatccaggaggccgcccagttcctggagagcttcctgcagaagtacaagaagatcaaggactttgcccgggccgccatcgcccagtgccaccagacaggctgtgtggtgtccatcatgggcagaagaagacccctgccccgcatccacgcccatgaccagcagctgcgggcccaggccgagcggcaggccgtgaactttgtggtgcaggcccagagccagcacctgtgtgtggaggtgccctag

SEQ ID NO: 255648 - DNA, 2703 bp, Artificial Sequence
  derived and/or modified sequence
atggagaactatgaggccctggtgggctttgacctgtgcaacacccccctgagctctgtggcccagaagatcatgtctgccatgcacagcggggacctggtggacagcaagacctggggcaagagcacagagaccatggaggtgatcaacaagagctctgtgaagtacagcgtgcagctggaggacaggaagacccagagccctgagaagaaggacctgaagagcctgcggagccagaccagccggggcagcgccaagctgagcccccagagcttctctgtgcggctgacagaccagctgtctgctgaccagaagcagaagagcatcagcagcctgaccctgagcagctgcctgatcccccagtacaaccaggaggcctctgtgctgcagaagaagggccacaagaggaagcacttcctgatggagaacatcaacaatgaaaataaaggcagcatcaacctgaagaggaagcacatcacctacaacaacctgtctgagaagaccagcaagcagatggccctggaggaggacacagatgatgctgagggctacctgaacagcggcaacagcggggccctgaagaagcacttctgtgacatccgccacctggatgactgggccaagagccagctgattgagatgctgaagcaggccgccgccctggtgatcaccgtgatgtacacagatggcagcacccagctgggcgctgaccagacccctgtgtcctctgtgcggggcatcgtggtgctggtgaagaggcaggccgagggcggccacggctgcccagatgccccagcctgtggccctgtgctggagggctttgtgtctgatgacccctgcatctacatccagatcgagcacagcgccatctgggaccaggagcaggaggcccaccagcagtttgccagaaatgtgctcttccagaccatgaagtgcaagtgccctgtgatctgcttcaatgccaaggactttgtgagaattgtgctgcagttctttggaaatgatggctcctggaagcacgtggccgacttcatcggcctggaccccagaattgctgcctggctgattgaccccagtgatgccacccccagctttgaggacctggtggagaagtactgtgagaagagcatcaccgtgaaggtgaacagcacctacggcaacagcagcaggaacatcgtgaaccagaatgtgcgggagaacctgaagaccctgtaccgcctgaccatggacctgtgcagcaagctgaaggactatggcctgtggcagctgttccgcaccctggagctgcccctcatccccatcctggccgtgatggagagccacgccatccaggtgaacaaggaggagatggagaagaccagcgccctgctgggcgcccggctgaaggagctggagcaggaggcccactttgtggccggggagcgcttcctgatcaccagcaacaaccagctgcgggagatcctgtttgggaagctgaagctgcacctgctgagccagaggaacagcctgcccaggacaggcctgcagaagtaccccagcaccagcgaggccgtgctgaatgccctgcgggacctgcaccccctgcccaagatcatcctggagtaccggcaggtgcacaagatcaagagcacctttgtggatggcctgctggcctgcatgaagaagggcagcatcagcagcacctggaaccagacaggaacagtgacaggccgcctgagcgccaagcaccccaacatccagggcatcagcaagcaccccatccagatcaccacccccaagaacttcaagggcaaggaggacaagatcctgaccatcagcccccgggccatgtttgtgagcagcaagggccacaccttcctggccgctgacttcagccagatcgagctgcgcatcctgacccacctgagcggggaccctgagctgctgaagctgttccaggagagcgagagagatgatgtgttcagcaccctgaccagccagtggaaggatgtgcctgtggagcaggtgacccacgccgaccgggagcagaccaagaaggtggtgtatgctgtggtgtatggagctgggaaggagcggctggccgcctgcctgggcgtgcccatccaggaggccgcccagttcctggagagcttcctgcagaagtacaagaagatcaaggactttgcccgggccgccatcgcccagtgccaccagacaggctgtgtggtgtccatcatgggcagaagaagacccctgccccgcatccacgcccatgaccagcagctgcgggcccaggccgagcggcaggccgtgaactttgtggtgcagggcagcgctgctgacctgtgcaagctggccatgatccacgtgttcaccgctgtggccgccagccacaccctgacagcccggctggtggcccagatccatgatgagctgctgtttgaggtggaggacccccagatcccagaatgtgccgccctggtgcggaggaccatggagagcctggagcaggtgcaggccctggagctgcagctgcaggtgcccctgaaggtgtccctgtctgctggccgctcctggggccacctggtgcccctgcaggaggcctggggccccccacctggcccctgcaggacagagagccccagcaacagcctggccgcccctggcagccctgccagcacccagcccccacccctgcacttcagccccagcttctgcctgtag

SEQ ID NO: 255649 - DNA, 1911 bp, Artificial Sequence
  derived and/or modified sequence
atgaagtgcaagtgccccgtgatctgcttcaacgccaaggacttcgtgcgcattgtactccagttttttgggaatgacggcagctggaaacacgttgccgatttcataggcttggacccacgcattgcagcctggctgatcgatccatccgacgccactccatccttcgaagatctggtggagaagtattgcgaaaaatctataacagtaaaggtcaattccacttatggaaatagctcccgcaatatagttaatcagaatgttcgcgagaacctgaaaactctgtataggctgacgatggatctgtgctctaaactaaaagattacgggctttggcagctgtttcgaacccttgagctgccactcatacccattctggctgtcatggaaagtcacgccatccaggtgaataaggaggaaatggagaagacttcagctctgttgggagccaggctaaaggagttggagcaggaagcccatttcgtggccggcgagagattcctgattacctcgaacaatcaactaagggaaatcctgttcggtaagctgaaacttcacctactgtcacagagaaactctctacctcgaaccgggctgcagaagtatcccagcactagcgaagctgttctcaacgctttacgcgaccttcaccctctaccaaagattatactcgagtaccggcaggtccataaaatcaagtcaaccttcgtcgacggactgctcgcgtgcatgaagaagggaagtatctccagcacatggaaccagacgggcaccgtaaccggaaggttgtctgcgaagcaccccaacattcagggaatctctaagcacccgatccagatcacgacccctaaaaacttcaaggggaaagaggacaaaatcctgactatcagtcctagggctatgttcgtttcctccaagggccatactttcctggctgccgatttctcgcagatcgagctgcgcatacttactcacctctcaggcgatcccgagctgctgaaactattccaggaaagtgagagagacgacgtgtttagtaccctgacttcccagtggaaggacgtgcctgtggagcaggtaacacatgcagaccgtgagcagacgaagaaggtagtgtacgccgtcgtgtacggcgcggggaaagaaagattggctgcgtgtttgggcgtacccatccaggaggcggcccagtttctcgagagctttctgcaaaaatataaaaaaataaaggactttgccagagcagccattgcccagtgtcatcaaaccggatgcgtggtttctattatgggaaggaggagacctctcccccgcatccatgcacacgatcagcagctcagagcacaggcggagcggcaggcagtgaacttcgtcgtccagggtagcgccgccgacctctgcaaactcgcgatgatccacgtgttcactgctgtggctgccagtcacacccttaccgccaggctggtcgcgcagattcacgacgagctgctgtttgaggttgaggatccacagatccctgagtgcgctgccttggtgagacgaactatggaatccctcgaacaggtcccactaaaggtctctctgagtgctggtcgttcatggggacacctagttccacttcaggaggcttggctgcgccaggctcacgttgctctttctctgcctgccacagcctggctgcctctgggccctctcccggcccccagcccccatccttgtatctttcgcctccattttgtctgctctcctaggcagcagtgggaggaacgcacggggtttcagcagtccattgtgtggccctcaccccgcagccctgctttgtacgctcccgggcgtatcaatcctctgggcctggggtggccagccatcccttggtctaaatgcttatgcaaagccctgcttatcctgtag

SEQ ID NO: 255650 - DNA, 936 bp, Artificial Sequence
  derived and/or modified sequence
atggccgtgggcagccaggactacggcctgtggcagctgttccggacgctagagcttccccttattccaatcctggcagtaatggaatcgcatgcgattcaggtcaataaggaagaaatggagaagacatctgccctacttggcgctcgtctcaaggaacttgaacaggaggcacactttgttgcaggcgaacggtttctgatcactagcaacaatcagctaagagagatcttgtttgggaagctcaagttacatctgctctcgcagcgcaattctttgcccaggaccggcctacagaagtacccaagtacttcagaggcagtgaacatacagggaatctccaaacacccaatacagatcactactcccaaaaatttcaaaggtaaggaagataaaatcctgaccatcagtcctagggcaatgttcgtgtcatcgaaaggacacaccttcctggctgcagattttagccagatcgaactgcggattctaactcacctatctggcgatccggaactgttgaagctattccaggagagtgagcgggatgatgtgttctccacattgacgagtcagtggaaagatgtgcccgtggagcaggtcacccacgccgaccgggagcagactaagaaggtggtttacgccgtagtgtacggcgccggtaaagagcgcctagcagcctgcttaggggtccctattcaggaagccgcccagtttttggagtcgttcctccagaagtataaaaagatcaaggatttcgccagggcagcaatcgcccagtgtcatcaaaccggctgtgtggtcagcattatgggccggcgccgccccttaccaaggatacatgcccacgaccagcaactccgcgcccaagccgagcggcaggccgtgaatttcgtggtgcaagcccagtcacagcacctatgcgtggaagtcccgtag

SEQ ID NO: 255651 - DNA, 2703 bp, Artificial Sequence
  derived and/or modified sequence
atggagaactacgaggccctggtgggcttcgacctgtgcaacacccccctgtctagtgtggcccagaagattatgtcagccatgcatagtggtgatctggtcgattccaagacctggggcaagtcaacagaaactatggaagtgataaacaagtcttccgttaagtactcagtacaactggaggataggaagacccagtctcctgaaaaaaaagatctcaagagcttgcgctcccaaacaagccgcggttcagctaagctttccccccagtctttttcggtgcgattgacagatcagctgtcggctgatcagaagcagaaatcgatttccagcctgacactgtcctcttgtctgatcccacaatataaccaggaggcctccgtcttgcaaaaaaaaggccacaagcggaagcactttctcatggagaacattaacaacgagaacaaggggagcattaatctaaagcgcaagcacattacatataataacctttcagagaagacaagtaaacaaatggcactggaggaggatacagacgatgccgaaggctatttgaactccggcaatagtggagcactgaaaaaacatttctgcgacatcaggcatcttgatgattgggcaaaaagtcagctgattgagatgcttaaacaagctgctgcccttgtgattactgtgatgtacacggacggctcaacccagctgggcgcagatcagactccggtttcatctgtgagaggtatagttgtcctagtgaagagacaagcggagggaggacacggctgccccgacgccccagcctgcggcccggtgctcgagggcttcgtaagtgacgatccctgcatctacatccagatcgaacattcagctatttgggatcaggaacaagaagcccatcagcagtttgcacgcaacgttctgttccaaacaatgaagtgtaaatgtcccgttatatgttttaatgccaaggatttcgttcgtatcgtactccaatttttcgggaacgatgggtcatggaaacatgtcgctgacttcataggtttggacccccgcatcgccgcctggcttattgatccctccgatgcaacgccaagctttgaggatttggtagagaaatactgtgagaaaagtatcacagtgaaagtgaattctacctatggcaattcctctcgcaatatcgtcaaccagaatgtcagagagaatttaaagactctgtataggctcacaatggatctctgcagcaaattaaaggactatggtttgtggcagctgtttcgcacccttgaattacccctgatcccaattcttgccgtaatggaatcacatgctattcaagtcaacaaggaagagatggagaaaactagcgccctccttggcgccaggttgaaggaactggagcaggaggcgcactttgtggcaggtgagcggtttctgattacatcaaacaaccagctcagagagatcttattcggcaaactcaaattacatctcctgtcccagcggaattctttgcctagaactggactccaaaaataccccagtacttccgaggctgtcctgaacgctctgagggatcttcatcccctacctaaaattattctggaataccggcaggtgcacaagattaagtcgaccttcgtagacggtctccttgcctgtatgaagaaggggagcattagcagcacctggaatcagacaggcactgtgacaggtagactaagtgctaaacaccccaacattcagggaatatcaaaacaccccatccagattactactcccaagaacttcaagggtaaggaagacaagatcttaactatcagtccccgagctatgttcgtgagcagcaaaggccacacatttctggctgctgatttctcacagatcgagctcaggatccttacacatttgagcggtgaccctgagctgctcaagttgttccaggaatctgaacgtgacgatgtcttctcaaccctcacatctcaatggaaagacgtgccagtggaacaggttacccatgccgaccgagaacagacaaaaaaggtcgtttatgccgtcgtctatggtgccggaaaggagcgccttgctgcctgcctgggggttccaatacaggaggccgcacagtttctggagagtttcctccagaaatataagaaaatcaaggattttgctcgagctgccattgcacagtgtcatcaaaccggctgcgtcgtgtccataatgggacgccgtaggcccctccctcggattcatgcgcatgatcagcaattgcgagcacaggctgaacgacaagcagtgaatttcgtggttcagggcagcgccgccgatctttgtaaactcgccatgatccatgtctttaccgccgtggcggcaagtcacacattgactgctaggctggtggcacaaatccacgacgaactgctgtttgaagttgaggatcctcagatccccgaatgtgcagcgctggtacgcaggaccatggagagcctcgaacaggtgcaggctcttgagctgcaactgcaagtgccgcttaaagttagcctttcagcaggcaggtcgtgggggcacttggtgcccctgcaggaagcgtggggtccaccccctggaccttgcaggactgaaagccccagcaattcactcgcagcaccaggttctccagctagcactcagccccctcccctgcacttttccccctccttttgcttgtag

SEQ ID NO: 255652 - DNA, 2703 bp, Artificial Sequence
  derived and/or modified sequence
atggagaactacgaggccctggtgggcttcgacctgtgcaacaccccccttagctccgtggctcagaaaattatgtctgccatgcactcgggagacctggtcgacagcaagacatggggtaagtccacagaaactatggaggttattaataagtcctccgttaagtatagcgtccaactggaggataggaaaacacaaagccccgaaaagaaggacttgaagtccctgagatcgcagacctctagggggtctgcaaagctgtcacctcagtctttttccgtgcgactgacggaccagctcagcgcagatcagaagcagaaatctatctccagcctcaccctaagcagctgcctgattccccaatacaaccaggaggcatctgttctccagaagaagggacacaaacggaagcactttttgatggagaacattaataacgagaataagggctctatcaacttgaagaggaagcacataacatataacaatctatcagagaaaacgtctaagcagatggctctggaggaggacactgatgacgccgaggggtatctgaattcaggaaattccggagctcttaaaaagcatttctgcgatatcagacaccttgatgactgggccaaatctcagcttattgaaatgctgaaacaggctgctgctctggtgataactgtaatgtacaccgacggctcaactcagctcggtgccgaccagactccagtttcctccgtgagaggcatcgtggtcttggtaaaaagacaggccgaaggcggtcacggatgcccagacgcaccagcgtgtgggcccgttctggaggggttcgtgtcggatgacccttgtatctatatccagatcgagcattcggcgatctgggatcaagaacaggaggcccatcagcagtttgccaggaatgttttgttccaaacgatgaaatgtaagtgcccagtgatctgctttaacgccaaggatttcgtgcgtatcgtgctacaattttttggaaacgacggctcttggaaacatgtggccgacttcatcggtctagatccccggattgccgcctggttgatagaccccagcgacgcaacccctagttttgaggatctcgtcgagaaatactgtgagaaaagtatcaccgtgaaggtcaattccacatacggaaattcaagcaggaacatcgtcaatcaaaatgtgcgagaaaacctcaaaacgctgtatcgcttgacaatggatctctgttcgaagctgaaagattatggactgtggcagctctttaggactctcgagcttccattaattccaattttggcagtgatggagagtcatgctatacaggttaataaggaggagatggaaaagacctcagccctgctgggcgccagacttaaggaactggaacaagaggcccactttgttgccggcgaaagattcttgattaccagtaacaaccagctgcgtgagattttgtttggaaagctcaagctgcacctgctgagccagagaaattcactgcctaggacaggtctgcaaaaatacccatcaacaagcgaagccgtcttgaacgctctaagggacctgcaccccctgcctaagattatattggagtatcggcaggtgcacaaaatcaagagtacctttgtggacggccttctggcttgcatgaaaaaagggtctatctcctccacctggaatcagacaggcaccgtgaccggccggctaagtgcaaagcatccgaacatccaaggaattagtaagcatccaattcagattactacccccaaaaacttcaaagggaaggaggataaaatcctgacaatctctcccagagccatgttcgtgagctcaaagggccacacatttctggctgcagatttctcgcagattgagctgcggattctcactcatctcagtggcgacccagagctgctgaaactgtttcaggaaagcgagagggatgatgtgttttctaccttgacttcacaatggaaggacgtccccgtggagcaggtgactcatgccgatcgagaacagactaagaaagtcgtgtatgctgttgtatacggggccggcaaagagcgtcttgccgcatgcctgggggtcccaattcaagaagctgcccagttcttagagtcttttctccagaagtacaaaaagattaaggatttcgcccgggcagcgatcgctcagtgtcatcagaccggttgtgttgtgagcatcatgggacgtcggcgcccccttcccagaattcatgcccacgaccagcaattgcgagcacaggctgagcggcaagcagtgaacttcgtggtacaggggtcggccgcggatctttgcaaacttgccatgattcacgtcttcaccgcagtggctgcttctcatacgctgaccgcacgacttgttgcccaaattcatgacgaactactcttcgaagttgaagatccacagatacctgagtgtgcagccttggtcaggcgcaccatggagtccctagagcaggtccaggccctggagctgcagctgcaggttcctcttaaggtcagtcttagtgcaggcagaagttggggtcacttggtcccacttcaggaggcctggggacctcctcctggcccatgccgcacggagtctcccagcaattcccttgcagctcccggtagcccggctagtacacagccgccccctctgcatttcagtccatctttctgtctgtag

SEQ ID NO: 255653 - DNA, 2835 bp, Artificial Sequence
  derived and/or modified sequence
atggaaaattatgaggcattggtaggctttgatctctgtaatacaccgctctccagtgttgctcagaagattatgtctgctatgcattcaggtgatttagtggattctaagacttggggaaagagtacagagactatggaagtgataaacaagtccagtgttaagtattcagtacaacttgaagacaggaagactcaatcaccagaaaaaaaggatcttaaatctttaagaagtcagacatcaagaggttctgccaagctgtctcctcagtccttcagtgtcaggctcacagatcagctgtctgctgaccaaaaacagaagagcatcagctcattgactctttcaagttgtttaattccacagtataatcaagaggcttcagttctacagaaaaaggggcataaaagaaagcatttcctaatggagaatataaataatgaaaataaaggaagcattaatcttaaaagaaaacatattacatataataatttgtcagagaaaacaagtaaacaaatggcattggaagaagatactgatgacgccgaaggctacctaaattctgggaactcaggagcattgaaaaaacatttttgtgatattaggcatttggatgattgggcaaaaagccagctgattgaaatgctcaaacaggcagcagccctggtgataactgtgatgtatactgatggttccacccagctaggagctgaccagacccccgtttcttctgttagaggaattgtggtgttagtaaaacgccaagcagagggtggccatggctgtccagatgccccggcctgtggtcctgttctggagggctttgtgtcagatgatccatgcatctacattcaaatagagcactctgctatctgggaccaagaacaggaggcacatcaacaatttgcccggaacgtgctatttcaaacaatgaaatgtaaatgtcctgttatttgttttaatgctaaggattttgtgagaatagtgctgcagttttttggcaatgatggcagttggaagcatgttgctgattttatagggctagatcccagaattgctgcatggcttatagatcctagtgatgccacaccctcttttgaagatttagtagaaaaatactgtgaaaaatccattacagttaaagtgaacagcacatatggaaattcctcaagaaatattgtgaatcagaatgtacgtgagaacctgaagacactctacagacttacaatggacctttgctctaaactgaaggattatggtttatggcaactatttcgtactttggagcttcctctgataccaattttggcagtgatggaaagccatgccattcaggtgaacaaagaggagatggagaagacgtcagcacttcttggggctcgtctcaaggaattggagcaagaagctcattttgttgcaggagaacggtttcttataacgagcaataaccagcttcgagagatcctctttggcaagttaaagctgcacctgctgagtcaaaggaacagtctccccagaacggggttgcagaaatacccgtctacatcagaagcagtgttaaatgctctgcgagaccttcatccattacccaagataattttggaatacaggcaggttcacaagatcaagtcaacctttgtagatggattactagcttgcatgaaaaagggctccatttcctctacatggaatcagactggaactgtgactggaagactttcagccaagcatcctaatatccaaggtatctccaagcacccaattcagattactacacctaagaattttaaaggtaaagaagacaagattctcacgatctccccgagggccatgtttgtttcatccaaaggccacacctttctagcagcagacttttcacagattgaattgcgcattcttacacatttatctggagatccggaacttctgaagttattccaggaatctgaaagagatgatgtattttctactctgacttcacagtggaaggatgtgcccgtggaacaggtgacacacgcagacagagagcaaaccaagaaggtggtgtacgcggtggtctatggagcagggaaggagcggctggctgcttgccttggagttcctattcaggaagctgcccagtttttggagagttttttgcagaagtacaagaaaatcaaggacttcgcccgagcagctattgcccagtgtcaccagacaggctgtgtggtgtccatcatgggcagaaggagacccctgccaaggattcacgctcatgaccagcaactccgggcacaagcagagcgacaggcagtgaacttcgtggtgcaaggctccgctgctgacctctgcaagctggccatgatccatgtcttcactgcagtggctgcttcccacaccttgacggccaggctggtggcccagatccatgatgagctgctgtttgaagtggaagatccgcagatcccggagtgtgcagctctcgtcaggaggaccatggagtccttggaacaggtacccctcaaggtgagcctgagtgccggccgctcatggggacacctggtgccactgcaggaggcctggctccgccaggcccatgtcgcactgagtctcccagcaacagcctggctgcccctgggtcccctgccagcacccagcccccacccctgcatttttcgccttcattttgtctgtagccccaggcaacagtgggaggagagaactggtttccagcagtccattgtgtggccttccccaaggtcaccagctctgtacgccccaggacgcattaaccctttggggctggggtggcccgccatcccctggagtaaatgcctgtgcaaagccctcctcatcctt

SEQ ID NO: 255654 - DNA, 3564 bp, Artificial Sequence
  derived and/or modified sequence
atggctgtggggagccaggattatggtttatggcaactatttcgtactttggagcttcctctgataccaattttggcagtgatggaaagccatgccattcaggtgaacaaagaggagatggagaagacgtcagcacttcttggggctcgtctcaaggaattggagcaagaagctcattttgttgcaggagaacggtttcttataacgagcaataaccagcttcgagagatcctctttggcaagttaaagctgcacctgctgagtcaaaggaacagtctccccagaacggggttgcagaaatacccgtctacatcagaagcagtgaatatccaaggtatctccaagcacccaattcagattactacacctaagaattttaaaggtaaagaagacaagattctcacgatctccccgagggccatgtttgtttcatccaaaggccacacctttctagcagcagacttttcacagattgaattgcgcattcttacacatttatctggagatccggaacttctgaagttattccaggaatctgaaagagatgatgtattttctactctgacttcacagtggaaggatgtgcccgtggaacaggtgacacacgcagacagagagcaaaccaagaaggtggtgtacgcggtggtctatggagcagggaaggagcggctggctgcttgccttggagttcctattcaggaagctgcccagtttttggagagttttttgcagaagtacaagaaaatcaaggacttcgcccgagcagctattgcccagtgtcaccagacaggctgtgtggtgtccatcatgggcagaaggagacccctgccaaggattcacgctcatgaccagcaactccgggcacaagcagagcgacaggcagtgaacttcgtggtgcaagctcagagccagcacctctgtgtggaggtaccgtgagagctgtggcgatggtgcagaatgctgagtgcaccatgaaccgtgtgccatgggacctcaagacagtaccacgcgccccataggctccgctgctgacctctgcaagctggccatgatccatgtcttcactgcagtggctgcttcccacaccttgacggccaggtcagtgggtggtggtctcccagggcttggatgggagggttagtattctgtgggaagaccccctcggggctcgtgattctgatgatcaccatctctgcttatcgggcccccgtcccctcctgaggctctcagcccatggaaggccctgggggctactcacagcaggcatgcagacaacaaccagccatccaccagcgtggggtgcagatgaggcctctccagacagaaatgctgtctcccccagacccctcctcctcggggtgtctgcacagcacaggggcaccccttgaggctgcccaccccagaggcaggcgaacccctcagccccttgagcaggaccctggggactccaaactgcccccacccctgcctgttgctgccaccaatgccaggcagtgtgccccacgcccagctctgcccccacccctacctgttgctgccaccagtgccaggcagtgtgccccacgcccagctctgcccccacccctacctgttgctgccaccagtgccaggcagtgtgccccacgcccagctctgcccccacccccgagcccagagccaacatgcagatgtgccttggtgggggggggctccgccctggctgccccccaggccacagctctctcaggcctctgtccctgcctcagttattcccccagggcacattcctcaagagtgtgggtggccaggggacaagcagccctcgcccagccacctcctccttgccagccaaggcctgggggtgctgcaagtggtgacccagacacctcctctcctcgttctccttgtgcgggatcccctcaggagtcccggagccccttctgggagctaacctgccccagccccccacagtgtcagtccccgaagggcccctcgccctctgacacaccatggacgttttcccacccccaccctaagagccctcaagctcttggcgacagtcccgtgggggtctaagcactgccccagggactctgcttgcagcttcactgggctgtgggctctcagtgctgctttctgcagtaactgaagtggtcagaaggcaggagtggggcattagaagattcactctcggctgggcacagtggctcacgcctgtaatcccagcactttgggaggccgagacgggtggatcacctgaggtcaggagtttgagaccaacctggccaacagggtaaaacatcgtcactactaaaaatacaaaaattagccaggtgtggtggcgcacacctgtaatcccagctactcaggaggctgaggcaggaggatcgcttgaacccaggaggtggaggttgcagtgtgccaagatcgcaccactgcactccagcctgggtgagagcaagactctgtctaacagaaaaaaaaataagattcactctcagtcctctcctgccccatctcactgccatctgcattcattcccaacacacacgtgcacacacacgcacacacaagcacatgcacccatacacgtgttcacccatgcatacaacccatgcacacacatatacgcatatacactgatgccaggcagcctctagtgccccacagtgttctcatggtgtcctgaaatccatgcatcccgctcacttccacagtttctgcaggtaaattatagcttctcccaggatatgagcagcttgtgctagtttccgtcttggcaggaactgaaagccaaatggtggtcctgcctctaagatactgcaagtctagaaaagttgattcaaggctgggcgcagtggctcacacctgtaatcccagcatttgggaggccgagtcgggtggatcacttgagctcagaagtttgtgaacaacatatgtgttgcctgggcaacataatgaaacctgtctctacaaaataaaagctggccatggtggtgcacacctgtagtcccagctactcaggaggctgaagtgggaggatcacctgagcctgggagttcaaggctgcagtgagccatgatcataccactgcactccagcctgggcaacagggcaagaacctgcctcaaaaaaagaaaaaatcggttcactttcagcccttgtggaattgataaaggaagttggcatgtgaggagctgaggtctctctctgttgctgactgagtccttctgaaagctggacacagacacttttactcaggaacgcagttactcgctggtcatccttctgtcatcagccattggctgtcacgaggaaatgcttctcatagcaaaatgcaaagcagactcgtgtggaatattgggcacatggtctgtgttttgtgaacgtgatttgttcttccaggagtaatgtgaaaggctgtggatggcgtctggaagggacgggtgcaggctcagtgtggccaggcatctctcgctgaagcagcaggcatgaaactcgatcactgggaggcacacggtgcccctagagtgagctgagatcgcaccacttcactccagcctgggcgagagcgagagtctgtct

SEQ ID NO: 255655 - DNA, 2899 bp, Artificial Sequence
  derived and/or modified sequence
atggaaaattatgaggcattggtaggctttgatctctgtaatacaccgctctccagtgttgctcagaagattatgtctgctatgcattcaggtgatttagtggattctaagacttggggaaagagtacagagactatggaagtgataaacaagtccagtgttaagtattcagtacaacttgaagacaggaagactcaatcaccagaaaaaaaggatcttaaatctttaagaagtcagacatcaagaggttctgccaagctgtctcctcagtccttcagtgtcaggctcacagatcagctgtctgctgaccaaaaacagaagagcatcagctcattgactctttcaagttgtttaattccacagtataatcaagaggcttcagttctacagaaaaaggggcataaaagaaagcatttcctaatggagaatataaataatgaaaataaaggaagcattaatcttaaaagaaaacatattacatataataatttgtcagagaaaacaagtaaacaaatggcattggaagaagatactgatgacgccgaaggctacctaaattctgggaactcaggagcattgaaaaaacatttttgtgatattaggcatttggatgattgggcaaaaagccagctgattgaaatgctcaaacaggcagcagccctggtgataactgtgatgtatactgatggttccacccagctaggagctgaccagacccccgtttcttctgttagaggaattgtggtgttagtaaaacgccaagcagagggtggccatggctgtccagatgccccggcctgtggtcctgttctggagggctttgtgtcagatgatccatgcatctacattcaaatagagcactctgctatctgggaccaagaacaggaggcacatcaacaatttgcccggaacgtgctatttcaaacaatgaaatgtaaatgtcctgttatttgttttaatgctaaggattttgtgagaatagtgctgcagttttttggcaatgatggcagttggaagcatgttgctgattttatagggctagatcccagaattgctgcatggcttatagatcctagtgatgccacaccctcttttgaagatttagtagaaaaatactgtgaaaaatccattacagttaaagtgaacagcacatatggaaattcctcaagaaatattgtgaatcagaatgtacgtgagaacctgaagacactctacagacttacaatggacctttgctctaaactgaaggattatggtttatggcaactatttcgtactttggagcttcctctgataccaattttggcagtgatggaaagccatgccattcaggtgaacaaagaggagatggagaagacgtcagcacttcttggggctcgtctcaaggaattggagcaagaagctcattttgttgcaggagaacggtttcttataacgagcaataaccagcttcgagagatcctctttggcaagttaaagctgcacctgctgagtcaaaggaacagtctccccagaacggggttgcagaaatacccgtctacatcagaagcagtgttaaatgctctgcgagaccttcatccattacccaagataattttggaatacaggcaggttcacaagatcaagtcaacctttgtagatggattactagcttgcatgaaaaagggctccatttcctctacatggaatcagactggaactgtgactggaagactttcagccaagcatcctaatatccaaggtatctccaagcacccaattcagattactacacctaagaattttaaaggtaaagaagacaagattctcacgatctccccgagggccatgtttgtttcatccaaaggccacacctttctagcagcagacttttcacagattgaattgcgcattcttacacatttatctggagatccggaacttctgaagttattccaggaatctgaaagagatgatgtattttctactctgacttcacagtggaaggatgtgcccgtggaacaggtgacacacgcagacagagagcaaaccaagaaggtggtgtacgcggtggtctatggagcagggaaggagcggctggctgcttgccttggagttcctattcaggaagctgcccagtttttggagagttttttgcagaagtacaagaaaatcaaggacttcgcccgagcagctattgcccagtgtcaccagacaggctgtgtggtgtccatcatgggcagaaggagacccctgccaaggattcacgctcatgaccagcaactccgggcacaagcagagcgacaggcagtgaacttcgtggtgcaaggctccgctgctgacctctgcaagctggccatgatccatgtcttcactgcagtggctgcttcccacaccttgacggccaggctggtggcccagatccatgatgagctgctgtttgaagtggaagatccgcagatcccggagtgtgcagctctcgtcaggaggaccatggagtccttggaacaggtgcaggcattggagctgcagcttcaggtacccctcaaggtgagcctgagtgccggccgctcatggggacacctggtgccactgcaggaggcctggggccctccgccaggcccatgtcgcactgagtctcccagcaacagcctggctgcccctgggtcccctgccagcacccagcccccacccctgcatttttcgccttcattttgtctgtagccccaggcaacagtgggaggagagaactggtttccagcagtccattgtgtggccttccccaaggtcaccagctctgtacgccccaggacgcattaaccctttggggctggggtggcccgccatcccctggagtaaatgcctgtgcaaagccctcctcatccttgtctgagtgaattcttcctgtgagtgggaagtg

SEQ ID NO: 255656 - DNA, 3253 bp, Artificial Sequence
  derived and/or modified sequence
agtgcgaggcgcgcggggcacggagggcggtggcggcgggctcctgcgagaagcaagcggaacttcctgagcgtgcttaggtgtcacagctgggtgaccctccgaaggaaggttttgccgctggcgcgtctggtgtatcgcggccttggggccgcggatccctggggcttgccgctgcctctggggttcgcgcggccctggcgtcggggctgcctcagcgctggctgaaggccggcccgaagcacccttaattgtggccgcgcgcttccctgctgctcctgctgttctccgcgtcgcggtggtggactctggaggtggagccttgcccggcgagacgttgaggattttgtgaaaatggaaaattatgaggcattggtaggctttgatctctgtaatacaccgctctccagtgttgctcagaagattatgtctgctatgcattcaggtgatttagtggattctaagacttggggaaagagtacagagactatggaagtgataaacaagtccagtgttaagtattcagtacaacttgaagacaggaagactcaatcaccagaaaaaaaggatcttaaatctttaagaagtcagacatcaagaggttctgccaagctgtctcctcagtccttcagtgtcaggctcacagatcagctgtctgctgaccaaaaacagaagagcatcagctcattgactctttcaagttgtttaattccacagtataatcaagaggcttcagttctacagaaaaaggggcataaaagaaagcatttcctaatggagaatataaataatgaaaataaaggaagcattaatcttaaaagaaaacatattacatataataatttgtcagagaaaacaagtaaacaaatggcattggaagaagatactgatgacgccgaaggctacctaaattctgggaactcaggagcattgaaaaaacatttttgtgatattaggcatttggatgattgggcaaaaagccagctgattgaaatgctcaaacaggcagcagccctggtgataactgtgatgtatactgatggttccacccagctaggagctgaccagacccccgtttcttctgttagaggaattgtggtgttagtaaaacgccaagcagagggtggccatggctgtccagatgccccggcctgtggtcctgttctggagggctttgtgtcagatgatccatgcatctacattcaaatagagcactctgctatctgggaccaagaacaggaggcacatcaacaatttgcccggaacgtgctatttcaaacaatgaaatgtaaatgtcctgttatttgttttaatgctaaggattttgtgagaatagtgctgcagttttttggcaatgatggcagttggaagcatgttgctgattttatagggctagatcccagaattgctgcatggcttatagatcctagtgatgccacaccctcttttgaagatttagtagaaaaatactgtgaaaaatccattacagttaaagtgaacagcacatatggaaattcctcaagaaatattgtgaatcagaatgtacgtgagaacctgaagacactctacagacttacaatggacctttgctctaaactgaaggattatggtttatggcaactatttcgtactttggagcttcctctgataccaattttggcagtgatggaaagccatgccattcaggtgaacaaagaggagatggagaagacgtcagcacttcttggggctcgtctcaaggaattggagcaagaagctcattttgttgcaggagaacggtttcttataacgagcaataaccagcttcgagagatcctctttggcaagttaaagctgcacctgctgagtcaaaggaacagtctccccagaacggggttgcagaaatacccgtctacatcagaagcagtgttaaatgctctgcgagaccttcatccattacccaagataattttggaatacaggcaggttcacaagatcaagtcaacctttgtagatggattactagcttgcatgaaaaagggctccatttcctctacatggaatcagactggaactgtgactggaagactttcagccaagcatcctaatatccaaggtatctccaagcacccaattcagattactacacctaagaattttaaaggtaaagaagacaagattctcacgatctccccgagggccatgtttgtttcatccaaaggccacacctttctagcagcagacttttcacagattgaattgcgcattcttacacatttatctggagatccggaacttctgaagttattccaggaatctgaaagagatgatgtattttctactctgacttcacagtggaaggatgtgcccgtggaacaggtgacacacgcagacagagagcaaaccaagaaggtggtgtacgcggtggtctatggagcagggaaggagcggctggctgcttgccttggagttcctattcaggaagctgcccagtttttggagagttttttgcagaagtacaagaaaatcaaggacttcgcccgagcagctattgcccagtgtcaccagacaggctgtgtggtgtccatcatgggcagaaggagacccctgccaaggattcacgctcatgaccagcaactccgggcacaagcagagcgacaggcagtgaacttcgtggtgcaaggctccgctgctgacctctgcaagctggccatgatccatgtcttcactgcagtggctgcttcccacaccttgacggccaggctggtggcccagatccatgatgagctgctgtttgaagtggaagatccgcagatcccggagtgtgcagctctcgtcaggaggaccatggagtccttggaacaggtgcaggcattggagctgcagcttcaggtacccctcaaggtgagcctgagtgccggccgctcatggggacacctggtgccactgcaggaggcctggggccctccgccaggcccatgtcgcactgagtctcccagcaacagcctggctgcccctgggtcccctgccagcacccagcccccacccctgcatttttcgccttcattttgtctgtagccccaggcaacagtgggaggagagaactggtttccagcagtccattgtgtggccttccccaaggtcaccagctctgtacgccccaggacgcattaaccctttggggctggggtggcccgccatcccctggagtaaatgcctgtgcaaagccctcctcatccttgtctgagtgaattcttcctgtgagtgggaagtg

SEQ ID NO: 255657 - DNA, 1911 bp, Artificial Sequence
  derived and/or modified sequence
atgaagtgtaagtgtcccgtgatctgcttcaacgcgaaggactttgtgcgaatcgtgttgcaatttttcggcaatgatggctcttggaagcatgtagccgacttcattggcttggaccccaggatcgccgcttggttaatcgacccgtccgatgccacaccctccttcgaggatctcgttgaaaagtactgcgaaaagtccattacggtcaaggtaaactcaacatatggcaatagttcgcgaaatatcgtgaatcagaacgttagagagaatctgaagactctgtacagattgactatggacctctgttccaagcttaaggattacgggctgtggcaactgtttcggactcttgagctgcctctgatccccattcttgcagtgatggagtctcacgcaattcaggttaacaaagaagagatggagaagaccagcgcattactaggagcgcgactcaaggagctggagcaagaggcccactttgtcgcgggtgagcgtttcctgatcactagcaacaaccagcttcgggagatcctctttggaaagctgaaactgcacttactcagtcaacgtaattccctccctcgaacggggctccagaagtacccttccaccagcgaagccgtcctcaacgcccttagagacctccaccccctgccgaaaattattttggagtacaggcaggttcacaaaatcaaatcgacgttcgtcgatggtctacttgcttgcatgaaaaaagggagcatcagttcgacctggaatcagacagggacagtaaccggaaggttatctgctaagcaccccaatatacaggggatttctaaacatcctattcaaatcacgacccccaaaaactttaaaggcaaagaggacaagatcctcacaatcagtccccgagcaatgttcgtatccagcaaggggcatacctttctggccgctgatttctcgcagatagagctgcggatcctcacccatctgagtggagatcccgaactgttaaaactgttccaggagagcgaacgagacgatgttttttctacattgacaagccagtggaaagacgtacctgtagagcaggtgacacatgctgaccgggagcagactaagaaggtagtgtacgccgtcgtgtacggcgctggaaaagaacgcctcgccgcatgtctaggggtgcctatccaggaggcagcgcagtttttggaaagttttctacagaagtataagaaaataaaggacttcgccagagccgctatcgctcagtgccaccaaactgggtgtgtcgtttcaataatgggacgcaggcggccacttcccaggatccatgcgcatgaccaacagcttcgcgctcaagcggagaggcaggccgtgaatttcgtcgtgcagggctctgcagcagacctctgcaagctcgctatgatccatgtcttcacagccgtggctgcctcccatactctgacagcccgacttgttgcacagatccacgatgaactgctgttcgaggtggaagacccacaaattcctgagtgcgccgcattggtacgcagaacgatggagagcctggagcaggtgcctctgaaggtatctctatctgcgggacgatcatggggacatctcgtccccctccaggaagcttggttaagacaggcccatgtcgcgctctcccttcctgccaccgcctggctgccgctcggccctctccccgctccgagcccccatccttgcatatttagactccactttgtatgtagccccaggcagcagtgggaagagcgtaccggcttccagcaatccatcgtctggcctagtccgaggagtcctgccctgtatgcgcctggaaggatcaacccactaggcctcggttggccggcaattccttggagcaagtgtttatgcaaagcccttctgattctgtag

SEQ ID NO: 255658 - DNA, 936 bp, Artificial Sequence
  derived and/or modified sequence
atggcggtgggttcccaggactatggtttgtggcagctctttcgcacactcgaactgcccctgattcctatcttggccgtcatggagtctcacgcaatccaggttaacaaggaagagatggagaaaacttctgccctactcggcgcaaggctgaaagagttggagcaggaagcccactttgtcgcgggagaacgatttctgattacaagcaataatcagctgagggagatcctctttgggaaactaaagctgcacctgctctcgcagagaaatagcctccctcggactgggctccaaaagtatccgtcgacctctgaagcagttaatattcaggggatctcgaaacaccctattcagatcactacgcctaagaatttcaaaggaaaggaggataagattctgactatcagcccacgtgccatgttcgtaagctccaagggtcacacttttttggccgctgattttagtcagattgagcttcgaatcctcacacacctgtcaggcgaccctgagctcttaaaactatttcaggagtcagagcgagacgatgtgttttcaactcttacaagtcagtggaaggatgtgccggtggagcaggtgacgcacgcagacagagagcagacaaaaaaggtagtttacgccgtagtgtatggtgcgggaaaagagagactggcggcttgtcttggtgttccaatccaggaggccgcacagtttctagaatcatttctccagaagtacaaaaaaatcaaggatttcgcacgggcagcaattgcacagtgccatcagacaggctgcgtcgtctctattatggggcgtagacgacctttgcccaggatccatgctcacgatcagcagcttcgcgctcaggctgaacgccaggcagtgaattttgtggttcaagctcagagccagcatctgtgtgtggaggtcccatag

SEQ ID NO: 255659 - DNA, 2703 bp, Artificial Sequence
  derived and/or modified sequence
atggagaattacgaagccctggtcggatttgacctgtgcaacacgcccctgagttccgtggcccaaaaaatcatgtctgctatgcactccggcgatctggtggatagcaaaacatgggggaagagtacagagaccatggaagttataaataagtccagtgtgaagtacagtgtgcaactggaagatcggaaaacgcagagcccagagaagaaagatcttaaatccctgcggagccaaactagccgtggtagcgctaagctgagccctcaatcattttccgttagactgaccgaccagcttagcgccgaccagaagcaaaaatctatttcttctctgaccctaagtagttgtctgatcccccaatacaaccaggaagcgtccgtgttgcagaagaaggggcacaagagaaaacacttcttaatggagaatattaataacgagaataaaggcagtataaacctgaagaggaaacacattacatataacaatctatctgagaaaactagcaaacagatggccctggaggaagacaccgatgacgccgaaggctacctcaactccggtaactcaggggcattgaagaaacatttctgcgatatccgtcacctggatgactgggctaagtcccagcttatcgagatgctaaaacaggccgcagccttggttatcaccgtcatgtacaccgatggttctacccaactgggggcagaccagacccctgtaagcagcgtccgcggtatcgtggtcctggttaagcggcaggctgagggcggacacgggtgcccggatgccccagcctgtggcccagtcctcgaaggcttcgtttccgacgatccctgcatctatatccagattgaacactctgccatatgggaccaagagcaggaggcgcaccagcagttcgctcgcaatgtactttttcaaaccatgaagtgtaagtgtcctgtgatttgttttaacgcgaaagacttcgttcgcatcgtcctgcagttctttggcaatgacggctcttggaagcatgtggccgactttattggactcgaccccagaatcgcagcttggctgattgaccctagcgatgcgactccgtctttcgaggatctggttgagaagtattgcgaaaaaagtatcaccgttaaagtcaactctacatacgggaactcttctcggaatattgtgaatcagaatgtccgagaaaatctgaagacactataccgactgacgatggacctgtgctctaagctcaaggactatgggctgtggcagttatttaggacccttgagctgcctctgattccaattctggctgtcatggagtctcatgcaatccaggtcaacaaagaggaaatggaaaaaaccagcgcattgctaggtgctagacttaaggaactcgagcaggaggcacatttcgtcgcaggagaacgctttctgatcactagcaataatcagctgcgggaaatcctcttcggcaagctgaagcttcacctgctatcccagcgcaattccctcccccgaacaggtttacagaagtacccctcaactagcgaagccgtgctgaatgcactgcgcgaccttcatccccttcccaaaatcatcttggaataccgccaagtacacaaaataaagtccacatttgttgatggcctgctagcctgcatgaaaaaaggcagcatcagctctacatggaatcaaactgggacggtgaccggcagactgtccgccaagcaccccaatattcagggaatctctaagcatcctatccagatcactacgcccaaaaactttaagggcaaagaagacaagatcctgaccatatctccacgtgcgatgttcgtgagttctaagggacacacatttttagcagccgatttctctcagatcgaattaaggattctcactcacttgagcggcgatccggagctgttaaagctgttccaggaatctgaacgcgatgacgtgttttccacgctgacctctcagtggaaagacgttccggtggagcaggtcacacacgccgatcgcgagcaaactaaaaaagtggtctatgcagtggtctatggggcaggtaaagagcgactggccgcttgtctgggcgtcccaatccaagaggctgctcaatttctggaatctttcctgcaaaaatataagaaaattaaagatttcgcccgagcagctattgcccaatgccatcagactgggtgtgtcgttagcataatgggccgtagacgacccctgcctagaatacacgctcatgaccagcagctgcgcgctcaggcggagcgccaagcagtgaactttgtggtacagggcagcgctgccgacctgtgcaagttagctatgatccacgtgttcactgcagtggcagcttctcacaccttgactgccaggttggtggcccagattcacgacgaactcctgtttgaggtggaggacccccagattcctgagtgtgccgcactggtcagacgtacgatggagtcgctggagcaggtgcaagctttggaattacaactgcaagtgcctcttaaagtcagcctctctgccggtcgctcgtggggtcacctggtcccactacaggaagcatgggggccacctcctgggccttgtcggaccgagtcaccaagcaactccctagccgcacctggaagccctgcctctacccagcccccacccctgcacttttctccctccttttgtttatag

SEQ ID NO: 255660 - DNA, 2703 bp, Artificial Sequence
  derived and/or modified sequence
atggaaaactatgaggccctcgtggggttcgacctgtgtaatactccactgagcagcgtggcccagaaaatcatgagcgccatgcacagcggagatctcgtggattcaaagacctgggggaagtcaaccgaaaccatggaggtaatcaataaaagtagcgtcaagtattccgtgcaactggaggatcgcaaaacccagtctcctgaaaaaaaggatctcaagtccttgaggagtcagaccagccgaggctctgccaagttgtccccacaatctttcagtgtgaggctgacagaccagctgtccgctgatcagaagcagaagtcaatatcaagtctgacgttgtccagttgtttaattcctcagtacaaccaggaagccagcgtgctccagaagaaggggcacaaaaggaagcacttcctcatggaaaacatcaacaatgagaacaaagggtccatcaatctgaaaaggaagcacattacgtacaataatctgtccgaaaaaaccagcaagcagatggctttagaggaagatactgacgacgccgaaggttatcttaatagtggcaatagcggcgctcttaaaaagcatttttgcgatatacgccacctcgacgactgggcaaaaagccaactgatcgagatgctaaagcaagcggctgccttagtgatcaccgtgatgtacaccgacgggagcacacaactgggagcggaccagacccccgtgtcttctgtcagagggattgtcgtgctcgtgaaacggcaagccgagggcggacacggctgcccagatgctccggcttgtggacctgtgctagaagggttcgtctctgacgatccatgtatttacatacagatcgaacacagcgctatttgggaccaggaacaggaagctcaccagcagttcgcccgaaatgtcctttttcagaccatgaaatgcaagtgtcccgtgatttgtttcaatgccaaagatttcgtgcgaatagttctccagttttttggtaacgacgggagctggaaacatgtagcggatttcatcggactcgatcctaggattgccgcttggctcatcgatccaagcgacgcaaccccgtcttttgaagacctggtagaaaagtactgcgagaagagcataacagtgaaagtgaactctacgtatgggaacagttcaaggaacatcgttaatcagaacgtccgggagaacttgaaaacgctgtaccggctgacaatggatctgtgctccaagctcaaagattatggcttgtggcaacttttcagaactttggaactacccctgatcccgatactagccgtgatggaatctcacgcaatacaggttaacaaggaggagatggaaaagaccagcgccctcctaggcgctaggttaaaagaactggagcaagaggcccactttgtggcaggtgaacggttcctgatcacatccaacaatcagcttcgagaaatcctgttcggaaagctgaagctccaccttctgtcccagcgtaactcactcccacgcactggactgcaaaagtatcccagcacaagtgaggccgtgctgaacgccctacgagacctacacccgctcccaaaaatcatcctcgagtaccgccaggtgcataagattaagagtacattcgttgacggcctgttggcatgtatgaaaaagggatctatctcctctacctggaatcagacagggactgtgactggaagattgagcgccaaacaccctaacatacagggaatcagcaagcacccgatacagataactacgcccaagaactttaagggaaaggaggataagatcttgacaatttccccccgagctatgttcgtttcatcaaaaggacacacgttcttggcagccgacttttcacagatcgagctccggattttaacacatttgtctggtgatcctgaactcctgaagctgtttcaggaatccgagcgagacgatgtcttcagcacactgacatcccagtggaaagacgtcccagtggagcaggtgacgcacgccgatagagagcagacaaaaaaggtggtctacgctgtcgtgtacggcgcaggcaaggagcgccttgctgcatgcctaggcgttcccatccaggaagcagcacaattccttgagtccttcctacagaaatacaagaagattaaagactttgctcgtgccgctatcgcccaatgccaccagaccggatgcgtggtgtctattatggggagaagaaggcctctgccacggatccacgcccacgaccaacaactaagagcccaggccgagcgacaggcagtgaatttcgtcgttcagggctctgccgctgatttgtgcaaactggcgatgatccatgtgtttacagccgtggcagcaagccatactcttaccgccaggctggtggcccaaatccatgatgagctgttgtttgaagtggaagacccacaaatcccagaatgtgcagccctggtccggaggacaatggagtccctggagcaagtgcaggccctggagcttcagctccaggtgccactgaaggtgtcactgtccgccggacggtcttggggtcacctagttcccctgcaggaggcatggggacccccacccggaccctgccgtaccgagtctccatcgaacagtttggcggcacctggcagcccagcatcaacacagccaccacctctccacttttctcctagtttctgcctctag

SEQ ID NO: 255661 - DNA, 1911 bp, Artificial Sequence
  derived and/or modified sequence
atgaagtgcaagtgccccgtgatctgcttcaacgccaaggacttcgtgagaatcgtgctgcagttcttcggcaacgacggcagctggaagcacgtggccgacttcatcggcctggaccccagaatcgccgcctggctgatcgaccccagcgacgccacccccagcttcgaggacctggtggagaagtactgcgagaagagcatcaccgtgaaggtgaacagcacctacggcaacagcagcagaaacatcgtgaaccagaacgtgagagagaacctgaagaccctgtacagactgaccatggacctgtgcagcaagctgaaggactacggcctgtggcagctgttcagaaccctggagctgcccctgatccccatcctggccgtgatggagagccacgccatccaggtgaacaaggaggagatggagaagaccagcgccctgctgggcgccagactgaaggagctggagcaggaggcccacttcgtggccggcgagagattcctgatcaccagcaacaaccagctgagagagatcctgttcggcaagctgaagctgcacctgctgagccagagaaacagcctgcccagaaccggcctgcagaagtaccccagcaccagcgaggccgtgctgaacgccctgagagacctgcaccccctgcccaagatcatcctggagtacagacaggtgcacaagatcaagagcaccttcgtggacggcctgctggcctgcatgaagaagggcagcatcagcagcacctggaaccagaccggcaccgtgaccggcagactgagcgccaagcaccccaacatccagggcatcagcaagcaccccatccagatcaccacccccaagaacttcaagggcaaggaggacaagatcctgaccatcagccccagagccatgttcgtgagcagcaagggccacaccttcctggccgccgacttcagccagatcgagctgagaatcctgacccacctgagcggcgaccccgagctgctgaagctgttccaggagagcgagagagacgacgtgttcagcaccctgaccagccagtggaaggacgtgcccgtggagcaggtgacccacgccgacagagagcagaccaagaaggtggtgtacgccgtggtgtacggcgccggcaaggagagactggccgcctgcctgggcgtgcccatccaggaggccgcccagttcctggagagcttcctgcagaagtacaagaagatcaaggacttcgccagagccgccatcgcccagtgccaccagaccggctgcgtggtgagcatcatgggcagaagaagacccctgcccagaatccacgcccacgaccagcagctgagagcccaggccgagagacaggccgtgaacttcgtggtgcagggcagcgccgccgacctgtgcaagctggccatgatccacgtgttcaccgccgtggccgccagccacaccctgaccgccagactggtggcccagatccacgacgagctgctgttcgaggtggaggacccccagatccccgagtgcgccgccctggtgagaagaaccatggagagcctggagcaggtgcccctgaaggtgagcctgagcgccggcagaagctggggccacctggtgcccctgcaggaggcctggctgagacaggcccacgtggccctgagcctgcccgccaccgcctggctgcccctgggccccctgcccgcccccagcccccacccctgcatcttcagactgcacttcgtgtgcagccccagacagcagtgggaggagagaaccggcttccagcagagcatcgtgtggcccagccccagaagccccgccctgtacgcccccggcagaatcaaccccctgggcctgggctggcccgccatcccctggagcaagtgcctgtgcaaggccctgctgatcctgtag

SEQ ID NO: 255662 - DNA, 936 bp, Artificial Sequence
  derived and/or modified sequence
atggccgtgggcagccaggactacggcctgtggcagctgttcagaaccctggagctgcccctgatccccatcctggccgtgatggagagccacgccatccaggtgaacaaggaggagatggagaagaccagcgccctgctgggcgccagactgaaggagctggagcaggaggcccacttcgtggccggcgagagattcctgatcaccagcaacaaccagctgagagagatcctgttcggcaagctgaagctgcacctgctgagccagagaaacagcctgcccagaaccggcctgcagaagtaccccagcaccagcgaggccgtgaacatccagggcatcagcaagcaccccatccagatcaccacccccaagaacttcaagggcaaggaggacaagatcctgaccatcagccccagagccatgttcgtgagcagcaagggccacaccttcctggccgccgacttcagccagatcgagctgagaatcctgacccacctgagcggcgaccccgagctgctgaagctgttccaggagagcgagagagacgacgtgttcagcaccctgaccagccagtggaaggacgtgcccgtggagcaggtgacccacgccgacagagagcagaccaagaaggtggtgtacgccgtggtgtacggcgccggcaaggagagactggccgcctgcctgggcgtgcccatccaggaggccgcccagttcctggagagcttcctgcagaagtacaagaagatcaaggacttcgccagagccgccatcgcccagtgccaccagaccggctgcgtggtgagcatcatgggcagaagaagacccctgcccagaatccacgcccacgaccagcagctgagagcccaggccgagagacaggccgtgaacttcgtggtgcaggcccagagccagcacctgtgcgtggaggtgccctag

SEQ ID NO: 255663 - DNA, 2703 bp, Artificial Sequence
  derived and/or modified sequence
atggagaactacgaggccctggtgggcttcgacctgtgcaacacccccctgagcagcgtggcccagaagatcatgagcgccatgcacagcggcgacctggtggacagcaagacctggggcaagagcaccgagaccatggaggtgatcaacaagagcagcgtgaagtacagcgtgcagctggaggacagaaagacccagagccccgagaagaaggacctgaagagcctgagaagccagaccagcagaggcagcgccaagctgagcccccagagcttcagcgtgagactgaccgaccagctgagcgccgaccagaagcagaagagcatcagcagcctgaccctgagcagctgcctgatcccccagtacaaccaggaggccagcgtgctgcagaagaagggccacaagagaaagcacttcctgatggagaacatcaacaacgagaacaagggcagcatcaacctgaagagaaagcacatcacctacaacaacctgagcgagaagaccagcaagcagatggccctggaggaggacaccgacgacgccgagggctacctgaacagcggcaacagcggcgccctgaagaagcacttctgcgacatcagacacctggacgactgggccaagagccagctgatcgagatgctgaagcaggccgccgccctggtgatcaccgtgatgtacaccgacggcagcacccagctgggcgccgaccagacccccgtgagcagcgtgagaggcatcgtggtgctggtgaagagacaggccgagggcggccacggctgccccgacgcccccgcctgcggccccgtgctggagggcttcgtgagcgacgacccctgcatctacatccagatcgagcacagcgccatctgggaccaggagcaggaggcccaccagcagttcgccagaaacgtgctgttccagaccatgaagtgcaagtgccccgtgatctgcttcaacgccaaggacttcgtgagaatcgtgctgcagttcttcggcaacgacggcagctggaagcacgtggccgacttcatcggcctggaccccagaatcgccgcctggctgatcgaccccagcgacgccacccccagcttcgaggacctggtggagaagtactgcgagaagagcatcaccgtgaaggtgaacagcacctacggcaacagcagcagaaacatcgtgaaccagaacgtgagagagaacctgaagaccctgtacagactgaccatggacctgtgcagcaagctgaaggactacggcctgtggcagctgttcagaaccctggagctgcccctgatccccatcctggccgtgatggagagccacgccatccaggtgaacaaggaggagatggagaagaccagcgccctgctgggcgccagactgaaggagctggagcaggaggcccacttcgtggccggcgagagattcctgatcaccagcaacaaccagctgagagagatcctgttcggcaagctgaagctgcacctgctgagccagagaaacagcctgcccagaaccggcctgcagaagtaccccagcaccagcgaggccgtgctgaacgccctgagagacctgcaccccctgcccaagatcatcctggagtacagacaggtgcacaagatcaagagcaccttcgtggacggcctgctggcctgcatgaagaagggcagcatcagcagcacctggaaccagaccggcaccgtgaccggcagactgagcgccaagcaccccaacatccagggcatcagcaagcaccccatccagatcaccacccccaagaacttcaagggcaaggaggacaagatcctgaccatcagccccagagccatgttcgtgagcagcaagggccacaccttcctggccgccgacttcagccagatcgagctgagaatcctgacccacctgagcggcgaccccgagctgctgaagctgttccaggagagcgagagagacgacgtgttcagcaccctgaccagccagtggaaggacgtgcccgtggagcaggtgacccacgccgacagagagcagaccaagaaggtggtgtacgccgtggtgtacggcgccggcaaggagagactggccgcctgcctgggcgtgcccatccaggaggccgcccagttcctggagagcttcctgcagaagtacaagaagatcaaggacttcgccagagccgccatcgcccagtgccaccagaccggctgcgtggtgagcatcatgggcagaagaagacccctgcccagaatccacgcccacgaccagcagctgagagcccaggccgagagacaggccgtgaacttcgtggtgcagggcagcgccgccgacctgtgcaagctggccatgatccacgtgttcaccgccgtggccgccagccacaccctgaccgccagactggtggcccagatccacgacgagctgctgttcgaggtggaggacccccagatccccgagtgcgccgccctggtgagaagaaccatggagagcctggagcaggtgcaggccctggagctgcagctgcaggtgcccctgaaggtgagcctgagcgccggcagaagctggggccacctggtgcccctgcaggaggcctggggccccccccccggcccctgcagaaccgagagccccagcaacagcctggccgcccccggcagccccgccagcacccagcccccccccctgcacttcagccccagcttctgcctgtag

SEQ ID NO: 255664 - protein, 285 aa, Artificial Sequence
  derived and/or modified sequence
MDAQDCQAAASPEPPGPPARSCVAAWWDMVDRNLRHTVPSCRGEDAKGKDCCWYEAALRDGNPIIVYLHGSAEHRAASHRLKLVKVLSDGGFHVLSVDYRGFGDSTGKPTEEGLTTDAICVYEWTKARSGITPVCLWGHSLGTGVATNAAKVLEEKGCPVDAIVLEAPFTNMWVASINYPLLKIYRNIPGFLRTLMDALRKDKIIFPNDENVKFLSSPLLILHGEDDRTVPLEYGKKLYEIARNAYRNKERVKMVIFPPGFQHNLLCKSPTLLITVRDFLSKQWS

SEQ ID NO: 255665 - DNA, 858 bp, Artificial Sequence
  derived and/or modified sequence
atggacgcccaggactgccaggccgccgccagccccgagccccccggcccccccgccagaagctgcgtggccgcctggtgggacatggtggacagaaacctgagacacaccgtgcccagctgcagaggcgaggacgccaagggcaaggactgctgctggtacgaggccgccctgagagacggcaaccccatcatcgtgtacctgcacggcagcgccgagcacagagccgccagccacagactgaagctggtgaaggtgctgagcgacggcggcttccacgtgctgagcgtggactacagaggcttcggcgacagcaccggcaagcccaccgaggagggcctgaccaccgacgccatctgcgtgtacgagtggaccaaggccagaagcggcatcacccccgtgtgcctgtggggccacagcctgggcaccggcgtggccaccaacgccgccaaggtgctggaggagaagggctgccccgtggacgccatcgtgctggaggcccccttcaccaacatgtgggtggccagcatcaactaccccctgctgaagatctacagaaacatccccggcttcctgagaaccctgatggacgccctgagaaaggacaagatcatcttccccaacgacgagaacgtgaagttcctgagcagccccctgctgatcctgcacggcgaggacgacagaaccgtgcccctggagtacggcaagaagctgtacgagatcgccagaaacgcctacagaaacaaggagagagtgaagatggtgatcttcccccccggcttccagcacaacctgctgtgcaagagccccaccctgctgatcaccgtgagagacttcctgagcaagcagtggagctag

SEQ ID NO: 255666 - DNA, 1477 bp, Artificial Sequence
  derived and/or modified sequence
gggacacggcgcgggatggacgcgcaggactgccaggcggccgcatcgcccgagccgcccgggcccccagcccgtagctgcgtggccgcctggtgggacatggtcgaccgcaacctgcggcacacagtccccagctgccggggggaagatgccaaggggaaggactgttgctggtatgaagcagcccttcgtgatgggaacccaattattgtttatcttcatggcagtgcagaacacagggcagcttcgcacagactgaagctggtaaaggtgctgagtgatggtggctttcatgtcttgtctgttgactacagaggatttggggactctacaggtaagcccacagaggagggactgactacggatgccatttgtgtctatgagtggaccaaggcaagaagtggcatcactcccgtgtgtctctggggccactctctgggtacaggagttgcaacaaatgctgcaaaagtgctagaagaaaaaggatgcccagttgatgctattgtcttggaagctccatttaccaacatgtgggttgcaagtatcaattatcccttgttaaagatttaccggaacattccaggatttttacgtacacttatggatgccctgagaaaagacaaaataatctttcctaatgatgaaaatgttaaattcctttcttctcctcttctcatcttacatggagaggatgacaggacagtgcctttggagtatgggaaaaagctctatgaaattgcacgcaatgcatacaggaacaaagagagggtcaagatggttatctttcctcctggcttccaacacaacctgctttgtaaaagccccacactgttaataaccgtgagagatttcctgagcaagcagtggtcatgagtctgggaggagtggaaatcttcaatgaagacttggcccaaacaccacctgtgatgtatattgttctaatgtaaaattgtactgggctggtcggatgagctgaggccattgacttctctacaaatcacttgccattttaacaacagaaagtacgaatgttaggcagtatggaatgttcttatttagcttatcataatctactttgtaaaacatgctgaaacctcactgtggagaaccagaatttggtaaaatctagatcctatctaaaaatatgtagttattaaacattctgtggatatttgtgaataaggtagttgctatggtccgaatatctgggcctgcccccccaaattatgctgaaacctaatcaccagtgtgatggtaataggaggtgggactgagctctgatgaatgagattagtgcccttataaattatgaccaaaagagctcttcactcctcctaccatttgaggatacagtgagaagccttcatctatgaaccacaaagtagccctcatcagacactgaatcagccagtgccttgctcttggacttcccagcccccagaactgtgagaaataaatttctgttgtttataagcta

SEQ ID NO: 255667 - DNA, 858 bp, Artificial Sequence
  derived and/or modified sequence
atggacgctcaagactgccaggccgccgcctcccctgaacctccagggccaccagccagatcctgcgttgcagcatggtgggacatggtagaccggaaccttcggcacacggttccaagctgccggggggaagacgctaaggggaaggattgctgttggtacgaagccgccctgagggacggaaaccccatcatcgtttacctgcacggctcagccgaacacagggccgcctctcaccggctgaaacttgtcaaagtgctgtctgacggcggatttcacgtgctctccgtggactaccgggggttcggggactccacaggcaagcctacggaagagggactgacgactgatgcgatttgtgtgtacgaatggacaaaggcccgctcggggattaccccagtctgtttgtgggggcactctttgggaactggggtcgccacaaatgcggcaaaggttttggaggagaaaggctgccccgtggacgccattgttctagaggccccttttactaatatgtgggtcgcatcaataaactatccacttctgaaaatataccgtaacatccccggctttttgcgcactctcatggatgctttgcgcaaggacaaaatcatcttccccaatgacgagaatgtcaagtttttgagctcaccacttctgatcctgcacggcgaggacgatagaactgtcccactggagtacggtaaaaagttgtatgaaattgccaggaacgcataccggaacaaggagcgcgtgaaaatggttatttttcccccaggattccaacataaccttctgtgtaagagcccaaccctgttaattaccgtgagagactttctctccaagcagtggtcctag

SEQ ID NO: 255668 - DNA, 858 bp, Artificial Sequence
  derived and/or modified sequence
atggatgcccaggactgccaggccgccgccagccctgagcccccaggccccccagcccggagctgtgtggccgcctggtgggacatggtggacaggaacctgcggcacacagtgcccagctgccgcggggaggatgccaagggcaaggactgctgctggtatgaggccgccctgagagatggcaaccccatcatcgtgtacctgcacggcagcgctgagcaccgggccgccagccaccggctgaagctggtgaaggtgctgagtgatggcggcttccacgtgctgtctgtggactaccggggctttggagacagcacaggcaagcccacagaggagggcctgaccacagatgccatctgtgtgtatgagtggaccaaggcccggagcggcatcacccctgtgtgcctgtggggccacagcctgggcactggagtggccaccaatgctgccaaggtgctggaggagaagggctgccctgtggatgccatcgtgctggaggcccccttcaccaacatgtgggtggccagcatcaactaccccctgctgaagatctacagaaacatccctggcttcctgcggaccctgatggatgccctgaggaaggacaagatcatcttccccaatgatgaaaatgtgaagttcctgagcagccccctgctgatcctgcatggagaagatgacagaacagtgcccctggagtatggcaagaagctgtatgaaattgccagaaatgcctacagaaacaaggagcgggtgaagatggtgatcttccccccaggcttccagcacaacctgctgtgcaagagccccaccctgctgatcaccgtgcgggacttcctgagcaagcagtggagctag

SEQ ID NO: 255669 - DNA, 858 bp, Artificial Sequence
  derived and/or modified sequence
atggacgcccaggactgccaggccgccgccagccccgagccccccggcccacctgctaggtcttgcgttgccgcctggtgggacatggtggacagaaacctccgtcacaccgtgccctcctgccgcggcgaggatgccaaggggaaggattgctgttggtacgaagctgcgctccgggatggaaaccccataattgtgtatctgcacggcagcgctgagcatcgggccgcatcacataggctgaaactggtcaaagtgctgtctgacggagggtttcacgtgctgtccgtcgactaccgcgggtttggcgactccaccggaaagccaaccgaagagggcctaacaacggatgccatttgcgtttacgaatggacgaaagcccgctcaggaattacacccgtctgtctgtgggggcattccctgggaacaggggtggccacaaacgccgccaaggtgctggaagaaaagggctgtcccgttgacgctatcgttctggaagccccttttacgaacatgtgggtggcaagcataaattatcctctgctgaaaatttacagaaatatacccggcttcctgcgaacactgatggatgccctgcgcaaggacaaaattatcttcccaaacgatgaaaatgtgaaatttctttctagtccccttctcatcctccatggggaggatgacaggacagtccccctggagtatggaaagaaactgtatgaaatcgccaggaacgcctaccggaacaaagagcgcgttaaaatggtcatctttccccctggctttcaacataacttactgtgcaaatctcctacgctcctcatcactgtcagagatttcttgtctaagcagtggagctag

SEQ ID NO: 255670 - DNA, 858 bp, Artificial Sequence
  derived and/or modified sequence
atggatgctcaggattgccaggccgctgcaagtccagaaccgcctggtccccctgcacgctcctgtgtcgcggcatggtgggacatggtggaccgaaacctcaggcacacagttccttcttgtcgtggcgaggacgctaagggcaaagattgctgttggtacgaggctgctctcagggacggcaaccccatcatcgtctacctccatgggagtgctgagcacagggcagctagccaccgactaaagctggtcaaagtgctgtcagatggaggcttccacgtattgtccgtggattatagaggctttggcgatagcacagggaagccaacagaggaaggcctgactaccgatgccatctgtgtgtatgaatggactaaagcgagatcagggatcactccagtgtgcctgtgggggcattcacttggaaccggagtcgcaaccaacgctgcaaaagtgttagaggagaagggttgtcccgtggatgcaattgtcctagaggcaccctttaccaatatgtgggtggcctctatcaattatcctctactcaaaatttataggaacatccccggattcctgcgcaccttgatggatgctcttcggaaggataagattatctttccgaatgatgagaatgtgaaattcctcagctcccccctacttatcctgcacggagaggatgatcggaccgtgcctttggagtatggtaaaaaactgtatgaaatcgccaggaatgcatacaggaataaagaaagggtgaagatggtcattttccccccagggtttcaacataatctgctgtgcaaatcccccaccctgttgataaccgtgcgcgactttttgtctaagcaatggtcttag

SEQ ID NO: 255671 - protein, 590 aa, Artificial Sequence
  derived and/or modified sequence
MAGAIASRMSFSSLKRKQPKTFTVRIVTMDAEMEFNCEMKWKGKDLFDLVCRTLGLRETWFFGLQYTIKDTVAWLKMDKKVLDHDVSKEEPVTFHFLAKFYPENAEEELVQEITQHLFFLQVKKQILDEKIYCPPEASVLLASYAVQAKYGDYDPSVHKRGFLAQEELLPKRVINLYQMTPEMWEERITAWYAEHRGRARDEAEMEYLKIAQDLEMYGVNYFAIRNKKGTELLLGVDALGLHIYDPENRLTPKISFPWNEIRNISYSDKEFTIKPLDKKIDVFKFNSSKLRVNKLILQLCIGNHDLFMRRRKADSLEVQQMKAQAREEKARKQMERQRLAREKQMREEAERTRDELERRLLQMKEEATMANEALMRSEETADLLAEKAQITEEEAKLLAQKAAEAEQEMQRIKATAIRTEEEKRLMEQKVLEAEVLALKMAEESERRAKEADQLKQDLQEAREAERRAKQKLLEIATKPTYPPMNPIPAPLPPDIPSFNLIGDSLSFDFKDTDMKRLSMEIEKEKVEYMEKSKHLQEQLNELKTEIEALKLKERETALDILHNENSDRGGSSKHNTIKKPQAQGRRPICI

SEQ ID NO: 255672 - protein, 561 aa, Artificial Sequence
  derived and/or modified sequence
MAGAIASRMSFSSLKRKQPKTFTVRIVTMDAEMEFNCEMKWKGKDLFDLVCRTLGLRETWFFGLQYTIKDTVAWLKMDKKVLDHDVSKEEPVTFHFLAKFYPENAEEELVQEITQHLFFLQVKKQILDEKIYCPPEASVLLASYAVQAKYGDYDPSVHKRGFLAQEELLPKRVINLYQMTPEMWEERITAWYAEHRGRARDEAEMEYLKIAQDLEMYGVNYFAIRNKKGTELLLGVDALGLHIYDPENRLTPKISFPWNEIRNISYSDKEFTIKPLDKKIDVFKFNSSKLRVNKLILQLCIGNHDLFMRRRKADSLEVQQMKAQAREEKARKQMKEEATMANEALMRSEETADLLAEKAQITEEEAKLLAQKAAEAEQEMQRIKATAIRTEEEKRLMEQKVLEAEVLALKMAEESERRAKEADQLKQDLQEAREAERRAKQKLLEIATKPTYPPMNPIPAPLPPDIPSFNLIGDSLSFDFKDTDMKRLSMEIEKEKVEYMEKSKHLQEQLNELKTEIEALKLKERETALDILHNENSDRGGSSKHNTIKKPQAQGRRPICI

SEQ ID NO: 255673 - DNA, 1773 bp, Artificial Sequence
  derived and/or modified sequence
atggccggcgccatcgccagcagaatgagcttcagcagcctgaagagaaagcagcccaagaccttcaccgtgagaatcgtgaccatggacgccgagatggagttcaactgcgagatgaagtggaagggcaaggacctgttcgacctggtgtgcagaaccctgggcctgagagagacctggttcttcggcctgcagtacaccatcaaggacaccgtggcctggctgaagatggacaagaaggtgctggaccacgacgtgagcaaggaggagcccgtgaccttccacttcctggccaagttctaccccgagaacgccgaggaggagctggtgcaggagatcacccagcacctgttcttcctgcaggtgaagaagcagatcctggacgagaagatctactgcccccccgaggccagcgtgctgctggccagctacgccgtgcaggccaagtacggcgactacgaccccagcgtgcacaagagaggcttcctggcccaggaggagctgctgcccaagagagtgatcaacctgtaccagatgacccccgagatgtgggaggagagaatcaccgcctggtacgccgagcacagaggcagagccagagacgaggccgagatggagtacctgaagatcgcccaggacctggagatgtacggcgtgaactacttcgccatcagaaacaagaagggcaccgagctgctgctgggcgtggacgccctgggcctgcacatctacgaccccgagaacagactgacccccaagatcagcttcccctggaacgagatcagaaacatcagctacagcgacaaggagttcaccatcaagcccctggacaagaagatcgacgtgttcaagttcaacagcagcaagctgagagtgaacaagctgatcctgcagctgtgcatcggcaaccacgacctgttcatgagaagaagaaaggccgacagcctggaggtgcagcagatgaaggcccaggccagagaggagaaggccagaaagcagatggagagacagagactggccagagagaagcagatgagagaggaggccgagagaaccagagacgagctggagagaagactgctgcagatgaaggaggaggccaccatggccaacgaggccctgatgagaagcgaggagaccgccgacctgctggccgagaaggcccagatcaccgaggaggaggccaagctgctggcccagaaggccgccgaggccgagcaggagatgcagagaatcaaggccaccgccatcagaaccgaggaggagaagagactgatggagcagaaggtgctggaggccgaggtgctggccctgaagatggccgaggagagcgagagaagagccaaggaggccgaccagctgaagcaggacctgcaggaggccagagaggccgagagaagagccaagcagaagctgctggagatcgccaccaagcccacctacccccccatgaaccccatccccgcccccctgccccccgacatccccagcttcaacctgatcggcgacagcctgagcttcgacttcaaggacaccgacatgaagagactgagcatggagatcgagaaggagaaggtggagtacatggagaagagcaagcacctgcaggagcagctgaacgagctgaagaccgagatcgaggccctgaagctgaaggagagagagaccgccctggacatcctgcacaacgagaacagcgacagaggcggcagcagcaagcacaacaccatcaagaagccccaggcccagggcagaagacccatctgcatctag

SEQ ID NO: 255674 - DNA, 1806 bp, Artificial Sequence
  derived and/or modified sequence
atggccggcgccatcgccagcagaatgagcttcagcagcctgaagagaaagcagcccaagaccttcaccgtgagaatcgtgaccatggacgccgagatggagttcaactgcgagatgaagtggaagggcaaggacctgttcgacctggtgtgcagaaccctgggcctgagagagacctggttcttcggcctgcagtacaccatcaaggacaccgtggcctggctgaagatggacaagaaggtgctggaccacgacgtgagcaaggaggagcccgtgaccttccacttcctggccaagttctaccccgagaacgccgaggaggagctggtgcaggagatcacccagcacctgttcttcctgcaggtgaagaagcagatcctggacgagaagatctactgcccccccgaggccagcgtgctgctggccagctacgccgtgcaggccaagtacggcgactacgaccccagcgtgcacaagagaggcttcctggcccaggaggagctgctgcccaagagagtgatcaacctgtaccagatgacccccgagatgtgggaggagagaatcaccgcctggtacgccgagcacagaggcagagccagagacgaggccgagatggagtacctgaagatcgcccaggacctggagatgtacggcgtgaactacttcgccatcagaaacaagaagggcaccgagctgctgctgggcgtggacgccctgggcctgcacatctacgaccccgagaacagactgacccccaagatcagcttcccctggaacgagatcagaaacatcagctacagcgacaaggagttcaccatcaagcccctggacaagaagatcgacgtgttcaagttcaacagcagcaagctgagagtgaacaagctgatcctgcagctgtgcatcggcaaccacgacctgttcatgagaagaagaaaggccgacagcctggaggtgcagcagatgaaggcccaggccagagaggagaaggccagaaagcagatggagagacagagactggccagagagaagcagatgagagaggaggccgagagaaccagagacgagctggagagaagactgctgcagatgaaggaggaggccaccatggccaacgaggccctgatgagaagcgaggaggccgagcaggagatgcagagaatcaaggccaccgccatcagaaccgaggaggagaagagactgatggagcagaaggtgctggaggccgaggtgctggccctgaagatggccgaggagagcgagagaagagccaaggaggccgaccagctgaagcaggacctgcaggaggccagagaggccgagagaagagccaagcagaagctgctggagatcgccaccaagcccacctacccccccatgaaccccatccccgcccccctgccccccgacatccccagcttcaacctgatcggcgacagcctgagcttcgacttcaaggacaccgacatgaagagactgagcatggagatcgagaaggagaaggtggagtacatggagaagagcaagcacctgcaggagcagctgaacgagctgaagaccgagatcgaggccctgaagctgaaggagagagagaccgccctggacatcctgcacaacgagaacagcgacagaggcggcagcagcaagcacaacaccatcaagaagggcatgttcctgttcttcttcatcctgttctgctggttcagcctgaagcccaaggccgaggacctgagcgccttcgagcccagcaacagcccctgcagagcccccagccccgagtggcccagcctgaagagcagcagcagatag

SEQ ID NO: 255675 - DNA, 1686 bp, Artificial Sequence
  derived and/or modified sequence
atggccggcgccatcgccagcagaatgagcttcagcagcctgaagagaaagcagcccaagaccttcaccgtgagaatcgtgaccatggacgccgagatggagttcaactgcgagatgaagtggaagggcaaggacctgttcgacctggtgtgcagaaccctgggcctgagagagacctggttcttcggcctgcagtacaccatcaaggacaccgtggcctggctgaagatggacaagaaggtgctggaccacgacgtgagcaaggaggagcccgtgaccttccacttcctggccaagttctaccccgagaacgccgaggaggagctggtgcaggagatcacccagcacctgttcttcctgcaggtgaagaagcagatcctggacgagaagatctactgcccccccgaggccagcgtgctgctggccagctacgccgtgcaggccaagtacggcgactacgaccccagcgtgcacaagagaggcttcctggcccaggaggagctgctgcccaagagagtgatcaacctgtaccagatgacccccgagatgtgggaggagagaatcaccgcctggtacgccgagcacagaggcagagccagagacgaggccgagatggagtacctgaagatcgcccaggacctggagatgtacggcgtgaactacttcgccatcagaaacaagaagggcaccgagctgctgctgggcgtggacgccctgggcctgcacatctacgaccccgagaacagactgacccccaagatcagcttcccctggaacgagatcagaaacatcagctacagcgacaaggagttcaccatcaagcccctggacaagaagatcgacgtgttcaagttcaacagcagcaagctgagagtgaacaagctgatcctgcagctgtgcatcggcaaccacgacctgttcatgagaagaagaaaggccgacagcctggaggtgcagcagatgaaggcccaggccagagaggagaaggccagaaagcagatgaaggaggaggccaccatggccaacgaggccctgatgagaagcgaggagaccgccgacctgctggccgagaaggcccagatcaccgaggaggaggccaagctgctggcccagaaggccgccgaggccgagcaggagatgcagagaatcaaggccaccgccatcagaaccgaggaggagaagagactgatggagcagaaggtgctggaggccgaggtgctggccctgaagatggccgaggagagcgagagaagagccaaggaggccgaccagctgaagcaggacctgcaggaggccagagaggccgagagaagagccaagcagaagctgctggagatcgccaccaagcccacctacccccccatgaaccccatccccgcccccctgccccccgacatccccagcttcaacctgatcggcgacagcctgagcttcgacttcaaggacaccgacatgaagagactgagcatggagatcgagaaggagaaggtggagtacatggagaagagcaagcacctgcaggagcagctgaacgagctgaagaccgagatcgaggccctgaagctgaaggagagagagaccgccctggacatcctgcacaacgagaacagcgacagaggcggcagcagcaagcacaacaccatcaagaagccccaggcccagggcagaagacccatctgcatctag

SEQ ID NO: 255676 - DNA, 1773 bp, Artificial Sequence
  derived and/or modified sequence
atggcaggtgcaattgcctcccgaatgagtttctcaagtctgaagaggaaacagccaaagacttttacagtgaggattgtcacaatggatgctgagatggagtttaattgtgaaatgaaatggaaggggaaagatttgtttgatctggtgtgtagaaccctagggttacgtgaaacctggttctttggccttcaatacacgattaaagatactgtggcctggctaaagatggataagaaagtcttagaccatgatgtgtcaaaggaagagcccgtgacctttcactttttggccaagttttacccagaaaacgcggaggaagagctagtgcaagaaattacgcagcacctgttctttctccaggtcaaaaaacagatcttggatgaaaaaatttactgtccccccgaagcgagtgtgcttctggcatcctatgccgtccaagccaagtatggcgactacgatccaagcgtgcataaaaggggatttttggctcaggaggagcttttaccaaaacgcgtaatcaatctgtaccagatgacccccgagatgtgggaagagaggatcaccgcatggtatgctgagcaccgggggcgtgcgcgcgacgaagcagaaatggaatatctgaagatagcccaggacctcgagatgtatggggttaattacttcgcaatcaggaacaagaagggtactgagttgctcctgggggttgatgcattaggcttacatatctacgacccggaaaacagactgactcccaagattagcttcccctggaatgagatccggaacatctcttactctgacaaggagtttacaatcaagccgctggataagaagattgacgtgttcaagttcaactcctccaagctgcgcgtgaataagcttatactgcaactgtgcattggcaaccatgacctgttcatgcggagaagaaaggccgacagtcttgaggtccaacagatgaaggctcaggcacgagaggagaaggcaagaaagcagatggagcgccaaagactggcacgagaaaagcagatgcgggaagaggctgagcggacccgagacgaactggaacggcgactactccagatgaaggaagaggccaccatggcaaatgaggctctaatgcggtccgaggaaactgccgatctcctcgctgaaaaggctcaaatcaccgaggaagaggcgaaactcttggctcagaaagctgctgaggctgagcaggaaatgcagcgaatcaaggctacagccattcggactgaagaggaaaagaggctgatggaacagaaagttctggaagccgaagtgctggcactgaagatggccgaagaatccgagcgtcgcgcaaaggaagcggatcagctgaaacaggacctccaggaagcgcgggaagcggaacggagggctaaacagaagttgcttgaaatagccactaaaccaacatacccacctatgaacccaatacccgcgccactcccacctgacataccttcttttaacctgatcggggactcactcagtttcgacttcaaggacaccgacatgaagaggctgtccatggagattgaaaaagagaaggtcgagtatatggaaaaatccaagcacctgcaagagcagctaaatgagctgaagaccgaaatcgaggcgttaaaactcaaagagcgcgagaccgcactagacatcctgcacaatgaaaacagtgataggggaggttctagtaagcacaacaccatcaagaaaccacaagcacaaggtcggcgtcccatctgcatttag

SEQ ID NO: 255677 - DNA, 1773 bp, Artificial Sequence
  derived and/or modified sequence
atggcaggcgcgattgcttcgaggatgagtttttctagccttaaacgcaaacagccaaaaactttcaccgttcgcattgtgacgatggatgcagaaatggagtttaactgtgaaatgaagtggaaaggcaaggatcttttcgatctggtctgccgtaccttggggctgagagaaacttggttcttcggtctgcagtacacaatcaaggatacagttgcttggctcaagatggacaagaaagtgctggaccacgacgtgtcaaaggaggagcctgtcacctttcattttctcgctaaattttacccagaaaacgcagaggaagagctggttcaggagattactcagcacctgttctttctgcaggtgaaaaaacagattctcgatgaaaagatctattgtccccccgaggcctcagtgctgctcgccagctacgccgtgcaggcaaaatacggagactacgacccttctgtgcacaaacggggtttcctcgcacaagaagagctcctccctaagagagtcattaacctgtatcaaatgactcctgagatgtgggaagagagaatcactgcgtggtacgccgagcatagggggcgagccagagacgaagccgagatggaatacctgaaaattgctcaggacttagagatgtacggcgtgaattactttgcgattcgcaacaagaagggcacggagctgctgctgggagtggacgccctcgggctgcatatctacgatccggagaaccggctgacgccaaaaatttcattcccctggaacgaaatccgaaacatatcatattctgataaggagttcaccattaagcctctcgacaagaagattgatgtgtttaagttcaatagttcaaagctcagagtgaacaagctgatactgcagttatgtatcggaaaccacgatctattcatgaggagaagaaaagcagatagtctcgaggtgcagcagatgaaagcccaggctcgtgaagaaaaggcacgcaagcagatggagaggcagaggctggccagggaaaagcagatgagagaggaggccgaacggacccgggatgaactggaaagacgcctgcttcagatgaaggaggaggctactatggccaatgaggctctcatgcgctcagaagagactgctgatttgctcgcggagaaggcacagattactgaggaggaagctaaactcctggcacagaaggccgccgaagcggagcaggaaatgcagagaattaaggctactgccatcagaaccgaggaagaaaaacgcctgatggaacaaaaagtgctggaggccgaagtccttgccctgaagatggccgaagaatccgagcggcgagccaaggaagccgatcagctgaaacaggatctccaggaggctcgcgaggctgaaaggcgggccaagcagaaactgctggaaatcgctaccaagcccacctacccccccatgaatcccattccggcccctcttccccccgacattccaagcttcaacctaattggggactctctgagcttcgattttaaggacacagatatgaagcgcttatcaatggagatcgagaaggaaaaagtcgaatacatggagaagagtaagcacctccaggaacaactaaacgagctgaaaacggagatcgaagccctcaaactgaaagaacgcgagaccgcgctcgacatcttgcataatgagaatagcgaccgtggtggcagtagcaaacacaataccatcaagaaaccgcaggcccagggacggaggcctatctgtatttag

SEQ ID NO: 255678 - DNA, 1806 bp, Artificial Sequence
  derived and/or modified sequence
atggcgggtgcgattgcttcccggatgtctttctcatctcttaaacggaagcagcccaagacctttacggtgcggatagtgacgatggatgcagagatggagtttaattgtgagatgaaatggaagggtaaagacctgtttgatctggtatgccggaccttgggacttcgggaaacttggttcttcggactgcagtataccattaaggacactgtggcatggttgaaaatggataaaaaagttctggaccatgatgtatcaaaagaggaaccagtgacattccactttctggccaagttctacccagagaatgcagaagaggagctggtgcaggagattacgcagcatctgttctttttacaggttaagaagcaaatcctggacgagaaaatctattgtcctcctgaagcttctgttctgcttgccagctatgctgtacaagcaaagtatggagactacgatccaagtgtgcataaacggggattcctggcacaggaagagctgttgcctaaaagagtgataaatctgtaccagatgacacctgagatgtgggaggaacgaataactgcctggtacgcagaacacagaggcagggccagagacgaggcggagatggaatatttgaagatcgcccaagacctggaaatgtatggtgtcaattacttcgcaatccgtaataaaaagggtaccgaacttctcttaggtgtcgacgccctcgggcttcacatctatgacccggagaacaggctgacacccaaaatcagttttccttggaatgagattcggaacatctcatactctgataaggagtttacaataaaacctctggacaagaagatagatgtattcaagttcaatagttccaaattaagggttaataagttgattctacaattatgtatagggaaccacgatctctttatgcgccgccgaaaggctgactcactagaagttcaacagatgaaggcacaagctcgggaagagaaggctagaaaacagatggagaggcagcggctggctcgggaaaagcagatgcgggaggaagctgaaaggactcgcgatgagctggaacgacgcctcctgcagatgaaggaagaggcaacaatggctaatgaagctttgatgaggagcgaagaggccgaacaggagatgcaacgcatcaaggccaccgcaatccgcactgaagaggagaaacggctgatggaacaaaaggtcctcgaggccgaagtgttggccttgaaaatggccgaggaaagtgagcggagagccaaagaggcggaccaattaaagcaagaccttcaagaagctcgggaggccgagaggagagccaaacaaaaactgctggagatcgccactaagcctacctatccacccatgaatcctatccctgcacccctgcctcccgatatcccgagtttcaacctaatcggagactcgttgtcattcgactttaaggataccgacatgaaacgtctctcaatggagatcgagaaagagaaagttgagtacatggaaaagtcgaagcaccttcaggagcagttaaatgagctcaaaactgagatcgaagctctgaaactcaaagagcgtgagacagccctcgatatcctacacaacgaaaattccgaccgcggcgggagctctaagcataacactattaaaaaaggcatgtttctgttctttttcattctgttttgttggttctccctcaagccgaaggctgaggaccttagtgcctttgagccttcaaatagtccatgtagagccccctctcccgagtggccaagtctgaagtcctcttcacggtag

SEQ ID NO: 255679 - DNA, 1686 bp, Artificial Sequence
  derived and/or modified sequence
atggcaggtgctatcgcctcaagaatgtctttctcgtcgcttaaacgcaaacaacctaagacattcacagtgcgcatcgtgaccatggatgccgagatggagtttaactgcgaaatgaaatggaagggtaaagatctgtttgaccttgtgtgtcgaactttgggcctgcgcgagacttggtttttcggccttcaatacacaattaaagatacggtggcatggctaaaaatggataaaaaggtgctggaccacgatgtctcgaaagaggagccagtaaccttccacttccttgcaaaattttatcccgagaacgccgaagaggagctggtgcaggagattactcagcatctgtttttccttcaggtgaaaaaacagatcctggacgagaagatatactgccccccagaagcaagtgtgctgcttgcatcttacgccgttcaagccaagtacggtgactacgacccttcagtgcataagcgcggcttcctggcccaggaggaactgctccctaagagggtgattaatttgtatcaaatgacccctgaaatgtgggaggaacgtattaccgcatggtacgccgaacacaggggtcgggccagggatgaggccgaaatggagtacctgaaaatagcccaggacttggagatgtacggagtaaattactttgccattcggaacaagaagggcaccgaactgctacttggagtggacgctctggggcttcacatctacgatcctgagaatagactgacccccaagatctccttcccctggaacgaaatacgaaatatctcatattctgacaaagagtttacaatcaagcctttggataagaaaatcgatgtcttcaagtttaatagctcaaagctgcgcgttaataaacttattctccaactgtgcatcggcaaccatgaccttttcatgagacgccgtaaggctgacagtctcgaagttcagcagatgaaagcgcaggcaagggaggagaaggccagaaaacaaatgaaggaggaggcaacgatggcaaatgaagcactgatgcggtccgaagaaaccgccgacttgctggctgaaaaggcacagatcaccgaggaagaggcgaaactcctggcccaaaaagccgccgaggccgaacaagagatgcagaggattaaggctactgctatacgaaccgaggaggagaaaaggctcatggaacaaaaggtcctcgaggccgaggttttagcactcaagatggcagaagagtctgagagacgagctaaggaggctgatcaactgaagcaggatctccaggaggcccgagaagctgaaaggcgggccaagcagaagctgttggagatcgcaactaagccgacttaccccccaatgaatccaattcctgctccactcccgcctgacattccctcctttaacctgattggagatagcttgtctttcgacttcaaggatactgatatgaagcgcctgtcaatggagatcgaaaaagagaaggtggagtacatggagaaatcaaaacatctgcaagagcaattgaatgagctgaagactgaaatcgaggccctgaagctgaaggagcgtgaaacagctctggacatccttcataacgagaacagtgatcgtgggggcagttccaagcacaacactattaaaaaaccacaagcccagggccggaggccgatctgcatatag

SEQ ID NO: 255680 - DNA, 1773 bp, Artificial Sequence
  derived and/or modified sequence
atggccggagctatagccagtcgcatgtcattttcgagtctgaaaaggaaacagcccaagacttttacggttcggatcgtcacgatggacgccgagatggagttcaactgcgaaatgaagtggaagggaaaagacctgtttgacttggtatgtcggaccctcgggctgcgcgagacctggttcttcggtctccagtatacaatcaaggatacagtggcctggttgaagatggataagaaggtgctcgaccatgacgtgtccaaggaggaacctgttactttccactttctggcaaagttttacccagaaaacgcggaagaagagcttgtacaagaaattactcagcacctattcttcttacaggtgaaaaagcagatcctcgacgagaagatctactgtccccccgaggcaagcgtgctgctggcctcttatgcagtgcaggccaagtatggcgattacgatccttccgtgcataaacgcggattcctggctcaggaagaactgcttccaaagagggtgatcaatctgtatcagatgacacctgagatgtgggaggaaagaataaccgcctggtacgcagaacataggggaagggcacgggatgaagcagaaatggaatatctgaagattgcacaggacctcgagatgtacggtgtcaactacttcgccatccggaacaaaaaggggacagaactcctccttggcgtggacgcattgggcctgcatatttatgatcccgagaaccggttgacacctaagatctcgtttccctggaatgaaatccgcaatatttcctattccgacaaagagttcaccattaaacccctggacaaaaaaatcgatgtgtttaaattcaattcatcaaaactgcgggtgaataaactcatcctgcaactctgtataggcaatcacgacctgttcatgagacggcgcaaggctgactctttggaagtacagcagatgaaggcccaggctagggaagaaaaggccaggaaacagatggagagacagaggttggccagggaaaagcagatgcgcgaagaagccgagcgtactcgcgacgagcttgaaagacggctactgcagatgaaagaggaggcaactatggctaacgaagctctgatgaggtcggaggaaaccgctgacctgttggccgagaaagcccagattaccgaagaggaagcaaagctgttagcccaaaaggccgctgaagcagaacaggagatgcagcgcattaaagcaaccgccatcaggaccgaggaggaaaagcgacttatggaacagaaggtactggaggcggaggtgcttgccctgaagatggccgaggaatctgagcggagggcgaaagaggctgaccaactgaaacaggacctgcaggaggcacgggaggccgaaaggcgcgccaagcagaaactgcttgaaatcgctactaagcccacataccctccgatgaaccccatcccagctcctctacctcccgatatccccagcttcaacttgattggagatagcctctcattcgattttaaagacacagacatgaaacggcttagtatggagatcgagaaagaaaaggtagagtacatggaaaagtcaaaacacctccaagaacagttgaacgagctaaaaactgaaattgaagcgttgaagttgaaagagcgcgagacggctctggacatcctccacaacgaaaattccgatagaggcgggtcctcgaaacataatactatcaagaaacctcaggcacagggacgcaggcccatttgtatctag

SEQ ID NO: 255681 - DNA, 1773 bp, Artificial Sequence
  derived and/or modified sequence
atggccggggccatcgccagcaggatgtccttcagcagcctgaagaggaagcagcccaagaccttcaccgtgcgcatcgtgaccatggatgctgagatggagttcaactgtgagatgaagtggaagggcaaggacctgtttgacctggtgtgcaggaccctgggcctgcgggagacctggttcttcggcctgcagtacaccatcaaggacacagtggcctggctgaagatggacaagaaggtgctggaccatgatgtgtccaaggaggagcctgtgaccttccacttcctggccaagttctacccagaaaatgctgaggaggagctggtgcaggagatcacccagcacctgttcttcctgcaggtgaagaagcagatcctggatgagaagatctactgccccccagaggcctctgtgctgctggccagctatgctgtgcaggccaagtacggggactatgaccccagcgtgcacaagaggggcttcctggcccaggaggagctgctgcccaagagggtcatcaacctgtaccagatgaccccagagatgtgggaggagcgcatcacagcctggtatgcagagcaccggggccgggccagagatgaagctgagatggagtacctgaagatcgcccaggacctggagatgtatggagtgaactactttgccatccggaacaagaagggcacagagctgctgctgggcgtggatgccctgggcctgcacatctatgaccctgaaaatcggctgacccccaagatctccttcccctggaatgagatccggaacatctcctacagcgacaaggagttcaccatcaagcccctggacaagaagattgatgtgttcaagttcaacagcagcaagctgcgggtgaacaagctgatcctgcagctgtgcatcggcaaccacgacctcttcatgagaagaaggaaggctgacagcctggaggtgcagcagatgaaggcccaggcccgggaggagaaggccaggaagcagatggagcggcagaggctggcccgggagaagcagatgagggaggaggccgagaggaccagagatgagctggagcggcggctgctgcagatgaaggaggaggccaccatggccaatgaggccctgatgaggtctgaggagacagctgacctgctggccgagaaggcccagatcacagaggaggaggccaagctgctggcccagaaggctgctgaggccgagcaggagatgcagaggatcaaggccacagccatcagaacagaggaggagaagaggctgatggagcagaaggtgctggaggccgaggtgctggccctgaagatggccgaggagagcgagcggcgggccaaggaggccgaccagctgaagcaggacctgcaggaggcccgggaggccgagcggcgggccaagcagaagctgctggagatcgccaccaagcccacctacccacccatgaaccccatcccagcccccctgcccccagacatccccagcttcaacctgattggagacagcctgagctttgacttcaaggacacagacatgaagaggctgtccatggagattgagaaggagaaggtggagtacatggagaagagcaagcacctgcaggagcagctgaatgagctgaagacagaaattgaggccctgaagctgaaggagcgggagacagccctggacatcctgcacaatgaaaacagcgacagaggaggcagcagcaagcacaacaccatcaagaagccccaggcccagggcagaagacccatctgcatctag

SEQ ID NO: 255682 - DNA, 1806 bp, Artificial Sequence
  derived and/or modified sequence
atggccggggccatcgccagcaggatgtccttcagcagcctgaagaggaagcagcccaagaccttcaccgtgcgcatcgtgaccatggatgctgagatggagttcaactgtgagatgaagtggaagggcaaggacctgtttgacctggtgtgcaggaccctgggcctgcgggagacctggttcttcggcctgcagtacaccatcaaggacacagtggcctggctgaagatggacaagaaggtgctggaccatgatgtgtccaaggaggagcctgtgaccttccacttcctggccaagttctacccagaaaatgctgaggaggagctggtgcaggagatcacccagcacctgttcttcctgcaggtgaagaagcagatcctggatgagaagatctactgccccccagaggcctctgtgctgctggccagctatgctgtgcaggccaagtacggggactatgaccccagcgtgcacaagaggggcttcctggcccaggaggagctgctgcccaagagggtcatcaacctgtaccagatgaccccagagatgtgggaggagcgcatcacagcctggtatgcagagcaccggggccgggccagagatgaagctgagatggagtacctgaagatcgcccaggacctggagatgtatggagtgaactactttgccatccggaacaagaagggcacagagctgctgctgggcgtggatgccctgggcctgcacatctatgaccctgaaaatcggctgacccccaagatctccttcccctggaatgagatccggaacatctcctacagcgacaaggagttcaccatcaagcccctggacaagaagattgatgtgttcaagttcaacagcagcaagctgcgggtgaacaagctgatcctgcagctgtgcatcggcaaccacgacctcttcatgagaagaaggaaggctgacagcctggaggtgcagcagatgaaggcccaggcccgggaggagaaggccaggaagcagatggagcggcagaggctggcccgggagaagcagatgagggaggaggccgagaggaccagagatgagctggagcggcggctgctgcagatgaaggaggaggccaccatggccaatgaggccctgatgaggtctgaggaggccgagcaggagatgcagaggatcaaggccacagccatcagaacagaggaggagaagaggctgatggagcagaaggtgctggaggccgaggtgctggccctgaagatggccgaggagagcgagcggcgggccaaggaggccgaccagctgaagcaggacctgcaggaggcccgggaggccgagcggcgggccaagcagaagctgctggagatcgccaccaagcccacctacccacccatgaaccccatcccagcccccctgcccccagacatccccagcttcaacctgattggagacagcctgagctttgacttcaaggacacagacatgaagaggctgtccatggagattgagaaggagaaggtggagtacatggagaagagcaagcacctgcaggagcagctgaatgagctgaagacagaaattgaggccctgaagctgaaggagcgggagacagccctggacatcctgcacaatgaaaattctgaccggggcggcagcagcaagcacaacaccatcaagaagggcatgttcctgttcttcttcatcctcttctgctggttcagcctgaagcccaaggccgaggacctgagcgcctttgagcccagcaacagcccctgccgggcccccagccctgagtggcccagcctgaagagcagcagcaggtag

SEQ ID NO: 255683 - DNA, 1686 bp, Artificial Sequence
  derived and/or modified sequence
atggccggggccatcgccagcaggatgtccttcagcagcctgaagaggaagcagcccaagaccttcaccgtgcgcatcgtgaccatggatgctgagatggagttcaactgtgagatgaagtggaagggcaaggacctgtttgacctggtgtgcaggaccctgggcctgcgggagacctggttcttcggcctgcagtacaccatcaaggacacagtggcctggctgaagatggacaagaaggtgctggaccatgatgtgtccaaggaggagcctgtgaccttccacttcctggccaagttctacccagaaaatgctgaggaggagctggtgcaggagatcacccagcacctgttcttcctgcaggtgaagaagcagatcctggatgagaagatctactgccccccagaggcctctgtgctgctggccagctatgctgtgcaggccaagtacggggactatgaccccagcgtgcacaagaggggcttcctggcccaggaggagctgctgcccaagagggtcatcaacctgtaccagatgaccccagagatgtgggaggagcgcatcacagcctggtatgcagagcaccggggccgggccagagatgaagctgagatggagtacctgaagatcgcccaggacctggagatgtatggagtgaactactttgccatccggaacaagaagggcacagagctgctgctgggcgtggatgccctgggcctgcacatctatgaccctgaaaatcggctgacccccaagatctccttcccctggaatgagatccggaacatctcctacagcgacaaggagttcaccatcaagcccctggacaagaagattgatgtgttcaagttcaacagcagcaagctgcgggtgaacaagctgatcctgcagctgtgcatcggcaaccacgacctcttcatgagaagaaggaaggctgacagcctggaggtgcagcagatgaaggcccaggcccgggaggagaaggccaggaagcagatgaaggaggaggccaccatggccaatgaggccctgatgaggtctgaggagacagctgacctgctggccgagaaggcccagatcacagaggaggaggccaagctgctggcccagaaggctgctgaggccgagcaggagatgcagaggatcaaggccacagccatcagaacagaggaggagaagaggctgatggagcagaaggtgctggaggccgaggtgctggccctgaagatggccgaggagagcgagcggcgggccaaggaggccgaccagctgaagcaggacctgcaggaggcccgggaggccgagcggcgggccaagcagaagctgctggagatcgccaccaagcccacctacccacccatgaaccccatcccagcccccctgcccccagacatccccagcttcaacctgattggagacagcctgagctttgacttcaaggacacagacatgaagaggctgtccatggagattgagaaggagaaggtggagtacatggagaagagcaagcacctgcaggagcagctgaatgagctgaagacagaaattgaggccctgaagctgaaggagcgggagacagccctggacatcctgcacaatgaaaattctgaccggggcggcagcagcaagcacaacaccatcaagaagccccaggcccagggccggcggcccatctgcatctag

SEQ ID NO: 255684 - DNA, 1773 bp, Artificial Sequence
  derived and/or modified sequence
atggccggcgccatcgccagccggatgagcttcagcagcctgaagcggaagcaacctaagactttcactgttcgcatagttaccatggacgcggagatggaattcaattgtgaaatgaaatggaagggaaaagacctcttcgatctcgtgtgcagaacgctggggctgcgcgagacctggtttttcgggctccaatacacaatcaaagacacagtggcctggctcaagatggacaagaaggtgctggaccacgacgtgagcaaggaagagcctgtcactttccattttttagctaagttctatcctgagaatgctgaagaggagctcgtccaagagataacccaacaccttttttttctacaggtcaaaaagcagatccttgatgagaagatctattgtccaccagaggcttcggtactcctcgcttcatacgcggtacaggcaaaatatggggattatgaccccagtgtccataagcggggtttcttagcccaagaggagctgctgccaaaaagggtgatcaacctgtaccagatgacacctgaaatgtgggaagagagaattaccgcgtggtatgccgaacatagaggtagggccagagacgaagctgagatggagtatttgaagatcgcccaggacttagagatgtatggtgtgaactacttcgccataagaaacaagaaaggtaccgagcttctactcggggtcgacgctcttgggctgcacatatatgacccagagaatcgccttactcccaaaatcagtttcccctggaacgagataaggaatattagctactccgataaggaattcaccatcaagccacttgacaaaaaaatcgacgtgttcaaattcaattcatcaaagctccgtgtcaataagttgatcctgcagctgtgtattgggaaccatgatctgttcatgcgcaggcggaaggcggattctctggaagtgcagcaaatgaaggcgcaagctcgggaggaaaaagctaggaagcaaatggaaaggcagcgcctcgctcgtgagaaacagatgagggaggaagctgagaggaccagggatgagttagaacgccgactgttacagatgaaggaggaggcaacaatggctaatgaggctctcatgcgcagtgaggagacagctgacctgcttgctgagaaggcacaaatcactgaagaagaagccaaactgctagcccagaaggcagctgaagcagaacaggaaatgcagcggattaaggcaacagcaatccgaactgaggaagagaagcgtttgatggagcagaaggtgctagaggccgaggttctggcgttgaaaatggctgaggaaagcgagcgtcgcgcaaaggaagctgatcaactgaagcaggacttgcaggaagccagggaagccgagagacgggccaagcagaagctgctggaaattgcgacaaaacccacttacccacccatgaatcctatcccggctcctttgccccctgacatcccctctttcaacctgatcggcgacagtttatcatttgattttaaggatacagacatgaagagactgtccatggagattgaaaaagaaaaggttgaatacatggagaagtccaaacacctgcaggaacaactaaatgaactgaaaacagagattgaggcacttaagttgaaggaacgtgaaactgccttggacatcctccataatgagaattcggatcgaggcgggtctagcaagcacaataccatcaagaaaccacaggcacaaggcagacggcctatctgcatctag

SEQ ID NO: 255685 - DNA, 1773 bp, Artificial Sequence
  derived and/or modified sequence
atggccggcgccatcgccagccggatgagcttcagcagcctgaagaggaagcagccgaagacgtttactgtgaggatcgtgacgatggacgccgagatggaatttaactgtgagatgaagtggaagggcaaggacttatttgacctggtgtgtcgtactctggggctgcgagaaacttggttcttcgggctccagtatacgataaaagacactgttgcctggcttaagatggacaagaaagtactagatcacgatgttagtaaagaagagccggtgacatttcatttcctggccaagttctatcccgaaaatgcagaggaagagttggtgcaagagataacacagcatctattcttcctgcaggttaaaaagcagatcttggatgaaaagatttactgtccacctgaggctagtgttctccttgcaagctatgccgtccaggccaagtacggcgactatgacccttcagttcacaagcgtggtttccttgcccaggaggaactgttgccaaaacgtgtgatcaatctgtaccagatgacccccgaaatgtgggaggagcgaataacagcctggtacgcagagcatagaggtcgtgcccgcgatgaagccgaaatggaatatctgaagatagcacaggaccttgaaatgtacggcgtgaattattttgcaattaggaacaagaaagggacagagcttctgctcggagtggacgccttaggcttgcacatctacgatcccgaaaaccgtctgaccccgaagatttctttcccctggaatgagataaggaacatctcctactccgacaaagagttcaccattaaacctctggataagaagattgacgtgtttaagtttaactcctcaaagctgagggtgaataagttgattctgcagctgtgtattggtaaccacgatttattcatgaggagacggaaagcagacagcctggaggtgcagcagatgaaagcacaagcacgggaagagaaagcaagaaagcagatggaaagacagcgattagctagagaaaagcaaatgagagaggaagctgagcgcactagagatgagctagaaagaaggctgctgcaaatgaaagaggaagcaaccatggccaacgaggccctgatgaggtcagaggagacagccgacctcctcgcagaaaaagcccagatcactgaggaagaggccaaattgctcgcccagaaagctgccgaagcagagcaggaaatgcagaggattaaggcgactgcaatccgaaccgaagaggaaaaaaggcttatggagcagaaagtcttggaagcggaagtgcttgccctaaagatggctgaagaatccgagcggagagccaaggaggccgatcagctcaaacaggacctgcaggaagctcgcgaggccgagaggcgggcaaagcagaaacttctggagatagcaaccaagcctacttaccctcccatgaacccgatacccgcccccctccctcccgacatccctagctttaacctcatcggcgattccctgtcattcgacttcaaagacaccgatatgaagagactgtcaatggagatcgaaaaagagaaggttgagtatatggagaaatctaaacatctgcaggagcagttaaacgagctgaaaaccgaaatcgaagcactcaagcttaaagagagagaaaccgccctggatatactgcacaacgagaactctgatagaggggggagctcaaagcacaacaccatcaaaaaacctcaggcccagggccgtcgcccgatctgcatatag

SEQ ID NO: 255686 - DNA, 1806 bp, Artificial Sequence
  derived and/or modified sequence
atggccggcgccatcgccagccggatgagcttcagcagcctgaagagaaagcaacccaagaccttcaccgtcaggatagtgaccatggatgccgagatggagtttaattgtgaaatgaaatggaaagggaaagacctttttgacctcgtctgccgcactctaggtttgcgcgagacctggttcttcggcttacaatacacaattaaggacaccgtggcatggctgaagatggacaaaaaggtgctggatcacgacgttagcaaggaagagcctgttactttccatttcctggcgaaattctatcctgaaaacgccgaagaggagctagtgcaggagatcacacagcacctgtttttccttcaagtgaagaagcagattctggatgagaagatttattgcccgcccgaggcctctgttctgctggctagttatgccgtgcaggctaaatacggcgattatgacccatccgtgcacaaaagaggctttctggctcaggaagagctactcccaaaaagggtcatcaacctgtatcagatgacacccgagatgtgggaagaacgcatcaccgcttggtatgcagaacacagaggacgtgcgcgcgatgaagcagagatggaatacttgaagatcgcacaggatctggagatgtacggtgttaattacttcgcgattaggaataagaagggcaccgagctcctcttgggcgtggatgctttagggttgcacatctatgaccccgagaatcgcttgactcccaaaatatcctttccctggaacgagatccggaatatctcctactccgacaaggagtttactattaagcccctggacaagaagattgacgtgtttaaatttaactcctcaaagctacgggtgaacaaactgatccttcagctgtgcataggaaaccacgatttatttatgcggcgccgtaaagccgactccctggaggtgcagcagatgaaggctcaggcaagggaagagaaggcacgcaagcagatggagcggcagcggcttgctagggagaaacaaatgagagaagaagcagaaagaaccagggatgaacttgagaggcggctactgcagatgaaggaggaggcaaccatggcaaacgaggctcttatgcgctctgaagaggccgaacaagaaatgcagaggattaaggccacagccattcgcaccgaagaggaaaaacgactcatggaacagaaggtgctcgaggccgaggttctggcattaaaaatggccgaggagtcagagcgacgggcaaaagaggcagaccaactcaagcaggatctgcaagaggctcgcgaggcagaaaggcgggcaaaacagaaactgttagagattgccacaaagcccacatacccaccaatgaatcccatccccgcaccgctgcctccggatatcccctcttttaatctgatcggagactctctctcgtttgatttcaaagacactgacatgaaaaggctctcaatggagatcgagaaagagaaggtggagtatatggagaagagcaagcacctgcaggaacaattaaatgagcttaagactgaaatagaagctttgaaattaaaggagcgagagacggctctcgatattttgcacaatgagaattccgatcgtggcggcagcagtaaacataacacgatcaaaaaaggcatgttcttgttcttcttcatactgttctgctggttctccctgaagcctaaggccgaggatctatcggccttcgaacctagcaactcgccctgtcgcgcccccagtcccgaatggcccagcctgaaatcctcatcacgatag

SEQ ID NO: 255687 - DNA, 1686 bp, Artificial Sequence
  derived and/or modified sequence
atggccggcgccatcgccagccggatgagcttcagcagcctgaagcggaaacaacctaagacattcactgtccgaatcgtaaccatggacgctgaaatggaatttaattgtgagatgaagtggaagggaaaagatctgttcgatctggtctgccgcaccctgggcttgcgggagacatggttctttggactacagtacacaatcaaggacaccgtggcatggctcaagatggataagaaagtgctcgatcatgatgtttccaaagaggagcctgttacttttcactttttggcaaagttctatcctgagaatgccgaagaggaactggttcaagagatcacgcagcacttgtttttcctgcaggtgaaaaaacagattctcgatgagaagatttactgtcctccagaggcatcagtactgctggcctcctatgccgtccaggccaaatatggagactacgatccctcagtgcacaaaaggggattcctggcccaggaggagctgttgcctaaacgagtcatcaacctatatcagatgactcccgaaatgtgggaggagcgcattactgcctggtacgccgagcaccggggcagggcccgcgacgaggctgagatggagtatctgaaaatcgcccaggatttagaaatgtacggcgtgaactattttgcaatacgaaacaagaagggcaccgagttgctgctgggtgttgatgcccttgggctccatatctatgacccagagaatagattgaccccaaaaataagttttccttggaacgagatcagaaacatttcctactccgacaaggaatttacaatcaaacctttggataaaaaaatagacgtgttcaaattcaactcgagtaagctgcgggtgaataaactcatcctgcagctttgtatcggtaatcacgatttatttatgagacgccgcaaggccgacagtttggaggtccagcaaatgaaggcacaggccagggaagaaaaagccaggaagcagatgaaggaggaagcgacgatggccaacgaggctctgatgaggagcgaagagacagctgaccttctggctgagaaagcgcaaattactgaagaggaggccaaactgctggctcaaaaagcagcagaggcagagcaagaaatgcagaggattaaagccacagctattagaacggaagaggagaagaggctgatggagcagaaggttctggaagcggaagtcctcgcactcaaaatggccgaagaatccgaacgccgggccaaggaggccgaccagttaaagcaagatctgcaagaagcacgcgaagctgagcgaagggccaaacagaaactgctggagattgcaaccaaaccaacgtaccctccaatgaatccaattcctgccccactccctcctgacatcccctcatttaatctgatcggcgattcactgtcattcgactttaaagacacagatatgaagcgcctaagcatggaaatcgagaaggagaaggtggagtatatggaaaagtcaaaacaccttcaagagcagctcaacgaactgaaaaccgaaattgaggctcttaagttaaaggagcgggagacggctttggacattttacacaatgagaactccgatcgaggcggttccagcaagcacaacacaatcaaaaagcctcaagcacagggtagaagaccgatttgcatctag

SEQ ID NO: 255688 - DNA, 1773 bp, Artificial Sequence
  derived and/or modified sequence
atggccggcgccatcgccagccggatgagcttcagcagcctgaagcgcaagcaaccgaagactttcactgtgagaattgtgaccatggacgcagagatggagttcaattgtgaaatgaagtggaaggggaaggacctcttcgacctggtgtgccgtacactcggattgcgcgagacctggttcttcgggctccagtatactatcaaggacaccgttgcatggttgaaaatggacaaaaaagttctcgatcacgatgtatctaaggaggaaccagttacctttcactttctggcgaaattctacccagagaatgccgaggaggagctagtgcaagagattacccagcacctgttctttttacaggtgaaaaagcagatcctggacgaaaagatttattgtcctcccgaagcctccgtgcttttagccagctacgcagtccaggccaagtatggcgactacgatcccagcgtgcataaacggggttttcttgcgcaggaagaactgctacccaagcgcgtgataaatttgtaccagatgactccggagatgtgggaggagcggatcaccgcctggtatgccgagcatagagggagagcacgggacgaggcagaaatggagtacctgaaaatcgctcaggacctagaaatgtatggggtgaactactttgctatccgaaacaaaaaagggactgaacttctcctcggtgtcgacgccctgggcctacatatttatgatccagaaaatcgcctgacacccaagatctcattcccatggaacgaaatcaggaacatcagttacagtgataaggaatttacgataaagccactggataagaaaattgacgtcttcaaattcaattccagcaagctccgcgtcaacaagctgatccttcagttgtgcattgggaaccacgacctattcatgagaagacgcaaggctgactcgctagaggtgcagcaaatgaaggctcaggcgcgcgaggagaaggcacgaaagcagatggagaggcagaggcttgctagggagaaacagatgcgcgaggaggcagagcggaccagggatgagctcgaaaggcgccttctgcagatgaaggaagaagcgaccatggccaatgaagccttaatgcggagcgaggagactgcagacctgttggcagagaaggctcagatcaccgaagaagaggctaaattgttggcgcagaaagcagcagaagctgagcaggagatgcagcgcattaaggcaacggcaattcgcacagaggaggagaagaggctgatggagcagaaggtgctcgaagccgaagtcctggctcttaagatggcggaagagagcgaacgcagagccaaagaggcggaccagctgaaacaggatttgcaggaagccagagaagcggaacgcagggctaagcagaaattactggagatcgctactaagccaacgtacccaccaatgaatccaattccggctccactcccacccgacataccgagcttcaacctcatcggggattcactgtctttcgattttaaggacaccgacatgaaacgcctttctatggagatcgagaaggagaaggttgagtacatggagaaatccaaacacttacaggagcagcttaatgagttgaagaccgaaattgaagcgctgaaactgaaggaaagggagactgccttggatatattacataacgaaaattcagaccgcggcggctctagcaagcataacacaatcaaaaagccacaagcccaggggcgtcgccccatctgcatttag

SEQ ID NO: 255689 - DNA, 1837 bp, Artificial Sequence
  derived and/or modified sequence
atggccggggccatcgcttcccgcatgagcttcagctctctcaagaggaagcaacccaagacgttcaccgtgaggatcgtcaccatggacgccgagatggagttcaattgcgagatgaagtggaaagggaaggacctctttgatttggtgtgccggactctggggctccgagaaacctggttctttggactgcagtacacaatcaaggacacagtggcctggctcaaaatggacaagaaggtactggatcatgatgtttcaaaggaagaaccagtcacctttcacttcttggccaaattttatcctgagaatgctgaagaggagctggttcaggagatcacacaacatttattcttcttacaggtaaagaagcagattttagatgaaaagatctactgccctcctgaggcttctgtgctcctggcttcttacgccgtccaggccaagtatggtgactacgaccccagtgttcacaagcggggatttttggcccaagaggaattgcttccaaaaagggtaataaatctgtatcagatgactccggaaatgtgggaggagagaattactgcttggtacgcagagcaccgaggccgagccagggatgaagctgaaatggaatatctgaagatagctcaggacctggagatgtacggtgtgaactactttgcaatccggaataaaaagggcacagagctgctgcttggagtggatgccctggggcttcacatttatgaccctgagaacagactgacccccaagatctccttcccgtggaatgaaatccgaaacatctcgtacagtgacaaggagtttactattaaaccactggataagaaaattgatgtcttcaagtttaactcctcaaagcttcgtgttaataagctgattctccagctatgtatcgggaaccatgatctatttatgaggagaaggaaagccgattctttggaagttcagcagatgaaagcccaggccagggaggagaaggctagaaagcagatggagcggcagcgcctcgctcgagagaagcagatgagggaggaggctgaacgcacgagggatgagttggagaggaggctgctgcagatgaaagaagaagcaacaatggccaacgaagcactgatgcggtctgaggagacagctgacctgttggctgaaaaggcccagatcaccgaggaggaggcaaaacttctggcccagaaggccgcagaggctgagcaggaaatgcagcgcatcaaggccacagcgattcgcacggaggaggagaagcgcctgatggagcagaaggtgctggaagccgaggtgctggcactgaagatggctgaggagtcagagaggagggccaaagaggcagatcagctgaagcaggacctgcaggaagcacgcgaggcggagcgaagagccaagcagaagctcctggagattgccaccaagcccacgtacccgcccatgaacccaattccagcaccgttgcctcctgacataccaagcttcaacctcattggtgacagcctgtctttcgacttcaaagatactgacatgaagcggctttccatggagatagagaaagaaaaagtggaatacatggaaaagagcaagcatctgcaggagcagctcaatgaactcaagacagaaatcgaggccttgaaactgaaagagagggagacagctctggatattctgcacaatgagaactccgacaggggtggcagcagcaagcacaataccattaaaaagcctcaagcccaaggcagaagacctatctgcatttgagccctcaaactcaccttgcagagcgccaagtcccgagtggccttctttgaagagctctagcagg

SEQ ID NO: 255690 - DNA, 1857 bp, Artificial Sequence
  derived and/or modified sequence
atggccggggccatcgcttcccgcatgagcttcagctctctcaagaggaagcaacccaagacgttcaccgtgaggatcgtcaccatggacgccgagatggagttcaattgcgagatgaagtggaaagggaaggacctctttgatttggtgtgccggactctggggctccgagaaacctggttctttggactgcagtacacaatcaaggacacagtggcctggctcaaaatggacaagaaggtactggatcatgatgtttcaaaggaagaaccagtcacctttcacttcttggccaaattttatcctgagaatgctgaagaggagctggttcaggagatcacacaacatttattcttcttacaggtaaagaagcagattttagatgaaaagatctactgccctcctgaggcttctgtgctcctggcttcttacgccgtccaggccaagtatggtgactacgaccccagtgttcacaagcggggatttttggcccaagaggaattgcttccaaaaagggtaataaatctgtatcagatgactccggaaatgtgggaggagagaattactgcttggtacgcagagcaccgaggccgagccagggatgaagctgaaatggaatatctgaagatagctcaggacctggagatgtacggtgtgaactactttgcaatccggaataaaaagggcacagagctgctgcttggagtggatgccctggggcttcacatttatgaccctgagaacagactgacccccaagatctccttcccgtggaatgaaatccgaaacatctcgtacagtgacaaggagtttactattaaaccactggataagaaaattgatgtcttcaagtttaactcctcaaagcttcgtgttaataagctgattctccagctatgtatcgggaaccatgatctatttatgaggagaaggaaagccgattctttggaagttcagcagatgaaagcccaggccagggaggagaaggctagaaagcagatggagcggcagcgcctcgctcgagagaagcagatgagggaggaggctgaacgcacgagggatgagttggagaggaggctgctgcagatgaaagaagaagcaacaatggccaacgaagcactgatgcggtctgaggagacagctgacctgttggctgaaaaggcccagatcaccgaggaggaggcaaaacttctggcccagaaggccgcagaggctgagcaggaaatgcagcgcatcaaggccacagcgattcgcacggaggaggagaagcgcctgatggagcagaaggtgctggaagccgaggtgctggcactgaagatggctgaggagtcagagaggagggccaaagaggcagatcagctgaagcaggacctgcaggaagcacgcgaggcggagcgaagagccaagcagaagctcctggagattgccaccaagcccacgtacccgcccatgaacccaattccagcaccgttgcctcctgacataccaagcttcaacctcattggtgacagcctgtctttcgacttcaaagatactgacatgaagcggctttccatggagatagagaaagaaaaagtggaatacatggaaaagagcaagcatctgcaggagcagctcaatgaactcaagacagaaatcgaggccttgaaactgaaagagagggagacagctctggatattctgcacaatgagaactccgacaggggtggcagcagcaagcacaataccattaaaaagcctcaagcccaaggcagaagacctatctgcatttgagccctcaaagtaggttgttcccagctcaccttgcagagcgccaagtcccgagtggccttctttgaagagctctagcaggtgacc

SEQ ID NO: 255691 - DNA, 2335 bp, Artificial Sequence
  derived and/or modified sequence
gatgcagcgcggccccgtgaccctagtcggccgctgagaggcgcgcggagtctgggccgctgccgtctaggggtcccgtcccgaggcgtccccggcatctccggcccgaatcccggagtgccgggtcgcgcctgcaccgaaggtcccggctcctgtgccctccctgcagccgtcagggcccgtcccccaactcccctttccgctcaggcagggtcctcgcggcccatgctggccgctggggacccgcgcagcccagaccgttcccgggccgggcagccggccaccatggtggccctgaggcctgtgcagcaactccaggggggctaaagggctcagagtgcaggccgtggggcgcgagggtcccgggcctgagccccgcgccatggccggggccatcgcttcccgcatgagcttcagctctctcaagaggaagcaacccaagacgttcaccgtgaggatcgtcaccatggacgccgagatggagttcaattgcgagatgaagtggaaagggaaggacctctttgatttggtgtgccggactctggggctccgagaaacctggttctttggactgcagtacacaatcaaggacacagtggcctggctcaaaatggacaagaaggtactggatcatgatgtttcaaaggaagaaccagtcacctttcacttcttggccaaattttatcctgagaatgctgaagaggagctggttcaggagatcacacaacatttattcttcttacaggtaaagaagcagattttagatgaaaagatctactgccctcctgaggcttctgtgctcctggcttcttacgccgtccaggccaagtatggtgactacgaccccagtgttcacaagcggggatttttggcccaagaggaattgcttccaaaaagggtaataaatctgtatcagatgactccggaaatgtgggaggagagaattactgcttggtacgcagagcaccgaggccgagccagggatgaagctgaaatggaatatctgaagatagctcaggacctggagatgtacggtgtgaactactttgcaatccggaataaaaagggcacagagctgctgcttggagtggatgccctggggcttcacatttatgaccctgagaacagactgacccccaagatctccttcccgtggaatgaaatccgaaacatctcgtacagtgacaaggagtttactattaaaccactggataagaaaattgatgtcttcaagtttaactcctcaaagcttcgtgttaataagctgattctccagctatgtatcgggaaccatgatctatttatgaggagaaggaaagccgattctttggaagttcagcagatgaaagcccaggccagggaggagaaggctagaaagcagatggagcggcagcgcctcgctcgagagaagcagatgagggaggaggctgaacgcacgagggatgagttggagaggaggctgctgcagatgaaagaagaagcaacaatggccaacgaagcactgatgcggtctgaggaggctgagcaggaaatgcagcgcatcaaggccacagcgattcgcacggaggaggagaagcgcctgatggagcagaaggtgctggaagccgaggtgctggcactgaagatggctgaggagtcagagaggagggccaaagaggcagatcagctgaagcaggacctgcaggaagcacgcgaggcggagcgaagagccaagcagaagctcctggagattgccaccaagcccacgtacccgcccatgaacccaattccagcaccgttgcctcctgacataccaagcttcaacctcattggtgacagcctgtctttcgacttcaaagatactgacatgaagcggctttccatggagatagagaaagaaaaagtggaatacatggaaaagagcaagcatctgcaggagcagctcaatgaactcaagacagaaatcgaggccttgaaactgaaagagagggagacagctctggatattctgcacaatgagaactccgacaggggtggcagcagcaagcacaataccattaaaaagggtatgtttttgtttttcttcattttattttgctggtttagcctcaagcccaaggcagaagacctatctgcatttgagccctcaaactcaccttgcagagcgccaagtcccgagtggccttctttgaagagctctagcaggtgacccagccaccccaggacctgccacttctcctgctaccgggaccgcgggatggaccagatatcaagagagccatccatagggagctggctgggggtttccgtgggagctccagaactttccccagctgagtgaagagcccagcccctc

SEQ ID NO: 255692 - DNA, 2568 bp, Artificial Sequence
  derived and/or modified sequence
gtgacagccacgcgcgcgcgtacgcgcccgatgcagcgcggccccgtgaccctagtcggccgctgagaggcgcgcggagtctgggccgctgccgtctaggggtcccgtcccgaggcgtccccggcatctccggcccgaatcccggagtgccgggtcgcgcctgcaccgaaggtcccggctcctgtgccctccctgcagccgtcagggcccgtcccccaactcccctttccgctcaggcagggtcctcgcggcccatgctggccgctggggacccgcgcagcccagaccgttcccgggccgggcagccggccaccatggtggccctgaggcctgtgcagcaactccaggggggctaaagggctcagagtgcaggccgtggggcgcgagggtcccgggcctgagccccgcgccatggccggggccatcgcttcccgcatgagcttcagctctctcaagaggaagcaacccaagacgttcaccgtgaggatcgtcaccatggacgccgagatggagttcaattgcgagatgaagtggaaagggaaggacctctttgatttggtgtgccggactctggggctccgagaaacctggttctttggactgcagtacacaatcaaggacacagtggcctggctcaaaatggacaagaaggtactggatcatgatgtttcaaaggaagaaccagtcacctttcacttcttggccaaattttatcctgagaatgctgaagaggagctggttcaggagatcacacaacatttattcttcttacaggtaaagaagcagattttagatgaaaagatctactgccctcctgaggcttctgtgctcctggcttcttacgccgtccaggccaagtatggtgactacgaccccagtgttcacaagcggggatttttggcccaagaggaattgcttccaaaaagggtaataaatctgtatcagatgactccggaaatgtgggaggagagaattactgcttggtacgcagagcaccgaggccgagccagggatgaagctgaaatggaatatctgaagatagctcaggacctggagatgtacggtgtgaactactttgcaatccggaataaaaagggcacagagctgctgcttggagtggatgccctggggcttcacatttatgaccctgagaacagactgacccccaagatctccttcccgtggaatgaaatccgaaacatctcgtacagtgacaaggagtttactattaaaccactggataagaaaattgatgtcttcaagtttaactcctcaaagcttcgtgttaataagctgattctccagctatgtatcgggaaccatgatctatttatgaggagaaggaaagccgattctttggaagttcagcagatgaaagcccaggccagggaggagaaggctagaaagcagatgaaagaagaagcaacaatggccaacgaagcactgatgcggtctgaggagacagctgacctgttggctgaaaaggcccagatcaccgaggaggaggcaaaacttctggcccagaaggccgcagaggctgagcaggaaatgcagcgcatcaaggccacagcgattcgcacggaggaggagaagcgcctgatggagcagaaggtgctggaagccgaggtgctggcactgaagatggctgaggagtcagagaggagggccaaagaggcagatcagctgaagcaggacctgcaggaagcacgcgaggcggagcgaagagccaagcagaagctcctggagattgccaccaagcccacgtacccgcccatgaacccaattccagcaccgttgcctcctgacataccaagcttcaacctcattggtgacagcctgtctttcgacttcaaagatactgacatgaagcggctttccatggagatagagaaagaaaaagtggaatacatggaaaagagcaagcatctgcaggagcagctcaatgaactcaagacagaaatcgaggccttgaaactgaaagagagggagacagctctggatattctgcacaatgagaactccgacaggggtggcagcagcaagcacaataccattaaaaagcctcaagcccaaggcagaagacctatctgcatttgagccctcaaacttcctctccataggctgagcagagatgtggtcagagtgaactcacattggaacagtacactcacggcaccctggagaggagcggtcactggttgctgagtgaattaaccgaatgtttgctgcttttctcctgcaacagttcattattcctccagcatgcctaggcagtggagagaatgtattttgcccaataataaaatgacatcctgcctctacttctcacctaatccccagtagtacccatgccaacaagccccacaccacctgacagcagcataggatgtgtcctttggagtcttccctgcagtttctgctcatagagtggaataagctcattggaacctttctaacaaaaagagatctggcataagatagatcctacttgtggtcgttatcccatcaagagaggtcagctgttaaagtccctgatagatcttattaaaaggtacacttgagctgtca

SEQ ID NO: 255693 - DNA, 2999 bp, Artificial Sequence
  derived and/or modified sequence
gtgaccctagtcggccgctgagaggcgcgcggagtctgggccgctgccgtctaggggtcccgtcccgaggcgtccccggcatctccggcccgaatcccggagtgccgggtcgcgcctgcaccgaaggtcccggctcctgtgccctccctgcagccgtcagggcccgtcccccaactcccctttccgctcaggcagggtcctcgcggcccatgctggccgctggggacccgcgcagcccagaccgttcccgggccgggcagccggccaccatggtggccctgaggcctgtgcagcaactccaggggggctaaagggctcagagtgcaggccgtggggcgcgagggtcccgggcctgagccccgcgccatggccggggccatcgcttcccgcatgagcttcagctctctcaagaggaagcaacccaagacgttcaccgtgaggatcgtcaccatggacgccgagatggagttcaattgcgagatgaagtggaaagggaaggacctctttgatttggtgtgccggactctggggctccgagaaacctggttctttggactgcagtacacaatcaaggacacagtggcctggctcaaaatggacaagaaggtactggatcatgatgtttcaaaggaagaaccagtcacctttcacttcttggccaaattttatcctgagaatgctgaagaggagctggttcaggagatcacacaacatttattcttcttacaggtaaagaagcagattttagatgaaaagatctactgccctcctgaggcttctgtgctcctggcttcttacgccgtccaggccaagtatggtgactacgaccccagtgttcacaagcggggatttttggcccaagaggaattgcttccaaaaagggtaataaatctgtatcagatgactccggaaatgtgggaggagagaattactgcttggtacgcagagcaccgaggccgagccagggatgaagctgaaatggaatatctgaagatagctcaggacctggagatgtacggtgtgaactactttgcaatccggaataaaaagggcacagagctgctgcttggagtggatgccctggggcttcacatttatgaccctgagaacagactgacccccaagatctccttcccgtggaatgaaatccgaaacatctcgtacagtgacaaggagtttactattaaaccactggataagaaaattgatgtcttcaagtttaactcctcaaagcttcgtgttaataagctgattctccagctatgtatcgggaaccatgatctatttatgaggagaaggaaagccgattctttggaagttcagcagatgaaagcccaggccagggaggagaaggctagaaagcagatggagcggcagcgcctcgctcgagagaagcagatgagggaggaggctgaacgcacgagggatgagttggagaggaggctgctgcagatgaaagaagaagcaacaatggccaacgaagcactgatgcggtctgaggagacagctgacctgttggctgaaaaggcccagatcaccgaggaggaggcaaaacttctggcccagaaggccgcagaggctgagcaggaaatgcagcgcatcaaggccacagcgattcgcacggaggaggagaagcgcctgatggagcagaaggtgctggaagccgaggtgctggcactgaagatggctgaggagtcagagaggagggccaaagaggcagatcagctgaagcaggacctgcaggaagcacgcgaggcggagcgaagagccaagcagaagctcctggagattgccaccaagcccacgtacccgcccatgaacccaattccagcaccgttgcctcctgacataccaagcttcaacctcattggtgacagcctgtctttcgacttcaaagatactgacatgaagcggctttccatggagatagagaaagaaaaagtggaatacatggaaaagagcaagcatctgcaggagcagctcaatgaactcaagacagaaatcgaggccttgaaactgaaagagagggagacagctctggatattctgcacaatgagaactccgacaggggtggcagcagcaagcacaataccattaaaaagcctcaagcccaaggcagaagacctatctgcatttgagccctcaaagtaggttgttcccaggtactctctatgtggtgatggtgctgccctctgtgatactaacccgtgcatgagcttgcctgtctctgtcctcgggccacactgagcccttacgagggcaggtggtgcctgggtactggccgcagcatgctttgagtctaaaagtaggcacccaccctgtgaagccagaccagcctccagggccccagaagactgcctcgttccgaagagcatgtcatggggctgtaggaccagccattcttcccatctcgggtcattgttgggctggggaaggttatggcttcttgtccagtcaggtgtgtctaaaagtcctttgtcttggtggcatactcctagcatggaaatggggtcaatctgggcactttggagactggtgtgtttaactcaagatcaagaccttttatgcgttgacagcctctcaagacccatggtcacacctggcagcttctggtagtggggcaaaagggttgcttgtgctggctcattttcctttagagctttccctttctgcacacatcccttttcttttcaaataaagcaaacccagagcacagggtctgatatgtgagtccacggggagtggactgtctgttcatctgtgctcagccacctctgcttcagcttcctctccataggctgagcagagatgtggtcagagtgaactcacattggaacagtacactcacggcaccctggagaggagcggtcactggttgctgagtgaattaaccgaatgtttgctgcttttctcctgcaacagttcattattcctccagcatgcctaggcagtggagagaatgtattttgcccaataataaaatgacatcctgcctcta

SEQ ID NO: 255694 - DNA, 1773 bp, Artificial Sequence
  derived and/or modified sequence
atggccggagccatcgcctctaggatgtcctttagttccctaaaacgaaagcagcccaaaacattcaccgtgaggattgtgactatggatgcagagatggaattcaactgcgagatgaagtggaaaggcaaggatctcttcgacctggtgtgtcgaaccctgggcctgcgggagacatggttcttcgggttacaatacacgattaaagacaccgtcgcttggctgaagatggataagaaggttcttgatcatgatgtgtcaaaggaggaacccgtgacattccattttctggccaagttctacccggagaatgccgaggaggaactcgtgcaggaaatcacccagcacttgttctttttgcaggttaagaagcagattctggacgagaagatttattgccctcctgaagccagtgtcctgctggccagttacgccgtccaggccaaatatggcgattacgacccctccgtgcataagcggggttttctggcacaggaagaactgctcccgaaaagggtaatcaatctctaccagatgacacccgagatgtgggaagaacggatcactgcctggtacgccgaacaccgaggcagagcacgggatgaggccgagatggagtatctgaagatcgctcaggatttagaaatgtacggtgtgaactactttgctatcagaaataagaaaggcactgaactcctgctgggagtagacgctctgggcctgcatatttatgatccagagaatagactgactcctaagatctcatttccctggaacgagatccggaacatttcctattcagataaggaattcactattaaaccattggacaagaagatcgatgtgtttaaattcaattcctcaaagctgcgggtaaacaagcttattctccagctgtgtatcggtaatcatgacctcttcatgcggagacgcaaggcagattcccttgaggtgcaacagatgaaggcccaggccagagaagagaaagcacgcaaacagatggagcggcaaagattggcacgcgaaaagcaaatgagggaagaggctgagaggacgcgggatgagttggagcgtagattactgcagatgaaggaggaagccacgatggccaatgaggccctaatgagatcggaggagaccgctgatttgctagctgagaaagcccagataacagaagaggaagccaagctcctggcgcagaaggctgctgaagcagagcaagaaatgcaaagaatcaaggccaccgccatcaggacagaggaggagaaaagactgatggaacagaaagttcttgaggcggaagtgctggctctgaaaatggcagaggaatctgaaaggcgcgcaaaagaggcagaccagctgaaacaggatctccaggaggccagggaggccgagcgtagggcaaagcaaaagctactggagatagcgaccaagccaacctaccctccaatgaatccgattccagcccctcttccccctgacattccctcctttaatctcattggcgactctctgagcttcgattttaaggacaccgatatgaaacgtctcagcatggaaatcgaaaaagagaaggtggagtatatggagaaaagcaaacatttgcaagaacagctgaatgaacttaagaccgagattgaagccctgaaattaaaggaacgcgaaaccgccctggatatcctgcataatgagaactccgatagaggtggttcctccaagcataataccattaagaaaccccaggcccaggggagaagacctatctgcatctag

SEQ ID NO: 255695 - DNA, 1773 bp, Artificial Sequence
  derived and/or modified sequence
atggcaggggcaatcgccagtcggatgtctttcagcagcctgaagaggaagcagcctaagacgttcaccgtccgtatcgtgacaatggacgccgaaatggagttcaattgtgaaatgaagtggaaggggaaagacctgtttgatctcgtatgtaggactctcggattgcgcgaaacctggttctttggtttacagtatactatcaaggacaccgtcgcttggctcaaaatggataagaaggttttggatcacgacgtgagtaaagaggagccagttaccttccattttctggcaaagttttatcccgagaatgcagaagaagaattggttcaggagattacacagcacctcttcttccttcaggtgaagaaacagatcctggacgaaaaaatttactgccctccggaggcatcggtgctgcttgcttcatacgctgtacaagccaagtatggggactatgacccttctgttcataagcgtgggtttctggcacaggaagagctgctgcctaagagggtcatcaacctctatcaaatgactcccgaaatgtgggaggagcgcatcacggcttggtatgccgagcacagaggtagggccagggacgaggcggaaatggagtacctcaaaattgcccaggacctggagatgtatggcgttaattatttcgcaatccgaaataagaaaggtaccgaacttctcttaggagttgatgccctgggcttgcacatatatgacccagagaataggctcaccccaaagatcagctttccttggaatgaaattcgcaatatatcttactccgataaggagttcaccatcaagcccctggacaaaaagatagatgtatttaaatttaacagcagcaagttgagggtgaacaagctaatcctgcagctctgcatcgggaaccacgatttgttcatgcgtcgacggaaagccgattcattagaggtacagcagatgaaagcccaagccagggaggaaaaagcaagaaagcagatggagagacaacggctcgctagagagaaacagatgcgtgaggaggcagaacgaactcgagacgagctcgaacgcaggttgctccagatgaaagaagaggccactatggcaaatgaggcattgatgcgcagtgaagaaaccgcggacctcctggctgaaaaggcccagatcacagaagaggaggcaaagctgctggcccagaaggccgctgaggccgagcaggaaatgcagcgcatcaaagccacagcgattcgaacagaggaggagaaaaggttaatggagcaaaaagtcctggaggccgaggtgctggcacttaaaatggctgaggagagcgaaaggcgcgctaaagaagccgatcagctcaagcaggacctgcaggaagccagagaggcggagcgaagagccaagcagaagctcctagagatcgccacaaagccgacatatccccctatgaatcccatcccagcccctctgccaccggatatcccatcattcaatctgataggggattcattgtcgtttgacttcaaggatacagacatgaagcgcttgtcgatggagatcgaaaaggagaaggtggaatacatggaaaagtccaaacatctccaggaacaactgaacgaattgaagacggaaatagaggcactcaagctgaaggagcgggaaactgccttagacattctgcacaatgagaactcagaccgaggcggaagtagcaaacacaataccattaagaaaccccaagcccagggaaggcgccctatttgtatttag

SEQ ID NO: 255696 - DNA, 1806 bp, Artificial Sequence
  derived and/or modified sequence
atggccggagctatcgctagtagaatgtctttttcctcactgaaacgaaagcaaccgaaaactttcaccgtacgaatagttaccatggatgcagagatggagtttaactgtgaaatgaaatggaaggggaaggatctttttgaccttgtgtgtcgtactcttgggttacgtgaaacctggttttttggactacagtatacaatcaaggatactgtagcatggctgaaaatggacaagaaagtgctggaccacgacgtcagcaaggaggaaccagtcacgtttcattttctcgcgaaattttatcccgagaacgcagaggaagaattggtgcaggagatcacgcaacatctgttcttcctgcaggtgaagaagcagatcctcgatgaaaagatttattgccctcctgaggcttcggtgcttcttgcatcttacgccgtgcaagccaagtatggggactatgatcccagtgtgcacaagcgcggatttttggcccaggaagaactactgccaaagagggtcataaacctgtaccagatgacgcccgagatgtgggaagaacgtatcacggcatggtacgcagagcatagaggaagggcgcgagacgaggcggaaatggagtacctaaagatcgctcaggacctggagatgtatggcgtgaattattttgccatcagaaataagaaaggcacggaactgttactcggcgtagacgcattggggctacatatctacgaccctgaaaacaggctgacaccgaaaatctcttttccatggaatgagatccgaaacataagctatagtgataaagaatttaccatcaagccgctagataaaaaaattgatgttttcaagttcaatagcagcaaactcagggtgaataaactgatcctccagttatgcatcgggaatcatgacctcttcatgagacgaagaaaggcggactcattggaggtgcaacagatgaaggcccaggccagggaggagaaagcacggaagcagatggaacgccagcgtcttgctcgggagaagcagatgcgagaggaggcagaacgcacccgcgatgaacttgagcggaggctgctgcagatgaaggaggaagccacaatggccaatgaagccctgatgagaagcgaagaggccgaacaggaaatgcagcgtatcaaggcaactgccatcaggactgaagaagagaaaaggttgatggaacagaaggtacttgaggcagaggtccttgctctgaagatggccgaagagagtgaaaggagggccaaggaggccgaccaacttaagcaggatcttcaggaagccagggaagccgagagacgggcaaagcaaaagctccttgaaatcgctaccaagccgacatacccacccatgaatccaattccagcccctctgccccctgacatcccatcattcaacctgatcggggacagcttgtcattcgattttaaagacaccgatatgaagcgactctctatggagatcgagaaggagaaggtcgaatacatggagaaatcgaagcacttgcaagaacagctgaatgagttgaagaccgaaatcgaagcgctaaagctcaaagagagggagactgcccttgacattcttcataatgaaaatagtgaccgtggcggtagctcgaaacacaacactataaagaaaggtatgtttctcttcttcttcattctgttctgctggttttctctgaaaccaaaggcagaggacctgtcagcgtttgagcctagcaactctccatgtcgggctccgtcccctgagtggccgtccctcaagtccagctctaggtag

SEQ ID NO: 255697 - DNA, 1686 bp, Artificial Sequence
  derived and/or modified sequence
atggccggtgccatcgcctcccggatgagtttcagctcattgaagcggaagcagcccaaaaccttcactgtgagaattgttaccatggacgcagagatggagttcaattgcgaaatgaaatggaagggcaaagacctttttgatttggtctgcaggactctgggccttcgagagacctggtttttcggtctgcagtataccataaaggatacagtggcctggctgaagatggacaagaaggtgctagaccatgacgtgagcaaggaggaaccagtgacctttcattttctcgcgaaattttacccggagaacgcagaggaggaactggtccaggaaattacgcaacatctcttctttctccaagtgaagaagcagatcttggacgagaaaatttattgccccccagaggctagcgttttgcttgcgtcctacgcggtccaagccaagtacggagattatgacccgagtgtacacaagcggggatttttggcgcaagaagaattgttgcccaagagggtgattaacctgtaccagatgacgcccgaaatgtgggaagagaggatcactgcatggtacgctgagcaccgcggtagggctcgggacgaggcagaaatggagtatctcaagatagcccaggacctggaaatgtatggagtgaactattttgctatcaggaataaaaaaggtactgaactgctgcttggggtcgatgccctcgggctgcacatttatgatccagagaataggctcactccaaagatctcatttccctggaacgaaattcggaatataagctactcagataaggagttcacgatcaaacctttagacaagaaaatagatgtcttcaaatttaacagctctaagttgagagtgaacaagttaatcctgcagctgtgtataggaaaccatgatctgtttatgagaaggcggaaagctgattctctcgaagtgcagcagatgaaagcccaggcacgcgaggagaaagccagaaagcaaatgaaagaagaagcaaccatggccaatgaggctcttatgcgcagtgaagagacagccgacctgctggcggaaaaagctcagatcactgaggaggaggccaaattgcttgcccagaaagcagctgaggccgaacaggagatgcaacgaataaaagccaccgccattcggacggaggaagagaaacgcctcatggaacagaaggtactggaggccgaggttctcgcactgaagatggctgaggagtccgaacgcagggcaaaggaggccgatcagttgaaacaggatctgcaggaggcgagagaagcagagcgtcgcgctaaacaaaagcttctggagattgccaccaagccgacatatccccctatgaatccgatccccgctccactgcctcccgacatcccatccttcaacctcatcggtgacagccttagctttgattttaaggacactgacatgaaacggctatctatggagatcgaaaaggagaaagtggaatacatggaaaaaagcaaacaccttcaggaacagcttaacgaactgaaaactgaaattgaggccctcaagttaaaggaacgcgaaactgccctggatatcttacataatgagaattccgaccggggaggatccagtaaacacaacactatcaagaagccacaggcccagggtagaaggcccatctgcatctag

SEQ ID NO: 255698 - DNA, 1773 bp, Artificial Sequence
  derived and/or modified sequence
atggctggcgctattgcctcccggatgtccttctcatctctcaaacgtaagcaaccaaagacatttacagtgaggatcgtcacgatggacgcagaaatggagtttaactgcgaaatgaaatggaaggggaaggatctgttcgacttggtgtgtagaaccctaggactaagagagacttggttttttggccttcagtacacaataaaagatacggtggcctggctgaagatggacaagaaggtcctggaccatgatgtgagcaaagaagagccagtgacttttcattttctggctaaattctaccccgaaaacgcagaagaggagttggttcaggagatcacacaacacttgtttttcctccaggtgaagaagcagattctcgatgagaaaatttactgtccaccagaggccagtgtcttgctggccagctacgccgtccaggccaaatacggcgactacgacccaagcgtgcataagcgaggattcctagcccaggaagaactattaccaaagcgagttataaatctgtaccaaatgactccagaaatgtgggaagagcggattaccgcctggtacgccgagcatcgcggtcgcgcaagggacgaagcagagatggaatacttgaagatagcacaggatttggaaatgtatggcgtaaattacttcgcaatcaggaacaagaaaggcactgagctgctcctgggcgtggatgctctcgggttgcacatctacgaccctgagaatagactgacccccaaaatttcgtttccatggaacgaaatccgcaacattagctatagcgataaagagtttactatcaaacccctagacaaaaagatcgacgtcttcaagttcaattctagcaagctcagggtcaacaaactcatcttacagctatgcatcggaaatcacgatctgttcatgcggagaaggaaggctgactccttggaggtgcagcagatgaaggcccaggctcgcgaggaaaaagctcgtaaacagatggagcgtcagaggttggcaagagaaaaacagatgagggaggaggcggagcgtacaagggacgagttagagcggcgtctattgcagatgaaagaggaggcgaccatggcaaacgaggcactgatgcgatccgaggagaccgctgatctgctggccgaaaaagcacagattacagaggaggaggctaagttgttggcccagaaagcagccgaggcagagcaagagatgcagcgcattaaggccactgctataaggactgaagaggagaaaaggttgatggagcagaaagtacttgaagccgaggtgctggccctcaaaatggctgaggaatcagagcggagagccaaggaggccgaccaacttaagcaagatctgcaggaagcccgtgaggctgagcggcgtgccaaacagaagctattggagatcgctaccaagcccacttacccaccaatgaatcctattcctgccccacttccgcctgatataccatcatttaacctaatcggcgactctctgagctttgacttcaaggataccgacatgaagcgcctctccatggagattgagaaggagaaggtggaatatatggagaagtcaaagcatctgcaggagcagctcaatgagttgaagactgaaattgaggccctgaagctgaaggagcgggagaccgccctggacatcctccataacgaaaactctgatcgaggcggatcctctaaacataacaccatcaagaagccacaggcccagggccgaaggcccatttgcatttag

SEQ ID NO: 255699 - protein, 220 aa, Artificial Sequence
  derived and/or modified sequence
MAGAIASRMSFSSLKRKQPKTFTVRIVTMDAEMEFNCEVKKQILDEKIYCPPEASVLLASYAVQAKNKKGTELLLGVDALGLHIYDPENRLTPKISFPWNEIRNISYSDKEFTIKPLDKKIDVFKFNSSKLRVNKLILQLCIGNHDLFMRRRKADSLEVQQMKAQAREEKARKQGQRGRSAEAGPAGSTRGGAKSQAEAPGDCHQAHVPAHEPNSSTVAS

SEQ ID NO: 255700 - protein, 548 aa, Artificial Sequence
  derived and/or modified sequence
MAGAIASRMSFSSLKRKQPKTFTVRIVTMDAEMEFNCEVLDHDVSKEEPVTFHFLAKFYPENAEEELVQEITQHLFFLQVKKQILDEKIYCPPEASVLLASYAVQAKYGDYDPSVHKRGFLAQEELLPKRVINLYQMTPEMWEERITAWYAEHRGRARDEAEMEYLKIAQDLEMYGVNYFAIRNKKGTELLLGVDALGLHIYDPENRLTPKISFPWNEIRNISYSDKEFTIKPLDKKIDVFKFNSSKLRVNKLILQLCIGNHDLFMRRRKADSLEVQQMKAQAREEKARKQMERQRLAREKQMREEAERTRDELERRLLQMKEEATMANEALMRSEETADLLAEKAQITEEEAKLLAQKAAEAEQEMQRIKATAIRTEEEKRLMEQKVLEAEVLALKMAEESERRAKEADQLKQDLQEAREAERRAKQKLLEIATKPTYPPMNPIPAPLPPDIPSFNLIGDSLSFDFKDTDMKRLSMEIEKEKVEYMEKSKHLQEQLNELKTEIEALKLKERETALDILHNENSDRGGSSKHNTIKKPQAQGRRPICI

SEQ ID NO: 255701 - DNA, 1647 bp, Artificial Sequence
  derived and/or modified sequence
atggccggcgccatcgccagcagaatgagcttcagcagcctgaagagaaagcagcccaagaccttcaccgtgagaatcgtgaccatggacgccgagatggagttcaactgcgaggtgctggaccacgacgtgagcaaggaggagcccgtgaccttccacttcctggccaagttctaccccgagaacgccgaggaggagctggtgcaggagatcacccagcacctgttcttcctgcaggtgaagaagcagatcctggacgagaagatctactgcccccccgaggccagcgtgctgctggccagctacgccgtgcaggccaagtacggcgactacgaccccagcgtgcacaagagaggcttcctggcccaggaggagctgctgcccaagagagtgatcaacctgtaccagatgacccccgagatgtgggaggagagaatcaccgcctggtacgccgagcacagaggcagagccagagacgaggccgagatggagtacctgaagatcgcccaggacctggagatgtacggcgtgaactacttcgccatcagaaacaagaagggcaccgagctgctgctgggcgtggacgccctgggcctgcacatctacgaccccgagaacagactgacccccaagatcagcttcccctggaacgagatcagaaacatcagctacagcgacaaggagttcaccatcaagcccctggacaagaagatcgacgtgttcaagttcaacagcagcaagctgagagtgaacaagctgatcctgcagctgtgcatcggcaaccacgacctgttcatgagaagaagaaaggccgacagcctggaggtgcagcagatgaaggcccaggccagagaggagaaggccagaaagcagatggagagacagagactggccagagagaagcagatgagagaggaggccgagagaaccagagacgagctggagagaagactgctgcagatgaaggaggaggccaccatggccaacgaggccctgatgagaagcgaggagaccgccgacctgctggccgagaaggcccagatcaccgaggaggaggccaagctgctggcccagaaggccgccgaggccgagcaggagatgcagagaatcaaggccaccgccatcagaaccgaggaggagaagagactgatggagcagaaggtgctggaggccgaggtgctggccctgaagatggccgaggagagcgagagaagagccaaggaggccgaccagctgaagcaggacctgcaggaggccagagaggccgagagaagagccaagcagaagctgctggagatcgccaccaagcccacctacccccccatgaaccccatccccgcccccctgccccccgacatccccagcttcaacctgatcggcgacagcctgagcttcgacttcaaggacaccgacatgaagagactgagcatggagatcgagaaggagaaggtggagtacatggagaagagcaagcacctgcaggagcagctgaacgagctgaagaccgagatcgaggccctgaagctgaaggagagagagaccgccctggacatcctgcacaacgagaacagcgacagaggcggcagcagcaagcacaacaccatcaagaagccccaggcccagggcagaagacccatctgcatctag

SEQ ID NO: 255702 - DNA, 1647 bp, Artificial Sequence
  derived and/or modified sequence
atggcaggagctatcgcatcccggatgagcttctcgtctctgaaacggaaacagccaaagaccttcaccgtgagaattgttaccatggatgcagagatggagttcaactgcgaagtcctagaccatgacgtgtccaaagaggaacccgttacgttccactttcttgccaagttctatcctgaaaacgcggaagaggaactcgttcaggaaattactcagcatcttttttttctccaggttaagaagcagattctcgacgaaaagatatactgtccgcccgaagcctcagtgcttctagccagctatgcggtgcaggcgaagtacggggactacgaccctagtgtgcataaacggggatttcttgcacaagaggaactgttaccgaagcgcgtgattaacctataccagatgacccctgagatgtgggaggagagaatcacagcatggtatgccgaacaccgcggccgggcgagagatgaggccgagatggaatacctaaagatcgcccaagatctcgaaatgtacggggtgaactacttcgcaattcggaacaaaaaagggacggagctcctcctgggcgtggatgcgctgggacttcatatctatgaccccgaaaaccgcctgactccaaaaatttcctttccctggaacgaaatccggaatattagttactctgacaaggaattcacaattaagcccctcgacaaaaaaattgacgtgttcaaattcaacagctcaaaattaagagtgaataagttgatcctgcagttgtgcatcggcaaccatgacctgttcatgcgccggcgcaaagcagacagcctagaagtgcaacaaatgaaagcccaggctagagaggaaaaagccagaaaacagatggagcgacagcgtcttgcaagggagaaacagatgcgtgaggaagctgagaggacccgtgacgagctggagcgacggctgctccagatgaaggaggaggctaccatggccaatgaagccctaatgaggagcgaggaaacagccgacctgctggccgaaaaggcgcaaatcaccgaggaagaagcaaaattgctggctcagaaagctgcggaggccgagcaggaaatgcagcgcatcaaagctaccgcaatccggactgaagaggagaaaagactcatggagcagaaagtcctggaagccgaagtgctcgctctcaaaatggctgaggagtccgagcgccgggctaaagaggctgatcaactgaaacaagacctgcaggaggcccgcgaggcagaaaggcgggctaagcaaaaactgttggaaatcgctactaagccaacatacccgccgatgaatcctatccccgcccctcttccccctgacattccttctttcaacctgatcggggacagcctgtcctttgattttaaagatactgacatgaagagactgtccatggagatcgagaaggaaaaagtggagtacatggaaaagagtaaacatttgcaggaacagctaaacgagctgaagactgagatcgaagcgttgaagctcaaggagcgagagactgccctcgatattctgcacaacgagaatagtgaccgcggaggttcttcaaagcataatacaattaaaaaacctcaggcccaagggcgacgcccaatctgcatctag

SEQ ID NO: 255703 - DNA, 1647 bp, Artificial Sequence
  derived and/or modified sequence
atggccggggccatcgccagcaggatgtccttcagcagcctgaagaggaagcagcccaagaccttcaccgtgcgcatcgtgaccatggatgctgagatggagttcaactgtgaggtgctggaccatgatgtgtccaaggaggagcctgtgaccttccacttcctggccaagttctacccagaaaatgctgaggaggagctggtgcaggagatcacccagcacctgttcttcctgcaggtgaagaagcagatcctggatgagaagatctactgccccccagaggcctctgtgctgctggccagctatgctgtgcaggccaagtacggggactatgaccccagcgtgcacaagaggggcttcctggcccaggaggagctgctgcccaagagggtcatcaacctgtaccagatgaccccagagatgtgggaggagcgcatcacagcctggtatgcagagcaccggggccgggccagagatgaagctgagatggagtacctgaagatcgcccaggacctggagatgtatggagtgaactactttgccatccggaacaagaagggcacagagctgctgctgggcgtggatgccctgggcctgcacatctatgaccctgaaaatcggctgacccccaagatctccttcccctggaatgagatccggaacatctcctacagcgacaaggagttcaccatcaagcccctggacaagaagattgatgtgttcaagttcaacagcagcaagctgcgggtgaacaagctgatcctgcagctgtgcatcggcaaccacgacctcttcatgagaagaaggaaggctgacagcctggaggtgcagcagatgaaggcccaggcccgggaggagaaggccaggaagcagatggagcggcagaggctggcccgggagaagcagatgagggaggaggccgagaggaccagagatgagctggagcggcggctgctgcagatgaaggaggaggccaccatggccaatgaggccctgatgaggtctgaggagacagctgacctgctggccgagaaggcccagatcacagaggaggaggccaagctgctggcccagaaggctgctgaggccgagcaggagatgcagaggatcaaggccacagccatcagaacagaggaggagaagaggctgatggagcagaaggtgctggaggccgaggtgctggccctgaagatggccgaggagagcgagcggcgggccaaggaggccgaccagctgaagcaggacctgcaggaggcccgggaggccgagcggcgggccaagcagaagctgctggagatcgccaccaagcccacctacccacccatgaaccccatcccagcccccctgcccccagacatccccagcttcaacctgattggagacagcctgagctttgacttcaaggacacagacatgaagaggctgtccatggagattgagaaggagaaggtggagtacatggagaagagcaagcacctgcaggagcagctgaatgagctgaagacagaaattgaggccctgaagctgaaggagcgggagacagccctggacatcctgcacaatgaaaacagcgacagaggaggcagcagcaagcacaacaccatcaagaagccccaggcccagggcagaagacccatctgcatctag

SEQ ID NO: 255704 - DNA, 1647 bp, Artificial Sequence
  derived and/or modified sequence
atggccggcgccatcgccagccggatgagcttcagcagcctgaagcgcaaacagccaaaaactttcacagtcaggatcgtaactatggacgctgaaatggagtttaattgtgaggtgctcgaccatgacgtctccaaggaagagccagttaccttccacttcttggccaaattctatcccgagaatgctgaggaagagctggtgcaagagataactcagcacctattcttcctacaggtgaagaaacaaatactagacgagaaaatctactgcccccctgaggcctcagtcttgctggcctcatatgctgtccaggccaagtacggtgattatgatcccagcgttcacaaacgcggctttctagctcaagaggaactgctgcccaagcgggtgatcaacctgtatcaaatgacccccgagatgtgggaagagcgaattacggcctggtacgcagaacaccgaggtagggcacgggacgaagcagagatggaatatctgaagatcgcccaggatctcgagatgtatggtgtcaactacttcgccatcaggaacaagaaaggcaccgagctcttgctcggcgtggacgcactgggactgcacatttatgaccccgaaaacagactgacccctaagatcagttttccatggaatgagatccgtaacatcagttattcagacaaagaattcacaatcaagcctttagataaaaaaatcgatgtatttaaattcaattcttctaaactgcgggtgaacaaactgatcctacagctgtgtataggcaaccacgacctatttatgcggaggcgcaaagctgacagccttgaggtacaacagatgaaagcccaggctagagaagaaaaggccagaaaacagatggaacgccagcgccttgcaagggaaaagcagatgagggaagaagcggagcggacccgcgatgagcttgagcggcggctgttacagatgaaggaggaggcaacaatggccaatgaggctctcatgcgatccgaggaaacagctgatctgctggcagaaaaggcccagatcaccgaggaggaagctaagctcctcgctcagaaagccgctgaggcagagcaagaaatgcagcgcattaaggcgacagctattcgtacagaagaagaaaagcggctaatggagcagaaggttctggaggcagaggtgctcgcactgaagatggcggaagagagcgaaagaagagcaaaggaggccgatcagctgaaacaggacctgcaagaagctcgagaagctgaacggcgggctaaacagaagctcctggagatagccacaaagcctacctatccacccatgaaccctatcccagctcccttaccccctgatataccttcctttaatttaattggtgacagcctctcttttgatttcaaagatacagatatgaagagactctccatggagattgaaaaagagaaagtggaatacatggagaagagcaagcacctgcaggaacaactaaacgaattgaagaccgaaatagaggctctgaaactgaaagagagggagaccgccctggacatcttgcataatgagaacagtgatagagggggctcaagtaaacataacacaatcaagaagcctcaggcccaagggcggagacccatatgcatttag

SEQ ID NO: 255705 - DNA, 1716 bp, Artificial Sequence
  derived and/or modified sequence
atggccggggccatcgcttcccgcatgagcttcagctctctcaagaggaagcaacccaagacgttcaccgtgaggatcgtcaccatggacgccgagatggagttcaattgcgaggtactggatcatgatgtttcaaaggaagaaccagtcacctttcacttcttggccaaattttatcctgagaatgctgaagaggagctggttcaggagatcacacaacatttattcttcttacaggtaaagaagcagattttagatgaaaagatctactgccctcctgaggcttctgtgctcctggcttcttacgccgtccaggccaagtatggtgactacgaccccagtgttcacaagcggggatttttggcccaagaggaattgcttccaaaaagggtaataaatctgtatcagatgactccggaaatgtgggaggagagaattactgcttggtacgcagagcaccgaggccgagccagggatgaagctgaaatggaatatctgaagatagctcaggacctggagatgtacggtgtgaactactttgcaatccggaataaaaagggcacagagctgctgcttggagtggatgccctggggcttcacatttatgaccctgagaacagactgacccccaagatctccttcccgtggaatgaaatccgaaacatctcgtacagtgacaaggagtttactattaaaccactggataagaaaattgatgtcttcaagtttaactcctcaaagcttcgtgttaataagctgattctccagctatgtatcgggaaccatgatctatttatgaggagaaggaaagccgattctttggaagttcagcagatgaaagcccaggccagggaggagaaggctagaaagcagatggagcggcagcgcctcgctcgagagaagcagatgagggaggaggctgaacgcacgagggatgagttggagaggaggctgctgcagatgaaagaagaagcaacaatggccaacgaagcactgatgcggtctgaggagacagctgacctgttggctgaaaaggcccagatcaccgaggaggaggcaaaacttctggcccagaaggccgcagaggctgagcaggaaatgcagcgcatcaaggccacagcgattcgcacggaggaggagaagcgcctgatggagcagaaggtgctggaagccgaggtgctggcactgaagatggctgaggagtcagagaggagggccaaagaggcagatcagctgaagcaggacctgcaggaagcacgcgaggcggagcgaagagccaagcagaagctcctggagattgccaccaagcccacgtacccgcccatgaacccaattccagcaccgttgcctcctgacataccaagcttcaacctcattggtgacagcctgtctttcgacttcaaagatactgacatgaagcggctttccatggagatagagaaagaaaaagtggaatacatggaaaagagcaagcatctgcaggagcagctcaatgaactcaagacagaaatcgaggccttgaaactgaaagagagggagacagctctggatattctgcacaatgagaactccgacaggggtggcagcagcaagcacaataccattaaaaagcctcaagcccaaggcagaagacctatctgcatttgagccctcaaactcaccttgcagagcgccaagtcccgagtggccttctttgaagagctctagcaggtgacc

SEQ ID NO: 255706 - DNA, 1647 bp, Artificial Sequence
  derived and/or modified sequence
atggccggagcgatcgcttcccggatgtcattttcatcattaaagcgcaaacagcccaagaccttcacagtccgaatcgtcacgatggacgctgaaatggaattcaactgcgaggtgctggatcacgatgtcagtaaggaggagccagtgacctttcactttctggctaagttctatcctgagaacgcagaagaggaactcgtgcaggaaataacacaacaccttttctttctccaggtgaagaagcaaattctagatgagaaaatttattgtccaccggaggccagcgtgctactggccagctacgcagtacaagctaagtacggcgactacgatccatcagtccataaacgtgggttcctggcccaagaggaactgttacccaagcgggtcattaatttgtatcagatgacccctgaaatgtgggaggagaggataaccgcgtggtacgctgagcacagaggcagggccagggacgaagcagaaatggagtacctgaaaatcgcccaagacctggagatgtatggcgttaattatttcgccatcagaaataagaagggcacggagctgcttctgggtgtggatgccttgggactgcatatctacgaccccgagaaccgccttacacctaagatcagcttcccatggaatgagataaggaatattagctactcggacaaggaatttaccatcaaacccctcgataaaaagattgacgtgttcaaatttaactcaagcaaactgcgcgtgaataagctgatcctccagctctgcataggaaaccatgatctgtttatgagacggaggaaggccgactccctcgaagtgcagcagatgaaggcccaggctcgggaggaaaaggcccgaaaacagatggaacggcaaaggctggctcgagagaaacagatgagagaagaggccgagcgcacccgggatgagctggaaaggaggctgcttcagatgaaagaggaagcaacgatggccaacgaagctctcatgagatccgaggagaccgcggacctgctggccgagaaggcccagatcaccgaagaagaagccaaactcctcgcgcagaaagctgccgaagctgagcaagagatgcagcgaatcaaagctaccgccatccgcactgaggaagaaaaacgattgatggagcagaaggtgttggaagccgaagtccttgcactaaagatggcggaagaatccgagcggagagcaaaggaagctgaccaacttaagcaagatctgcaggaagcaagggaagccgagagacgggctaaacagaagcttctggagatagccaccaaaccgacttacccacctatgaaccccatccccgcaccccttcctccagacatccctagctttaatctgatcggggactctctctcttttgatttcaaggacactgacatgaaaagactgtcaatggagattgaaaaggaaaaggtggaatatatggagaaatcaaagcatttgcaagagcagcttaacgaactgaagaccgaaattgaggcgttgaaactgaaggagcgtgaaactgcactggacattctgcacaatgaaaatagcgatcggggaggctccagcaagcataataccatcaagaagcctcaggcgcaaggacgccgacccatttgtatttag

SEQ ID NO: 255707 - protein, 549 aa, Artificial Sequence
  derived and/or modified sequence
MAGAIASRMSFSSLKRKQPKTFTVRIVTMDAEMEFNCEMKWKGKDLFDLVCRTLGLRETWFFGLQYTIKDTVAWLKMDKKVKKQILDEKIYCPPEASVLLASYAVQAKYGDYDPSVHKRGFLAQEELLPKRVINLYQMTPEMWEERITAWYAEHRGRARDEAEMEYLKIAQDLEMYGVNYFAIRNKKGTELLLGVDALGLHIYDPENRLTPKISFPWNEIRNISYSDKEFTIKPLDKKIDVFKFNSSKLRVNKLILQLCIGNHDLFMRRRKADSLEVQQMKAQAREEKARKQMERQRLAREKQMREEAERTRDELERRLLQMKEEATMANEALMRSEETADLLAEKAQITEEEAKLLAQKAAEAEQEMQRIKATAIRTEEEKRLMEQKVLEAEVLALKMAEESERRAKEADQLKQDLQEAREAERRAKQKLLEIATKPTYPPMNPIPAPLPPDIPSFNLIGDSLSFDFKDTDMKRLSMEIEKEKVEYMEKSKHLQEQLNELKTEIEALKLKERETALDILHNENSDRGGSSKHNTIKKPQAQGRRPICI

SEQ ID NO: 255708 - DNA, 1650 bp, Artificial Sequence
  derived and/or modified sequence
atggccggcgccatcgccagcagaatgagcttcagcagcctgaagagaaagcagcccaagaccttcaccgtgagaatcgtgaccatggacgccgagatggagttcaactgcgagatgaagtggaagggcaaggacctgttcgacctggtgtgcagaaccctgggcctgagagagacctggttcttcggcctgcagtacaccatcaaggacaccgtggcctggctgaagatggacaagaaggtgaagaagcagatcctggacgagaagatctactgcccccccgaggccagcgtgctgctggccagctacgccgtgcaggccaagtacggcgactacgaccccagcgtgcacaagagaggcttcctggcccaggaggagctgctgcccaagagagtgatcaacctgtaccagatgacccccgagatgtgggaggagagaatcaccgcctggtacgccgagcacagaggcagagccagagacgaggccgagatggagtacctgaagatcgcccaggacctggagatgtacggcgtgaactacttcgccatcagaaacaagaagggcaccgagctgctgctgggcgtggacgccctgggcctgcacatctacgaccccgagaacagactgacccccaagatcagcttcccctggaacgagatcagaaacatcagctacagcgacaaggagttcaccatcaagcccctggacaagaagatcgacgtgttcaagttcaacagcagcaagctgagagtgaacaagctgatcctgcagctgtgcatcggcaaccacgacctgttcatgagaagaagaaaggccgacagcctggaggtgcagcagatgaaggcccaggccagagaggagaaggccagaaagcagatggagagacagagactggccagagagaagcagatgagagaggaggccgagagaaccagagacgagctggagagaagactgctgcagatgaaggaggaggccaccatggccaacgaggccctgatgagaagcgaggagaccgccgacctgctggccgagaaggcccagatcaccgaggaggaggccaagctgctggcccagaaggccgccgaggccgagcaggagatgcagagaatcaaggccaccgccatcagaaccgaggaggagaagagactgatggagcagaaggtgctggaggccgaggtgctggccctgaagatggccgaggagagcgagagaagagccaaggaggccgaccagctgaagcaggacctgcaggaggccagagaggccgagagaagagccaagcagaagctgctggagatcgccaccaagcccacctacccccccatgaaccccatccccgcccccctgccccccgacatccccagcttcaacctgatcggcgacagcctgagcttcgacttcaaggacaccgacatgaagagactgagcatggagatcgagaaggagaaggtggagtacatggagaagagcaagcacctgcaggagcagctgaacgagctgaagaccgagatcgaggccctgaagctgaaggagagagagaccgccctggacatcctgcacaacgagaacagcgacagaggcggcagcagcaagcacaacaccatcaagaagccccaggcccagggcagaagacccatctgcatctag

SEQ ID NO: 255709 - DNA, 1650 bp, Artificial Sequence
  derived and/or modified sequence
atggcgggcgctattgcttctcgtatgtctttttcatccctgaagagaaaacagcccaagacctttaccgtgcgcatagtgacaatggacgcggaaatggagttcaattgcgaaatgaagtggaagggaaaggacctgttcgatctagtgtgccgcactctcgggctgcgggagacctggttttttggactgcaatatacaattaaggacactgtcgcctggctgaaaatggacaaaaaggtgaagaagcagatcctcgacgagaaaatctattgccctcccgaggcttccgtgttgttggcctcctatgctgttcaggccaaatatggcgactacgatccttcagtgcataaaaggggatttttagcacaagaagagctgcttcccaagagggtgataaacctgtaccagatgacccccgagatgtgggaggaacgcatcaccgcctggtacgccgaacaccgcggccgcgctcgcgacgaagcagaaatggagtatctgaaaatagcccaggatttagaaatgtacggcgtgaactacttcgctataaggaacaagaaaggaactgagctcctgctcggggtggacgctctcggacttcatatttacgacccagaaaatagactcacccctaagatcagtttcccatggaacgagatccggaacatctcatattccgataaggagttcactattaaaccccttgacaagaagattgatgtgttcaagttcaactcttctaaattacgggtcaataagctgattctccaactgtgcatagggaaccacgatttattcatgcgccgtaggaaggcagactctctagaagtccagcagatgaaagcacaggccagagaggagaaagccagaaagcagatggagaggcaaagattagctcgtgagaaacagatgcgggaagaagcagaacgcacgcgggacgaactcgagaggcgcctcttgcagatgaaagaagaggcaaccatggcaaatgaagctctgatgagatctgaggaaacagccgacctcctcgctgagaaggcccagattactgaggaggaggctaaattgctagcacagaaggccgcagaagccgagcaggagatgcagcgtatcaaggcaactgccattcggacagaggaggaaaagcggctgatggaacagaaagtgctggaggcagaggttttagccttaaaaatggctgaggagagcgaacggcgtgcaaaggaggctgaccaactaaagcaggatcttcaggaagcacgggaagcggaacgtagagctaagcagaaactgctggagattgcaaccaaaccaacctaccctccaatgaacccaatcccggccccccttccccctgacataccaagcttcaatctgatcggcgactccttgagctttgacttcaaggacaccgacatgaagagactgtccatggagatcgaaaaggaaaaagtggaatacatggaaaagagcaagcatttgcaggagcagttgaatgagttgaagacagaaattgaagctctcaaactaaaagagcgggaaacagccttggacatcctgcacaacgaaaacagcgatcgagggggctcgtcaaagcacaacactataaagaaaccgcaggcacaggggagacgccccatttgcatctag

SEQ ID NO: 255710 - DNA, 1650 bp, Artificial Sequence
  derived and/or modified sequence
atggccggggccatcgccagcaggatgtccttcagcagcctgaagaggaagcagcccaagaccttcaccgtgcgcatcgtgaccatggatgctgagatggagttcaactgtgagatgaagtggaagggcaaggacctgtttgacctggtgtgcaggaccctgggcctgcgggagacctggttcttcggcctgcagtacaccatcaaggacacagtggcctggctgaagatggacaagaaggtgaagaagcagatcctggatgagaagatctactgccccccagaggcctctgtgctgctggccagctatgctgtgcaggccaagtatggagactatgaccccagcgtgcacaagaggggcttcctggcccaggaggagctgctgcccaagagggtcatcaacctgtaccagatgaccccagagatgtgggaggagcgcatcacagcctggtacgccgagcaccggggccgggccagagatgaggccgagatggagtacctgaagatcgcccaggacctggagatgtatggagtgaactactttgccatccggaacaagaagggcacagagctgctgctgggcgtggatgccctgggcctgcacatctatgaccctgagaaccggctgacccccaagatctccttcccctggaatgagatccggaacatctcctacagcgacaaggagttcaccatcaagcccctggacaagaagattgatgtgttcaagttcaacagcagcaagctgcgggtgaacaagctgatcctgcagctgtgcatcggcaaccacgacctcttcatgagaagaaggaaggctgacagcctggaggtgcagcagatgaaggcccaggcccgggaggagaaggccaggaagcagatggagcggcagaggctggcccgggagaagcagatgagggaggaggccgagaggaccagagatgagctggagcggcggctgctgcagatgaaggaggaggccaccatggccaatgaggccctgatgaggtctgaggagacagctgacctgctggccgagaaggcccagatcacagaggaggaggccaagctgctggcccagaaggctgctgaggccgagcaggagatgcagaggatcaaggccacagccatcagaacagaggaggagaagaggctgatggagcagaaggtgctggaggccgaggtgctggccctgaagatggccgaggagagcgagcggcgggccaaggaggccgaccagctgaagcaggacctgcaggaggcccgggaggccgagcggcgggccaagcagaagctgctggagatcgccaccaagcccacctacccacccatgaaccccatcccagcccccctgcccccagacatccccagcttcaacctgattggagacagcctgagctttgacttcaaggacacagacatgaagaggctgtccatggagattgagaaggagaaggtggagtacatggagaagagcaagcacctgcaggagcagctgaatgagctgaagacagaaattgaggccctgaagctgaaggagcgggagacagccctggacatcctgcacaatgaaaattctgaccggggcggcagcagcaagcacaacaccatcaagaagccccaggcccagggccggcggcccatctgcatctag

SEQ ID NO: 255711 - DNA, 1650 bp, Artificial Sequence
  derived and/or modified sequence
atggccggcgccatcgccagccggatgagcttcagcagcctgaagagaaaacaacccaaaactttcactgtgaggattgtcaccatggatgctgagatggagttcaactgtgagatgaaatggaaaggcaaagacctgtttgatttagtgtgccggaccctcggcctccgtgagacgtggtttttcggtctccagtacacaatcaaagacactgttgcatggctgaagatggataaaaaggtcaaaaagcagattctcgacgagaaaatctattgtcctccagaggcttctgtgcttctggcctcctatgcagtgcaagctaaatatggtgattatgatccaagcgtgcacaaacggggcttccttgcccaggaagaactgctgcccaagcgcgtgatcaacttataccagatgaccccagaaatgtgggaagaaaggatcacggcatggtacgccgagcatcgcgggcgggccagagacgaagccgagatggagtatttgaagattgctcaggatctagagatgtacggtgtcaactactttgcaattcggaacaaaaaagggactgaactcctgctcggcgtcgatgcgttaggcctgcacatctacgatccggagaaccggctcacacccaaaatctcattcccatggaatgaaattaggaacatcagctattctgacaaggaatttaccattaagcccttggataaaaaaatcgacgttttcaaattcaattcgtcgaagctccgagtgaacaagcttatcctgcagctctgcataggaaaccacgatctgttcatgaggcggcgaaaggctgactcattggaagttcagcaaatgaaggctcaggccagggaagagaaagcaaggaagcagatggaaaggcaacggctcgctagggagaagcaaatgagggaggaggctgaacgaaccagagatgaactggagcggcggctcctgcaaatgaaggaagaggcaaccatggctaatgaggccctgatgcgcagcgaggaaacggcagaccttctggctgagaaagcgcagatcaccgaagaagaagccaagctgctagctcaaaaggccgccgaggctgaacaggagatgcaacggattaaggctacggccattcgaacggaagaggagaagcgacttatggagcaaaaggttctggaggcagaagtgctcgctcttaaaatggccgaagaatcagagcggagggccaaggaagcagaccagcttaagcaggacctccaggaagcacgggaggccgaacgccgcgccaaacagaaactcctcgagattgccaccaaaccaacgtatccaccgatgaatcctattccagctccccttcctccagatatacccagtttcaacctcatcggagactccttatcttttgactttaaggatactgacatgaaacggctgtctatggaaattgaaaaagagaaggtcgaatacatggaaaagtcgaaacacctgcaggagcagctgaatgagctcaagacagagattgaggccctgaagcttaaagagagggaaaccgccctagatatcttacacaacgagaatagtgataggggggggagtagcaaacacaacactattaaaaagccacaggcccaaggcaggcgccctatctgtatttag

SEQ ID NO: 255712 - DNA, 5884 bp, Artificial Sequence
  derived and/or modified sequence
gatgcagcgcggccccgtgaccctagtcggccgctgagaggcgcgcggagtctgggccgctgccgtctaggggtcccgtcccgaggcgtccccggcatctccggcccgaatcccggagtgccgggtcgcgcctgcaccgaaggtcccggctcctgtgccctccctgcagccgtcagggcccgtcccccaactcccctttccgctcaggcagggtcctcgcggcccatgctggccgctggggacccgcgcagcccagaccgttcccgggccgggcagccggccaccatggtggccctgaggcctgtgcagcaactccaggggggctaaagggctcagagtgcaggccgtggggcgcgagggtcccgggcctgagccccgcgccatggccggggccatcgcttcccgcatgagcttcagctctctcaagaggaagcaacccaagacgttcaccgtgaggatcgtcaccatggacgccgagatggagttcaattgcgagatgaagtggaaagggaaggacctctttgatttggtgtgccggactctggggctccgagaaacctggttctttggactgcagtacacaatcaaggacacagtggcctggctcaaaatggacaagaaggtaaagaagcagattttagatgaaaagatctactgccctcctgaggcttctgtgctcctggcttcttacgccgtccaggccaagtatggtgactacgaccccagtgttcacaagcggggatttttggcccaagaggaattgcttccaaaaagggtaataaatctgtatcagatgactccggaaatgtgggaggagagaattactgcttggtacgcagagcaccgaggccgagccagggatgaagctgaaatggaatatctgaagatagctcaggacctggagatgtacggtgtgaactactttgcaatccggaataaaaagggcacagagctgctgcttggagtggatgccctggggcttcacatttatgaccctgagaacagactgacccccaagatctccttcccgtggaatgaaatccgaaacatctcgtacagtgacaaggagtttactattaaaccactggataagaaaattgatgtcttcaagtttaactcctcaaagcttcgtgttaataagctgattctccagctatgtatcgggaaccatgatctatttatgaggagaaggaaagccgattctttggaagttcagcagatgaaagcccaggccagggaggagaaggctagaaagcagatggagcggcagcgcctcgctcgagagaagcagatgagggaggaggctgaacgcacgagggatgagttggagaggaggctgctgcagatgaaagaagaagcaacaatggccaacgaagcactgatgcggtctgaggagacagctgacctgttggctgaaaaggcccagatcaccgaggaggaggcaaaacttctggcccagaaggccgcagaggctgagcaggaaatgcagcgcatcaaggccacagcgattcgcacggaggaggagaagcgcctgatggagcagaaggtgctggaagccgaggtgctggcactgaagatggctgaggagtcagagaggagggccaaagaggcagatcagctgaagcaggacctgcaggaagcacgcgaggcggagcgaagagccaagcagaagctcctggagattgccaccaagcccacgtacccgcccatgaacccaattccagcaccgttgcctcctgacataccaagcttcaacctcattggtgacagcctgtctttcgacttcaaagatactgacatgaagcggctttccatggagatagagaaagaaaaagtggaatacatggaaaagagcaagcatctgcaggagcagctcaatgaactcaagacagaaatcgaggccttgaaactgaaagagagggagacagctctggatattctgcacaatgagaactccgacaggggtggcagcagcaagcacaataccattaaaaagcctcaagcccaaggcagaagacctatctgcatttgagccctcaaactcaccttgcagagcgccaagtcccgagtggccttctttgaagagctctagcaggtgacccagccaccccaggacctgccacttctcctgctaccgggaccgcgggatggaccagatatcaagagagccatccatagggagctggctgggggtttccgtgggagctccagaactttccccagctgagtgaagagcccagcccctcttatgtgcaattgccttgaactacgaccctgtagagatttctctcatggcgttctagttctctgacctgagtctttgttttaagaagtatttgtcttcctttgtctaatgtgggattcctgactcccttcgtccaaggcaccggtgtgtgtgtgtcttgcactccagagctgacctccaccgcccagcctgggaagtcattgtagggagtgagacactgaagccctgagaagccagtgccatcatccccaccccgcccagggttccggaacattcattcccccaccggtgaggacctggcatgcagcgaagcagcccagcccggcggatcccaggccagcacgcctgccggcttctcatcgtcagggagcccgcccagagctcgtgacgagcaagtgctgggtccccgccaggcaccccgaggcggcgctctggctggcagctggtggggaataggcagggcagctgtggctggggagagactttaggcagaagctgtgatgcaggctgactgccagccgaggggctgggtagtgccgtgcgggagctgatggtacagggcactcgctgtccccctccggccaccctagaccagggtccgagaggcaggcaggagccactcatgtcttccccattgcccgacgcccatagacgctccttcctgtgtggggctggggtactccctggtcgtactgcagtcagcacccgtaacccggctatgaccagggatctgtaagccctgtggctccacaggtgctgcttctcactggcccagactctgagctccaccggcccagtctgcacggcccatctgcttcaccttccctcccagccacgtgccagtggccacagcccacttcccaacccactgttgtacccaggcctcactttgctgttgcccttgtccctcttcgggccctgaattttctgttccctgggggccagccagggccctttgtgcccctcccagcacaggcctgatgcaggtgtccactcacaggtggcgctcacctaggctgtcacaggacccacctccatgccaggcaacagagggccacagaaccacccccacggctcactccttggtctggggccaccttcttgccctttctttttttttttttttttttttttccgagatggagtctctctctgtcacccaggtgggagtgtggtggcacaatctcggctcactgcaacctccacctcctgagttcaagcaattctcctgcctcagcctcccaagtagctgggactacaggcatgcaccaccacacttggccaatgttctgtatttttaatagggacggggttttgccatgttagctaggctggtctcaaactcacacctgggattacaggcatgagccactgcacccagccccttcttgccctttcttttctccatggctgatgctgctgtggccagccagggcccttgagatccttccagtttggctgttatgcaaagcaggtgatttgtcttaatcagataaaagatagaggctatgggggcctcaagatttttggagagcagaggtggtctctggcaattccatctggttttgagaaacttagcagctcacagagcacagagatcctgccttcttcctactatcaggctgacctaatggggttgggctgctcggcaactgcttgggtcaccttgccccaaggaaaccagccctgggtgccacccagccacttagggtctacagggtgggactccagacctagagcgtaagtatggatgttgtggccctgtgtcttcctagtgtgacccagccaggagcggaagcttcaggcgtttgtaaagtgaggtctggctctgcctcctccgttttttttttttttctgtttctgtttctgttttttttttgagatggagtctcgctctgtcgcccaggctggagtgcagtgtcacgatctcagctcactgcaacctccgcctcccaggtacaagagattctcctgcctcagcctcccgagtagctgggactacaggcgtgtgccaccatgcctggctaatttttgtatttttagtagagatggggtttcgccatgttagccagactggtctcgaactcctgacctcaggtgatcctcccaccccggcttcccaaagttctgggattataggcgtgagccaccatgcccggtctcttctcagtcttgaagcccatccctggatttccaccaggagttactttcctcctgacctgtaaatttgttctttaacaatggctgcaggtgggagcatatggtggtttataaaaacgctgtcgggctttgtttccttctttagctgccgtgtctacttctgaagtctgggaagtgccaagccacgcggcctcaagggagctggctggtgtttgagctgtggcagaagcacctggggctccagggagcaggctgggaactgcaggaccttgctcagccaggagcacttccccctccttgaggcaggaatactgaggtgcctccccacagatggagaaggtggagaggaggatgggcctcaggagcatctcaagccccagtagcaggagaaagaaagaaagagatgcctggttttcacagactggttcctgtggctgggatgactgcatccttttttttttttttttgagacggagtttttgcctttgtcgcccaggctggagtgcaatggcgtgatctcggctcaccgcaacctccgcctcccggattcaagcaattctcctgcctcagcctcccgagtagctgggattacaggcacgcacctccacgtccggctaattttgtatttttagtggagacggggtttctccatgtcggtcaggctggtctcgaactcccgacctcaggtgatctgcccacctcggcctcccaaagtgctgggattacaggcatgagccaccgcgcttggccagactgcgtcctttttaagcgaacattttagggcctgggagtttgtcaagtaaggaagtctcaagcccaaagagcagcgtcctgaccatggtggtttcattacgagcccttctgctggctctcaggcagaagccccacagcaccgggaccattcatgaggtcactgcccagctcatgatgtccgtgaggctgtccttttggccagtagccgtgtgcagctgtgtggcacagatggcttcgttcatcctgatcaaggccccacctcagccacagcagtccccccaacctgtgttgtccaccctattattcatgtacctgccaggccctgctagatagcaccccgtggcattacataacacttcatgagtggctgtgtcttgtaattttggggacaggtttctctctttccctctcttttttttgtcaaaagcccagagactgacaaccagctgcagtgtctaagtgttcctcactgacagggtggggcctcaccacccctggagggagcagcgttggcagggagacagcctggcccagtgaccctgggcccaagccagcccctccagggctttcagggaagcgccatccattttcaaagatgtcaaacgtcacttcttcctgtagggcccgagtcctgcctcctatcagggccagatcatagaaggctattttctattctggggaacgattataacttaaatgattgttttaataaaaattctaagctgg

SEQ ID NO: 255713 - DNA, 1650 bp, Artificial Sequence
  derived and/or modified sequence
atggccggagcaattgcatcgcgcatgtcgttctctagcctgaaaaggaaacagccaaagacattcaccgtccgaatcgtcactatggatgccgagatggaatttaactgtgaaatgaaatggaaagggaaagacctgtttgatctagtgtgcaggactctcgggttgagagagacatggttctttggactccagtacactataaaggatacggtggcttggctgaaaatggacaaaaaggttaaaaagcagatcctggacgagaagatttattgccccccagaagccagcgtcttgctggctagttacgccgtgcaggctaagtatggtgactatgacccaagtgtgcacaagcggggtttcctcgctcaggaggaactactgcctaagcgagtcatcaacctttatcaaatgaccccagagatgtgggaagagcgcatcactgcctggtatgcagaacatcgaggaagggccagagacgaagccgaaatggagtatctcaaaattgcgcaagacctggagatgtacggggtcaactactttgccatcaggaataagaaagggaccgaactgctgctaggcgtggacgcacttggattgcacatctatgatccagagaacagactgacaccgaaaatatccttcccatggaatgagatacgtaacattagctatagcgacaaagaattcacgattaaacccctggataagaaaattgatgtgtttaaattcaacagttcaaagttacgcgttaataaactgattcttcaactgtgcatcgggaaccatgacctgttcatgagaaggcgtaaggctgattcactggaggtgcagcagatgaaggctcaggctcgagaggaaaaagcccgtaagcaaatggaacggcaaaggctcgctcgggaaaagcaaatgagagaggaagccgaacggacacgtgatgagcttgaaagacgcctactgcaaatgaaagaggaggcgactatggctaatgaggcccttatgcggagtgaggagaccgctgacctgctggctgagaaggcacagatcacagaggaggaagccaagctgctggcccagaaggctgctgaagcagagcaagagatgcagcgcatcaaggccacagccattaggaccgaggaggaaaagaggctcatggaacaaaaggttctcgaagctgaggtgctggcactgaagatggctgaggagtcagagagacgcgcaaaggaggccgatcagctgaaacaggacttgcaggaggcacgcgaggcggagcgacgggctaagcaaaaactcctggagattgcgacaaagccaacctatcctccgatgaatcctatccccgctccgttgccacctgatatcccaagcttcaacctgattggtgactcgctgtcattcgatttcaaggacacggacatgaagcgattgtcaatggaaatcgagaaggaaaaagtggagtatatggaaaaatctaaacacttgcaggaacagctcaatgaactgaagaccgaaattgaggcactgaagttgaaagagcgggagactgcacttgatatcctgcataatgagaactcggacagggggggatcatcgaaacacaataccataaagaagcctcaggcccagggccgacgcccaatctgcatttag

SEQ ID NO: 255714 - protein, 507 aa, Artificial Sequence
  derived and/or modified sequence
MAGAIASRMSFSSLKRKQPKTFTVRIVTMDAEMEFNCEVKKQILDEKIYCPPEASVLLASYAVQAKYGDYDPSVHKRGFLAQEELLPKRVINLYQMTPEMWEERITAWYAEHRGRARDEAEMEYLKIAQDLEMYGVNYFAIRNKKGTELLLGVDALGLHIYDPENRLTPKISFPWNEIRNISYSDKEFTIKPLDKKIDVFKFNSSKLRVNKLILQLCIGNHDLFMRRRKADSLEVQQMKAQAREEKARKQMERQRLAREKQMREEAERTRDELERRLLQMKEEATMANEALMRSEETADLLAEKAQITEEEAKLLAQKAAEAEQEMQRIKATAIRTEEEKRLMEQKVLEAEVLALKMAEESERRAKEADQLKQDLQEAREAERRAKQKLLEIATKPTYPPMNPIPAPLPPDIPSFNLIGDSLSFDFKDTDMKRLSMEIEKEKVEYMEKSKHLQEQLNELKTEIEALKLKERETALDILHNENSDRGGSSKHNTIKKPQAQGRRPICI

SEQ ID NO: 255715 - DNA, 1524 bp, Artificial Sequence
  derived and/or modified sequence
atggccggcgccatcgccagcagaatgagcttcagcagcctgaagagaaagcagcccaagaccttcaccgtgagaatcgtgaccatggacgccgagatggagttcaactgcgaggtgaagaagcagatcctggacgagaagatctactgcccccccgaggccagcgtgctgctggccagctacgccgtgcaggccaagtacggcgactacgaccccagcgtgcacaagagaggcttcctggcccaggaggagctgctgcccaagagagtgatcaacctgtaccagatgacccccgagatgtgggaggagagaatcaccgcctggtacgccgagcacagaggcagagccagagacgaggccgagatggagtacctgaagatcgcccaggacctggagatgtacggcgtgaactacttcgccatcagaaacaagaagggcaccgagctgctgctgggcgtggacgccctgggcctgcacatctacgaccccgagaacagactgacccccaagatcagcttcccctggaacgagatcagaaacatcagctacagcgacaaggagttcaccatcaagcccctggacaagaagatcgacgtgttcaagttcaacagcagcaagctgagagtgaacaagctgatcctgcagctgtgcatcggcaaccacgacctgttcatgagaagaagaaaggccgacagcctggaggtgcagcagatgaaggcccaggccagagaggagaaggccagaaagcagatggagagacagagactggccagagagaagcagatgagagaggaggccgagagaaccagagacgagctggagagaagactgctgcagatgaaggaggaggccaccatggccaacgaggccctgatgagaagcgaggagaccgccgacctgctggccgagaaggcccagatcaccgaggaggaggccaagctgctggcccagaaggccgccgaggccgagcaggagatgcagagaatcaaggccaccgccatcagaaccgaggaggagaagagactgatggagcagaaggtgctggaggccgaggtgctggccctgaagatggccgaggagagcgagagaagagccaaggaggccgaccagctgaagcaggacctgcaggaggccagagaggccgagagaagagccaagcagaagctgctggagatcgccaccaagcccacctacccccccatgaaccccatccccgcccccctgccccccgacatccccagcttcaacctgatcggcgacagcctgagcttcgacttcaaggacaccgacatgaagagactgagcatggagatcgagaaggagaaggtggagtacatggagaagagcaagcacctgcaggagcagctgaacgagctgaagaccgagatcgaggccctgaagctgaaggagagagagaccgccctggacatcctgcacaacgagaacagcgacagaggcggcagcagcaagcacaacaccatcaagaagccccaggcccagggcagaagacccatctgcatctag

SEQ ID NO: 255716 - DNA, 663 bp, Artificial Sequence
  derived and/or modified sequence
atggccggcgccatcgccagcagaatgagcttcagcagcctgaagagaaagcagcccaagaccttcaccgtgagaatcgtgaccatggacgccgagatggagttcaactgcgaggtgaagaagcagatcctggacgagaagatctactgcccccccgaggccagcgtgctgctggccagctacgccgtgcaggccaagaacaagaagggcaccgagctgctgctgggcgtggacgccctgggcctgcacatctacgaccccgagaacagactgacccccaagatcagcttcccctggaacgagatcagaaacatcagctacagcgacaaggagttcaccatcaagcccctggacaagaagatcgacgtgttcaagttcaacagcagcaagctgagagtgaacaagctgatcctgcagctgtgcatcggcaaccacgacctgttcatgagaagaagaaaggccgacagcctggaggtgcagcagatgaaggcccaggccagagaggagaaggccagaaagcagggccagagaggcagaagcgccgaggccggccccgccggcagcaccagaggcggcgccaagagccaggccgaggcccccggcgactgccaccaggcccacgtgcccgcccacgagcccaacagcagcaccgtggccagctag

SEQ ID NO: 255717 - DNA, 1524 bp, Artificial Sequence
  derived and/or modified sequence
atggctggggcgattgcctcgagaatgagtttctcttccctgaaacgcaagcaaccaaaaaccttcacagtgcgaatcgtgactatggacgccgagatggaattcaattgtgaggtaaagaaacagatactggatgaaaagatctactgcccaccggaagcgtctgttctgcttgctagctacgccgtgcaggccaaatatggcgattatgatccgtcagtacataagcgaggctttctggcacaggaagaactgctccccaaaagggtcattaacctgtaccagatgacgcctgaaatgtgggaggaaaggattactgcatggtatgccgagcatcgtggtcgcgcgagggacgaggccgaaatggaatacctgaaaatcgcacaggacctggagatgtatggcgtgaactatttcgccataagaaacaaaaagggtaccgaactgctgctcggggtggacgcccttgggctgcacatttacgaccctgagaacagactgacccccaagatctcctttccttggaatgagattcggaatatcagctatagcgataaagagttcacgatcaagcccttagacaaaaaaattgacgtcttcaaattcaattcgtcaaaactgagagtaaataaactcatcctgcagctatgcatcggaaatcacgacctgttcatgcgtagacggaaagctgattccttggaagtgcagcaaatgaaagcccaggcccgagaggagaaagctagaaaacagatggaaaggcagagattagctcgcgaaaaacagatgagagaggaagccgaacggactagggacgagctggaaagacgactgctgcagatgaaggaagaggccactatggctaacgaagccctcatgcggtccgaagaaactgctgacctactggcagaaaaggcgcagattacagaggaggaggcaaagctcctggcccagaaggccgcagaggctgagcaggagatgcaacgcatcaaagctacagcaatcagaacagaagaagagaagcgcttaatggaacagaaagtgctagaggccgaggttcttgctctgaaaatggctgaggaatctgagcggagagcgaaagaggcagatcaattgaaacaggacttacaagaagctagggaggccgagagacgcgcaaaacaaaaattgctcgagattgctaccaaacccacttatcctcctatgaatccgattcctgcacctctgcctccagatataccaagtttcaacctgatcggggattcgctttccttcgattttaaggatactgacatgaagcggctctcaatggaaatcgagaaggaaaaagtagaatatatggagaaatcaaaacatttacaggagcagctgaacgaactcaagacggagattgaagccttgaagcttaaggagagagagacagccctcgacatcctccataatgagaattccgatcgcggaggctcatcaaaacacaacaccatcaagaagcctcaggcccagggtcgccgcccaatttgcatttag

SEQ ID NO: 255718 - DNA, 663 bp, Artificial Sequence
  derived and/or modified sequence
atggctggcgctatcgcttctcggatgagctttagttcacttaagcgcaaacagccaaagacattcacagttagaatagtgaccatggatgctgaaatggaatttaactgtgaggtgaagaagcagatcttagatgaaaaaatttactgtcctcccgaggccagcgtgttgctcgccagttacgctgttcaggcgaagaacaagaaaggcacagagctgctcctgggtgtcgacgccctgggcctccacatctacgatccggaaaataggctaactcctaagatatctttcccatggaacgaaatccggaacatctcctatagtgataaagaattcactattaaacctctggacaagaagattgacgttttcaaatttaactcttcgaagctgcgggtgaacaagctcattctccagttatgtataggaaatcatgacctcttcatgcggcggcgaaaagccgacagccttgaagtgcagcagatgaaagcccaagctcgggaagaaaaggcgaggaagcagggacagaggggacggtcggccgaagcgggtcctgctgggagcaccagaggtggagctaagtcccaggccgaggcccccggggattgtcatcaggctcacgtcccagcacacgagcccaactcctccaccgtagcaagttag

SEQ ID NO: 255719 - DNA, 1524 bp, Artificial Sequence
  derived and/or modified sequence
atggccggggctatcgcgagtcggatgtcctttagcagtctaaagaggaagcaacccaagacattcacagtaagaattgtcacaatggatgcagaaatggagttcaactgtgaggtcaagaagcaaatcttagatgagaaaatctactgcccaccagaagcatcggtccttttagccagctatgcggtgcaagctaaatacggcgattacgatcctagcgttcacaagagagggtttttggctcaggaagaattattgcccaaaagagtgataaacttataccagatgactccggagatgtgggaagaaagaataacagcctggtacgccgaacatcgcggaagagcccgagatgaggcagagatggagtatttaaagattgcccaggacctagaaatgtacggggtaaactatttcgctatacggaacaagaaaggcactgagctgctcctcggcgtggatgctttaggactacacatctacgatcctgagaatcggcttacaccaaagattagctttccttggaacgaaatcaggaacatctcatattcagataaagaattcactatcaaaccgctcgacaagaaaattgacgtttttaagtttaactcctcgaaactccgtgtcaacaaacttatactccagctgtgtattgggaaccacgatcttttcatgagaaggcgcaaagcagattctctagaagtgcagcagatgaaagcacaggcccgagaggaaaaggcccgcaagcaaatggaacggcaaaggttagcacgggaaaagcagatgagagaggaggcggaacgaacacgggacgaactggaacgtagactgttgcagatgaaggaggaggccacaatggctaacgaggctctgatgaggtctgaagaaactgcagatctgttggccgaaaaggctcagatcactgaggaggaggcaaagcttctagcccaaaaagctgcggaggccgaacaggaaatgcagcgtatcaaagccaccgcaattcggactgaggaggaaaagcgattgatggagcagaaagtgttagaagccgaggtgctggcacttaagatggcggaagagtctgagagacgcgccaaagaggccgaccagcttaagcaagacctccaggaggcaagagaggccgagaggagagcaaagcagaaactgctggagatcgccacaaaaccaacctacccacccatgaatcccatccctgcccccctgccccctgatattccctcttttaacttgattggggattccctgagttttgactttaaagacacagatatgaagcgactgagtatggaaatcgagaaggagaaagtcgagtacatggagaaaagcaagcatctccaggagcagctcaatgaactcaagacagaaattgaggccttgaaattaaaagagagagagactgccttggacatattacataacgagaattcagacagaggaggatcttcaaaacataacaccattaagaagccccaagctcagggacggagacccatctgtatatag

SEQ ID NO: 255720 - DNA, 663 bp, Artificial Sequence
  derived and/or modified sequence
atggccggagcgatcgccagccgaatgtcattttcctcccttaaaagaaagcaacccaagacttttactgtacgtatcgtgaccatggatgcagaaatggaattcaactgcgaggtgaaaaaacagatcctggacgagaagatttattgcccccctgaagcctcagttctgctggcatcatacgcggttcaagctaagaacaagaaagggactgaactgttgctgggtgttgacgccctgggactccacatctacgaccccgaaaaccgactcacacctaagatctcatttccatggaatgagattcggaatatctcttacagtgacaaagagtttactattaagcctctggacaagaagattgacgtattcaagtttaactcctcgaagttgcgggtgaataagttgatccttcaactttgtatcgggaatcatgacctgttcatgcgccggaggaaggctgattccctcgaggtgcagcagatgaaggcacaggcgagagaggaaaaagcgaggaagcagggccagcgaggcagatcggccgaggccggacctgctggcagtaccaggggcggggcgaagtcgcaggctgaggccccaggagactgccaccaggcccatgttcccgcccatgaaccaaacagctccaccgtagcctcctag

SEQ ID NO: 255721 - DNA, 1524 bp, Artificial Sequence
  derived and/or modified sequence
atggccggggccatcgccagcaggatgtccttcagcagcctgaagaggaagcagcccaagaccttcaccgtgcgcatcgtgaccatggatgctgagatggagttcaactgtgaggtgaagaagcagatcctggatgagaagatctactgccccccagaggcctctgtgctgctggccagctatgctgtgcaggccaagtatggagactatgaccccagcgtgcacaagaggggcttcctggcccaggaggagctgctgcccaagagggtcatcaacctgtaccagatgaccccagagatgtgggaggagcgcatcacagcctggtacgccgagcaccggggccgggccagagatgaggccgagatggagtacctgaagatcgcccaggacctggagatgtatggagtgaactactttgccatccggaacaagaagggcacagagctgctgctgggcgtggatgccctgggcctgcacatctatgaccctgagaaccggctgacccccaagatctccttcccctggaatgagatccggaacatctcctacagcgacaaggagttcaccatcaagcccctggacaagaagattgatgtgttcaagttcaacagcagcaagctgcgggtgaacaagctgatcctgcagctgtgcatcggcaaccacgacctcttcatgagaagaaggaaggctgacagcctggaggtgcagcagatgaaggcccaggcccgggaggagaaggccaggaagcagatggagcggcagaggctggcccgggagaagcagatgagggaggaggccgagaggaccagagatgagctggagcggcggctgctgcagatgaaggaggaggccaccatggccaatgaggccctgatgaggtctgaggagacagctgacctgctggccgagaaggcccagatcacagaggaggaggccaagctgctggcccagaaggctgctgaggccgagcaggagatgcagaggatcaaggccacagccatcagaacagaggaggagaagaggctgatggagcagaaggtgctggaggccgaggtgctggccctgaagatggccgaggagagcgagcggcgggccaaggaggccgaccagctgaagcaggacctgcaggaggcccgggaggccgagcggcgggccaagcagaagctgctggagatcgccaccaagcccacctacccacccatgaaccccatcccagcccccctgcccccagacatccccagcttcaacctgattggagacagcctgagctttgacttcaaggacacagacatgaagaggctgtccatggagattgagaaggagaaggtggagtacatggagaagagcaagcacctgcaggagcagctgaatgagctgaagacagaaattgaggccctgaagctgaaggagcgggagacagccctggacatcctgcacaatgaaaattctgaccggggcggcagcagcaagcacaacaccatcaagaagccccaggcccagggccggcggcccatctgcatctag

SEQ ID NO: 255722 - DNA, 663 bp, Artificial Sequence
  derived and/or modified sequence
atggccggggccatcgccagcaggatgtccttcagcagcctgaagaggaagcagcccaagaccttcaccgtgcgcatcgtgaccatggatgctgagatggagttcaactgtgaggtgaagaagcagatcctggatgagaagatctactgccccccagaggcctctgtgctgctggccagctatgctgtgcaggccaagaacaagaagggcacagagctgctgctgggcgtggatgccctgggcctgcacatctatgaccctgagaaccggctgacccccaagatctccttcccctggaatgagatccggaacatctcctacagcgacaaggagttcaccatcaagcccctggacaagaagattgatgtgttcaagttcaacagcagcaagctgcgggtgaacaagctgatcctgcagctgtgcatcggcaaccacgacctcttcatgagaagaaggaaggctgacagcctggaggtgcagcagatgaaggcccaggcccgggaggagaaggccaggaagcagggccagaggggccgctctgctgaggccggccctgctggcagcacccggggcggggccaagagccaggccgaggcccctggggactgccaccaggcccacgtgcctgcccacgagcccaacagcagcacagtggccagctag

SEQ ID NO: 255723 - DNA, 1524 bp, Artificial Sequence
  derived and/or modified sequence
atggccggcgccatcgccagccggatgagcttcagcagcctgaagcgaaagcagcctaagacttttacagtcagaattgtgaccatggatgctgaaatggagttcaattgtgaggtcaagaagcagatccttgacgagaagatctattgtccacctgaggcctcagtgttactcgctagctacgctgttcaagccaaatatggagactacgacccttctgtgcacaaaaggggtttcctcgcacaagaggagttgttacctaagcgcgttataaacctataccaaatgacgccagagatgtgggaggagcgcatcaccgcctggtacgcagagcaccggggacgagccagagatgaggctgagatggagtatcttaagatcgcccaggacctggagatgtacggcgtcaactacttcgcaattcgaaataaaaaagggacagagttgctcctgggagtggatgcgctagggctgcacatctatgacccagaaaatcgcctcacccctaagatctccttcccatggaatgagattagaaatatttcatacagtgacaaggagtttaccatcaagcctctcgacaagaaaattgatgtgttcaagttcaacagcagcaagctgcgcgtaaataaactcatcttacagctctgcatcgggaatcatgacctcttcatgcgccgtaggaaggcagatagtctcgaggtgcaacagatgaaggcccaggctcgcgaagaaaaggctcgtaagcagatggagcgccagcggttggcccgtgaaaaacagatgagggaggaggctgaaaggacacgagacgagctggagcgacggctgttgcagatgaaggaagaagccaccatggccaacgaggctctcatgcgcagcgaagaaaccgccgatctgcttgcagaaaaagctcagattacagaagaggaggccaagttgctggctcagaaagccgctgaggccgaacaggagatgcagagaataaaagctaccgccataagaacagaggaggagaaacgcctgatggagcagaaagttttggaggccgaggtcctagctctgaaaatggcggaggagagtgagcggcgcgcaaaagaagctgaccagctcaagcaggacctccaggaagcccgggaagcagaacgcagagctaaacagaaattgctagagatcgcaaccaagcctacatacccccctatgaatccaatacccgcccctttgccccccgatattccctctttcaacctgatcggagatagcttaagtttcgactttaaagatacggatatgaaacggctgtccatggaaatagaaaaggagaaggttgaatatatggaaaaaagtaaacacctgcaggagcagctgaacgagctgaagaccgaaatcgaggcattgaagctgaaagagcgggaaaccgctctggacattctccataacgaaaattcagacaggggagggtccagcaagcacaatactataaagaagccacaggcccaaggaaggcgtccgatatgtatctag

SEQ ID NO: 255724 - DNA, 663 bp, Artificial Sequence
  derived and/or modified sequence
atggccggcgccatcgccagccggatgagcttcagcagcctgaagagaaaacagccgaagaccttcactgttcgcattgttactatggatgccgagatggagtttaattgtgaagttaagaaacagatcctggatgaaaagatatactgccctcctgaggcttctgttctgctggcaagctatgccgtgcaggccaagaacaagaaaggcacagaacttctgctgggcgtggacgcactcggcctgcacatttatgatcccgagaacagattgacccccaaaattagcttcccttggaatgaaataagaaatatcagttacagtgataaagaatttactattaaaccattagataaaaaaatagatgtcttcaagttcaactcgagtaagcttagagtcaataagctgatattacagctgtgcatcgggaaccacgatctgtttatgagacgacgcaaagcagactctctggaggtgcagcaaatgaaggcccaggccagagaggagaaagctagaaagcaggggcagcggggaagatccgccgaagccggtcctgcaggatctacaagaggcggggctaagtcccaggcggaggcacccggggactgtcaccaggctcatgttccggcacacgaacctaattcctccaccgttgcgagttag

SEQ ID NO: 255725 - DNA, 1524 bp, Artificial Sequence
  derived and/or modified sequence
atggccggcgccatcgccagccggatgagcttcagcagcctgaagagaaagcaaccaaaaacctttaccgtgcgaattgtgaccatggacgccgagatggaatttaattgcgaggtcaagaagcagattcttgatgaaaagatctattgccctcccgaagcctctgtcctgctggcgtcctatgcagttcaggccaagtatggggactacgaccccagtgtccacaagagaggctttcttgcccaggaagaattactgccgaagcgagtgattaatttatatcagatgacgccagaaatgtgggaagagcgcattaccgcgtggtatgcggagcacagggggcgtgcccgcgatgaggcggagatggaatacctcaagatagcacaggatctagagatgtatggggtaaactatttcgccatccgtaataaaaaaggaaccgaactcctcctgggcgttgatgccctcggcctgcatatttatgaccccgagaaccgcttaacaccgaaaatttcctttccttggaatgaaattcgcaatatctcttactccgacaaggagttcacaattaagccgctggataagaagatcgatgtcttcaagttcaatagcagcaagcttcgcgtaaacaaactgattctccagctctgcattggtaaccacgatctgttcatgagacgtcgaaaggcagactccttagaggtgcagcagatgaaagctcaagcgagagaagagaaagcccggaagcagatggagaggcagcgcctggccagagagaagcagatgagggaggaagctgagagaacaagggacgagcttgagagaaggctgttgcagatgaaggaagaagccacaatggctaacgaggctctaatgcgctcagaagagactgcagacctgttagcagagaaggctcaaattactgaagaggaggcaaaacttcttgcacagaaagccgcagaggcagagcaggagatgcagcgcatcaaggcaacagccatcaggacagaggaagagaagcggctgatggagcagaaggtgcttgaggccgaagtactggcgctgaagatggccgaggagtctgaacggcgagcaaaggaagcagaccagctgaagcaggatctgcaggaggcacgtgaggccgagcgaagggcgaagcagaagttactggagatcgccaccaaacccacatacccccccatgaatccgatcccagcccctctcccgccggatatcccatcattcaacctcatcggggattctctcagttttgattttaaggacaccgacatgaagcgactctctatggaaatcgaaaaagaaaaagtcgagtatatggaaaaatccaaacacctccaagagcagctgaacgagcttaagacagagatagaagcattgaagcttaaggaaagggagactgcacttgatatactgcataatgagaattccgaccgtggcggcagttcaaagcataacaccattaaaaagcctcaggcgcaggggagaagacccatctgcatttag

SEQ ID NO: 255726 - DNA, 663 bp, Artificial Sequence
  derived and/or modified sequence
atggccggcgccatcgccagccggatgagcttcagcagcctgaagaggaaacagcccaaaaccttcacagtacggatagtgacgatggatgctgagatggagttcaactgtgaggtgaaaaagcaaatcttggatgaaaagatctactgccctcccgaagcatccgttctgttagcctcctacgccgtccaggccaagaataagaaaggcactgagctcttgctcggagtggatgcgctgggcttacacatatacgatccagaaaatagattaactcccaagatatcatttccctggaatgagatcaggaacatctcctactctgataaggagtttacaattaagccactggataagaagattgatgtgttcaagttcaatagttcaaagctcagagtgaataaacttatccttcagctctgcatcggcaaccacgatttattcatgcgccgccgcaaagctgactccctggaagtgcagcagatgaaagcccaagcaagggaggagaaagcaaggaagcaaggccaacgcggaagatccgcagaggcaggacctgcaggatcaacacggggcggagcaaaatcccaagcagaggcacctggtgattgtcatcaggcgcacgtcccagctcacgagcccaattctagtacagtggcgtcgtag

SEQ ID NO: 255727 - DNA, 2020 bp, Artificial Sequence
  derived and/or modified sequence
tcccggagtgccgggtcgcgcctgcaccgaaggtcccggctcctgtgccctccctgcagccgtcagggcccgtcccccaactcccctttccgctcaggcagggtcctcgcggcccatgctggccgctggggacccgcgcagcccagaccgttcccgggccgggcagccggccaccatggtggccctgaggcctgtgcagcaactccaggggggctaaagggctcagagtgcaggccgtggggcgcgagggtcccgggcctgagccccgcgccatggccggggccatcgcttcccgcatgagcttcagctctctcaagaggaagcaacccaagacgttcaccgtgaggatcgtcaccatggacgccgagatggagttcaattgcgaggtaaagaagcagattttagatgaaaagatctactgccctcctgaggcttctgtgctcctggcttcttacgccgtccaggccaagtatggtgactacgaccccagtgttcacaagcggggatttttggcccaagaggaattgcttccaaaaagggtaataaatctgtatcagatgactccggaaatgtgggaggagagaattactgcttggtacgcagagcaccgaggccgagccagggatgaagctgaaatggaatatctgaagatagctcaggacctggagatgtacggtgtgaactactttgcaatccggaataaaaagggcacagagctgctgcttggagtggatgccctggggcttcacatttatgaccctgagaacagactgacccccaagatctccttcccgtggaatgaaatccgaaacatctcgtacagtgacaaggagtttactattaaaccactggataagaaaattgatgtcttcaagtttaactcctcaaagcttcgtgttaataagctgattctccagctatgtatcgggaaccatgatctatttatgaggagaaggaaagccgattctttggaagttcagcagatgaaagcccaggccagggaggagaaggctagaaagcagatggagcggcagcgcctcgctcgagagaagcagatgagggaggaggctgaacgcacgagggatgagttggagaggaggctgctgcagatgaaagaagaagcaacaatggccaacgaagcactgatgcggtctgaggagacagctgacctgttggctgaaaaggcccagatcaccgaggaggaggcaaaacttctggcccagaaggccgcagaggctgagcaggaaatgcagcgcatcaaggccacagcgattcgcacggaggaggagaagcgcctgatggagcagaaggtgctggaagccgaggtgctggcactgaagatggctgaggagtcagagaggagggccaaagaggcagatcagctgaagcaggacctgcaggaagcacgcgaggcggagcgaagagccaagcagaagctcctggagattgccaccaagcccacgtacccgcccatgaacccaattccagcaccgttgcctcctgacataccaagcttcaacctcattggtgacagcctgtctttcgacttcaaagatactgacatgaagcggctttccatggagatagagaaagaaaaagtggaatacatggaaaagagcaagcatctgcaggagcagctcaatgaactcaagacagaaatcgaggccttgaaactgaaagagagggagacagctctggatattctgcacaatgagaactccgacaggggtggcagcagcaagcacaataccattaaaaagcctcaagcccaaggcagaagacctatctgcatttgagccctcaaacttcctctccataggctgagcagagatgtggtcagagtgaactcacattggaacagtacactcacggcaccctggagaggagcggtcactggttgctgagtgaattaaccgaatgtttgctgcttttctcctgcaacagttcattattcctccagcatgcctaggcagtggagagaatgtattttgcccaataataaaatgacatcctgcctcta

SEQ ID NO: 255728 - DNA, 5250 bp, Artificial Sequence
  derived and/or modified sequence
tgcgcttcccgcgggcgcgcggagtgaggacggtgacagccacgcgcgcgcgtacgcgcccgatgcagcgcggccccgtgaccctagtcggccgctgagaggcgcgcggagtctgggccgctgccgtctaggggtcccgtcccgaggcgtccccggcatctccggcccgaatcccggagtgccgggtcgcgcctgcaccgaaggtcccggctcctgtgccctccctgcagccgtcagggcccgtcccccaactcccctttccgctcaggcagggtcctcgcggcccatgctggccgctggggacccgcgcagcccagaccgttcccgggccgggcagccggccaccatggtggccctgaggcctgtgcagcaactccaggggggctaaagggctcagagtgcaggccgtggggcgcgagggtcccgggcctgagccccgcgccatggccggggccatcgcttcccgcatgagcttcagctctctcaagaggaagcaacccaagacgttcaccgtgaggatcgtcaccatggacgccgagatggagttcaattgcgaggtaaagaagcagattttagatgaaaagatctactgccctcctgaggcttctgtgctcctggcttcttacgccgtccaggccaagaataaaaagggcacagagctgctgcttggagtggatgccctggggcttcacatttatgaccctgagaacagactgacccccaagatctccttcccgtggaatgaaatccgaaacatctcgtacagtgacaaggagtttactattaaaccactggataagaaaattgatgtcttcaagtttaactcctcaaagcttcgtgttaataagctgattctccagctatgtatcgggaaccatgatctatttatgaggagaaggaaagccgattctttggaagttcagcagatgaaagcccaggccagggaggagaaggctagaaagcagggccaaagaggcagatcagctgaagcaggacctgcaggaagcacgcgaggcggagcgaagagccaagcagaagctcctggagattgccaccaagcccacgtacccgcccatgaacccaattccagcaccgttgcctcctgacataccaagcttcaacctcattggtgacagcctgtctttcgacttcaaagatactgacatgaagcggctttccatggagatagagaaagaaaaagtggaatacatggaaaagagcaagcatctgcaggagcagctcaatgaactcaagacagaaatcgaggccttgaaactgaaagagagggagacagctctggatattctgcacaatgagaactccgacaggggtggcagcagcaagcacaataccattaaaaagcctcaagcccaaggcagaagacctatctgcatttgagccctcaaactcaccttgcagagcgccaagtcccgagtggccttctttgaagagctctagcaggtgacccagccaccccaggacctgccacttctcctgctaccgggaccgcgggatggaccagatatcaagagagccatccatagggagctggctgggggtttccgtgggagctccagaactttccccagctgagtgaagagcccagcccctcttatgtgcaattgccttgaactacgaccctgtagagatttctctcatggcgttctagttctctgacctgagtctttgttttaagaagtatttgtcttcctttgtctaatgtgggattcctgactcccttcgtccaaggcaccggtgtgtgtgtgtcttgcactccagagctgacctccaccgcccagcctgggaagtcattgtagggagtgagacactgaagccctgagaagccagtgccatcatccccaccccgcccagggttccggaacattcattcccccaccggtgaggacctggcatgcagcgaagcagcccagcccggcggatcccaggccagcacgcctgccggcttctcatcgtcagggagcccgcccagagctcgtgacgagcaagtgctgggtccccgccaggcaccccgaggcggcgctctggctggcagctggtggggaataggcagggcagctgtggctggggagagactttaggcagaagctgtgatgcaggctgactgccagccgaggggctgggtagtgccgtgcgggagctgatggtacagggcactcgctgtccccctccggccaccctagaccagggtccgagaggcaggcaggagccactcatgtcttccccattgcccgacgcccatagacgctccttcctgtgtggggctggggtactccctggtcgtactgcagtcagcacccgtaacccggctatgaccagggatctgtaagccctgtggctccacaggtgctgcttctcactggcccagactctgagctccaccggcccagtctgcacggcccatctgcttcaccttccctcccagccacgtgccagtggccacagcccacttcccaacccactgttgtacccaggcctcactttgctgttgcccttgtccctcttcgggccctgaattttctgttccctgggggccagccagggccctttgtgcccctcccagcacaggcctgatgcaggtgtccactcacaggtggcgctcacctaggctgtcacaggacccacctccatgccaggcaacagagggccacagaaccacccccacggctcactccttggtctggggccaccttcttgccctttctttttttttttttttttttttttccgagatggagtctctctctgtcacccaggtgggagtgtggtggcacaatctcggctcactgcaacctccacctcctgagttcaagcaattctcctgcctcagcctcccaagtagctgggactacaggcatgcaccaccacacttggccaatgttctgtatttttaatagggacggggttttgccatgttagctaggctggtctcaaactcacacctgggattacaggcatgagccactgcacccagccccttcttgccctttcttttctccatggctgatgctgctgtggccagccagggcccttgagatccttccagtttggctgttatgcaaagcaggtgatttgtcttaatcagataaaagatagaggctatgggggcctcaagatttttggagagcagaggtggtctctggcaattccatctggttttgagaaacttagcagctcacagagcacagagatcctgccttcttcctactatcaggctgacctaatggggttgggctgctcggcaactgcttgggtcaccttgccccaaggaaaccagccctgggtgccacccagccacttagggtctacagggtgggactccagacctagagcgtaagtatggatgttgtggccctgtgtcttcctagtgtgacccagccaggagcggaagcttcaggcgtttgtaaagtgaggtctggctctgcctcctccgttttttttttttttctgtttctgtttctgttttttttttgagatggagtctcgctctgtcgcccaggctggagtgcagtgtcacgatctcagctcactgcaacctccgcctcccaggtacaagagattctcctgcctcagcctcccgagtagctgggactacaggcgtgtgccaccatgcctggctaatttttgtatttttagtagagatggggtttcgccatgttagccagactggtctcgaactcctgacctcaggtgatcctcccaccccggcttcccaaagttctgggattataggcgtgagccaccatgcccggtctcttctcagtcttgaagcccatccctggatttccaccaggagttactttcctcctgacctgtaaatttgttctttaacaatggctgcaggtgggagcatatggtggtttataaaaacgctgtcgggctttgtttccttctttagctgccgtgtctacttctgaagtctgggaagtgccaagccacgcggcctcaagggagctggctggtgtttgagctgtggcagaagcacctggggctccagggagcaggctgggaactgcaggaccttgctcagccaggagcacttccccctccttgaggcaggaatactgaggtgcctccccacagatggagaaggtggagaggaggatgggcctcaggagcatctcaagccccagtagcaggagaaagaaagaaagagatgcctggttttcacagactggttcctgtggctgggatgactgcatccttttttttttttttttgagacggagtttttgcctttgtcgcccaggctggagtgcaatggcgtgatctcggctcaccgcaacctccgcctcccggattcaagcaattctcctgcctcagcctcccgagtagctgggattacaggcacgcacctccacgtccggctaattttgtatttttagtggagacggggtttctccatgtcggtcaggctggtctcgaactcccgacctcaggtgatctgcccacctcggcctcccaaagtgctgggattacaggcatgagccaccgcgcttggccagactgcgtcctttttaagcgaacattttagggcctgggagtttgtcaagtaaggaagtctcaagcccaaagagcagcgtcctgaccatggtggtttcattacgagcccttctgctggctctcaggcagaagccccacagcaccgggaccattcatgaggtcactgcccagctcatgatgtccgtgaggctgtccttttggccagtagccgtgtgcagctgtgtggcacagatggcttcgttcatcctgatcaaggccccacctcagccacagcagtccccccaacctgtgttgtccaccctattattcatgtacctgccaggccctgctagatagcaccccgtggcattacataacacttcatgagtggctgtgtcttgtaattttggggacaggtttctctctttccctctcttttttttgtcaaaagcccagagactgacaaccagctgcagtgtctaagtgttcctcactgacagggtggggcctcaccacccctggagggagcagcgttggcagggagacagcctggcccagtgaccctgggcccaagccagcccctccagggctttcagggaagcgccatccattttcaaagatgtcaaacgtcacttcttcctgtagggcccgagtcctgcctcctatcagggccagatcatagaaggctattttctattctggggaacgattataacttaaatgattgttttaataaaaattctaagctgg

SEQ ID NO: 255729 - DNA, 1845 bp, Artificial Sequence
  derived and/or modified sequence
cctgcaccgaaggtcccggctcctgtgccctccctgcagccgtcagggcccgtcccccaactcccctttccgctcaggcagggtcctcgcggcccatgctggccgctggggacccgcgcagcccagaccgttcccgggccgggcagccggccaccatggtggccctgaggcctgtgcagcaactccaggggggctaaagggctcagagtgcaggccgtggggcgcgagggtcccgggcctgagccccgcgccatggccggggccatcgcttcccgcatgagcttcagctctctcaagaggaagcaacccaagacgttcaccgtgaggatcgtcaccatggacgccgagatggagttcaattgcgaggtaaagaagcagattttagatgaaaagatctactgccctcctgaggcttctgtgctcctggcttcttacgccgtccaggccaagtatggtgactacgaccccagtgttcacaagcggggatttttggcccaagaggaattgcttccaaaaagggtaataaatctgtatcagatgactccggaaatgtgggaggagagaattactgcttggtacgcagagcaccgaggccgagccagggatgaagctgaaatggaatatctgaagatagctcaggacctggagatgtacggtgtgaactactttgcaatccggaataaaaagggcacagagctgctgcttggagtggatgccctggggcttcacatttatgaccctgagaacagactgacccccaagatctccttcccgtggaatgaaatccgaaacatctcgtacagtgacaaggagtttactattaaaccactggataagaaaattgatgtcttcaagtttaactcctcaaagcttcgtgttaataagctgattctccagctatgtatcgggaaccatgatctatttatgaggagaaggaaagccgattctttggaagttcagcagatgaaagcccaggccagggaggagaaggctagaaagcagatggagcggcagcgcctcgctcgagagaagcagatgagggaggaggctgaacgcacgagggatgagttggagaggaggctgctgcagatgaaagaagaagcaacaatggccaacgaagcactgatgcggtctgaggagacagctgacctgttggctgaaaaggcccagatcaccgaggaggaggcaaaacttctggcccagaaggccgcagaggctgagcaggaaatgcagcgcatcaaggccacagcgattcgcacggaggaggagaagcgcctgatggagcagaaggtgctggaagccgaggtgctggcactgaagatggctgaggagtcagagaggagggccaaagaggcagatcagctgaagcaggacctgcaggaagcacgcgaggcggagcgaagagccaagcagaagctcctggagattgccaccaagcccacgtacccgcccatgaacccaattccagcaccgttgcctcctgacataccaagcttcaacctcattggtgacagcctgtctttcgacttcaaagatactgacatgaagcggctttccatggagatagagaaagaaaaagtggaatacatggaaaagagcaagcatctgcaggagcagctcaatgaactcaagacagaaatcgaggccttgaaactgaaagagagggagacagctctggatattctgcacaatgagaactccgacaggggtggcagcagcaagcacaataccattaaaaagcctcaagcccaaggcagaagacctatctgcatttgagccctcaaactcaccttgcagagcgccaagtcccgagtggccttctttgaagagctctagcaggtgacc

SEQ ID NO: 255730 - DNA, 1000 bp, Artificial Sequence
  derived and/or modified sequence
tcagagtgcaggccgtggggcgcgagggtcccgggcctgagccccgcgccatggccggggccatcgcttcccgcatgagcttcagctctctcaagaggaagcaacccaagacgttcaccgtgaggatcgtcaccatggacgccgagatggagttcaattgcgaggtaaagaagcagattttagatgaaaagatctactgccctcctgaggcttctgtgctcctggcttcttacgccgtccaggccaagaataaaaagggcacagagctgctgcttggagtggatgccctggggcttcacatttatgaccctgagaacagactgacccccaagatctccttcccgtggaatgaaatccgaaacatctcgtacagtgacaaggagtttactattaaaccactggataagaaaattgatgtcttcaagtttaactcctcaaagcttcgtgttaataagctgattctccagctatgtatcgggaaccatgatctatttatgaggagaaggaaagccgattctttggaagttcagcagatgaaagcccaggccagggaggagaaggctagaaagcagggccaaagaggcagatcagctgaagcaggacctgcaggaagcacgcgaggcggagcgaagagccaagcagaagctcctggagattgccaccaagcccacgtacccgcccatgaacccaattccagcaccgttgcctcctgacataccaagcttcaacctcattggtgacagcctgtctttcgacttcaaagatactgacatgaagcggctttccatggagatagagaaagaaaactcaccttgcagagcgccaagtcccgagtggccttctttgaagagctctagcaggtgacccagccaccccaggacctgccacttctcctgctaccgggaccgcgggatggaccagatatcaagagagccatccatagggagctggctgggggtttccgtgggagctccagaactttccccagctgagtgaagag

SEQ ID NO: 255731 - DNA, 1524 bp, Artificial Sequence
  derived and/or modified sequence
atggcaggtgcaatcgcgagcagaatgtctttttccagcctgaaacgcaaacagcccaaaaccttcacagtgcggatagtgacgatggacgccgagatggagtttaattgcgaggtcaaaaaacagatcctcgatgaaaagatttattgcccccctgaggcaagcgtgttgctagcatcatacgcagtccaagcaaaatatggggattatgaccctagcgtgcacaagcgcggatttctggctcaggaagaacttctccctaagcgagtgatcaacctgtatcaaatgactcctgagatgtgggaagagagaatcacggcttggtacgctgaacaccgtgggagggcgagggacgaggcagaaatggagtacctgaagatcgcccaggacctagagatgtacggcgtcaactacttcgccattcgcaacaaaaagggcaccgaactgttacttggagtggatgccctggggttgcacatatatgaccctgagaatagactcacacctaagatttctttcccctggaacgaaatccgtaatattagctactctgacaaggaatttaccatcaagccgctggataaaaaaatcgacgtcttcaagtttaattcatccaagctacgcgtgaataaactcattctgcaactgtgtatagggaaccacgatctgtttatgcgccgacgcaaagccgactccttagaggtgcagcagatgaaggcccaggcaagggaggagaaggctcgcaaacagatggaaaggcagcggcttgcgagagaaaaacagatgcgcgaggaagcggagcggaccagagatgaactggaaagaagactcctacagatgaaagaggaggcgaccatggcgaatgaggccttaatgaggtcagaggaaacagctgacctgctggcagaaaaggctcagataaccgaagaggaagcaaagttactggcccagaaggctgccgaagccgagcaggaaatgcagaggattaaggcaactgcaatacggaccgaggaggagaagaggctgatggagcagaaggtgctagaggctgaggtgttggcccttaagatggcagaggagagtgaaaggcgggctaaagaggctgatcagcttaaacaggacttgcaggaggctcgcgaggctgaaaggcgcgctaagcagaagctcttggaaatcgccacaaaaccgacatacccaccgatgaacccaatccctgcaccgttacctccagacatcccctcatttaacctgatcggcgactcgttgtcatttgacttcaaagacaccgacatgaagagacttagcatggagatcgaaaaggaaaaggtggaatatatggagaagtctaagcacctccaggaacagttgaacgagctcaagacagagattgaagcgctgaaactcaaggagcgggaaaccgccctggacattctgcacaatgaaaatagtgaccgcggtggaagttccaagcacaatactattaagaaaccacaagcgcaagggcgtcggcctatctgtatttag

SEQ ID NO: 255732 - DNA, 663 bp, Artificial Sequence
  derived and/or modified sequence
atggcgggagccatcgcttctcggatgagcttcagctcactgaaacggaagcaacccaagacattcacagtgagaatcgtgaccatggacgccgagatggagtttaactgcgaagtgaaaaaacagatcctagatgaaaagatctactgtccacccgaagccagtgtgctgctggcatcttatgctgtccaggctaaaaataagaaaggaaccgagcttctccttggggtggatgctctaggtctgcatatttacgaccctgagaacagactgacacccaaaatctcattcccatggaatgagatccggaacattagctattctgataaggagttcacaatcaagccactggataagaagatcgacgtcttcaaattcaattcgagcaaactcagagtcaataaattaatcctacagttgtgcatcggaaaccacgatctgtttatgcgacgcagaaaggcggattcactggaggtccaacagatgaaagctcaggcgcgagaagagaaggcgcgtaaacagggacagcggggacggtcggctgaggccggacctgccggttcaacccggggaggtgcgaagtcccaggctgaagcccctggcgattgccaccaggcccatgtgccggcacacgagcccaacagctcaacggtggcctcatag

SEQ ID NO: 255733 - DNA, 1524 bp, Artificial Sequence
  derived and/or modified sequence
atggctggagccatagccagccggatgagcttctctagcttaaaacgaaagcaacctaaaacattcactgtaaggatagttacaatggatgccgagatggaattcaattgcgaggtgaagaagcagattctcgatgaaaaaatatattgtccgccagaagcatccgtgctcctggcaagctacgccgtgcaggcaaagtacggggactatgatccaagtgttcacaaaaggggttttttggctcaggaagagttactcccgaagcgtgtgataaacttgtaccagatgacgcctgagatgtgggaggagagaattacggcctggtacgcagagcatagaggaagggcacgggatgaggccgaaatggagtatctcaagatagctcaagaccttgagatgtatggagtgaattacttcgccatcaggaacaaaaagggcacagagctcttgctgggcgtggacgcactaggattgcacatctacgatcctgagaaccgcctgacgcccaagatatctttcccatggaacgagattcggaatatctcatattcagataaggaattcactatcaaacccctggataaaaaaatcgacgtgtttaagtttaacagttccaaactccgtgtgaacaaactgattctgcagctgtgcattggcaatcacgatctcttcatgagaagacgcaaagccgactctctggaggtccaacagatgaaggcccaagctcgagaagagaaagcgcgtaagcaaatggaaagacagcggctggctcgggaaaagcaaatgagagaggaggccgagcgaacccgcgacgagctggagaggaggctgctgcagatgaaagaggaggctaccatggccaacgaggcactaatgcgctctgaggagactgccgatttgctggcagagaaagctcagattaccgaagaagaggctaaacttctggcccaaaaagctgccgaggcagagcaggagatgcagagaattaaagctacggcgatacggactgaagaagaaaagcgccttatggagcagaaggtgctcgaagctgaggtcctcgcgttaaagatggctgaggagagcgagcgcagagcaaaggaagccgatcagctcaaacaagacctgcaggaagcaagagaagcagaacggagagcgaaacaaaaattgctggagatcgcaaccaaaccaacgtatcctccgatgaacccaatacccgcaccactgccgccagacatcccatccttcaacctcatcggtgacagcctgtctttcgacttcaaagacacagacatgaaacgcctcagcatggagatcgagaaagaaaaggtggagtacatggagaagtccaaacacctacaggagcagctgaatgagttaaagactgagattgaagccctcaaactaaaagaacgagagactgcactggatatcttgcataacgagaattcagatagaggcggttcgtcaaaacacaatacgatcaagaaaccacaggcccaggggaggagacccatctgtatttag

SEQ ID NO: 255734 - DNA, 663 bp, Artificial Sequence
  derived and/or modified sequence
atggcaggggctatcgccagtcgaatgtccttctccagcttgaaacgaaagcagcccaagaccttcaccgtgcgaattgtgacaatggacgccgagatggaatttaactgcgaagtgaagaagcagattcttgacgaaaagatttactgtcccccagaggcttccgtgcttttggccagttatgctgttcaagccaagaataaaaaaggaacagaactgcttctcggtgtggatgccctcggactccatatttacgaccccgagaatagactcacacccaagatctcattcccctggaatgaaatccgaaatatatcatattctgataaagagttcaccatcaagcctcttgataagaagattgacgtgttcaagttcaactcgagcaagttgagggtcaataagctaatcttgcaattgtgcatcggcaatcacgatctcttcatgaggaggaggaaagcagactctctggaagtacagcaaatgaaggcccaggctagggaggagaaggcacgcaaacaggggcagcggggacgcagcgccgaggccggacccgcaggatccacgaggggcggagccaagtcacaagcagaggctccgggtgattgccaccaggcccacgtgcctgcgcacgagccgaatagcagcacggtagcatcctag

SEQ ID NO: 255735 - protein, 165 aa, Artificial Sequence
  derived and/or modified sequence
MAGAIASRMSFSSLKRKQPKTFTVRIVTMDAEMEFNCEMKWKGKDLFDLVCRTLGLRETWFFGLQYTIKDTVAWLKMDKKVLDHDVSKEEPVTFHFLAKFYPENAEEELVQEITQHLFFLQVKKQILDEKIYCPPEASVLLASYAVQAKLTLQSAKSRVAFFEEL

SEQ ID NO: 255736 - DNA, 498 bp, Artificial Sequence
  derived and/or modified sequence
atggccggcgccatcgccagcagaatgagcttcagcagcctgaagagaaagcagcccaagaccttcaccgtgagaatcgtgaccatggacgccgagatggagttcaactgcgagatgaagtggaagggcaaggacctgttcgacctggtgtgcagaaccctgggcctgagagagacctggttcttcggcctgcagtacaccatcaaggacaccgtggcctggctgaagatggacaagaaggtgctggaccacgacgtgagcaaggaggagcccgtgaccttccacttcctggccaagttctaccccgagaacgccgaggaggagctggtgcaggagatcacccagcacctgttcttcctgcaggtgaagaagcagatcctggacgagaagatctactgcccccccgaggccagcgtgctgctggccagctacgccgtgcaggccaagctgaccctgcagagcgccaagagcagagtggccttcttcgaggagctgtag

SEQ ID NO: 255737 - DNA, 498 bp, Artificial Sequence
  derived and/or modified sequence
atggccggagcaatcgcatcaagaatgtctttttctagtctgaagcgtaaacagcctaagacatttacagtgagaattgtgactatggatgccgaaatggaatttaactgcgagatgaagtggaagggcaaagacttgtttgatttagtctgccggacacttggactccgggagacctggttctttggactgcagtacacgatcaaagacacagtcgcatggttgaaaatggacaaaaaggtgctcgatcatgatgtgagcaaagaggaacctgtgaccttccacttccttgccaaattttaccctgagaatgccgaggaagagctggtgcaagaaattactcagcacttgttctttcttcaagtgaaaaaacaaattctagatgagaaaatttattgcccgccagaagcctcggtcctcttagcctcatacgctgtgcaagccaaactgaccttgcagtccgctaagagccgggtcgcattctttgaggaactttag

SEQ ID NO: 255738 - DNA, 498 bp, Artificial Sequence
  derived and/or modified sequence
atggccggggccatcgccagcaggatgtccttcagcagcctgaagaggaagcagcccaagaccttcaccgtgcgcatcgtgaccatggatgctgagatggagttcaactgtgagatgaagtggaagggcaaggacctgtttgacctggtgtgcaggaccctgggcctgcgggagacctggttcttcggcctgcagtacaccatcaaggacacagtggcctggctgaagatggacaagaaggtgctggaccatgatgtgtccaaggaggagcctgtgaccttccacttcctggccaagttctacccagaaaatgctgaggaggagctggtgcaggagatcacccagcacctgttcttcctgcaggtgaagaagcagatcctggatgagaagatctactgccccccagaggcctctgtgctgctggccagctatgctgtgcaggccaagctgaccctgcagagcgccaagagccgggtggccttctttgaggagctgtag

SEQ ID NO: 255739 - DNA, 498 bp, Artificial Sequence
  derived and/or modified sequence
atggccggcgccatcgccagccggatgagcttcagcagcctgaagcgaaagcaacccaaaaccttcacagtccggattgttacaatggatgcagaaatggaatttaattgtgagatgaagtggaagggcaaggatctgtttgacctggtgtgtaggacactgggcctgagagagacatggtttttcgggctgcagtatacgatcaaggacaccgtggcctggcttaaaatggacaagaaagtcctggatcacgatgtgtcgaaggaagagcctgtgacattccactttctggcaaaattttatcccgagaacgccgaggaggagttggtccaggagatcacacaacatctttttttcctgcaggtaaagaaacagatcctggacgaaaaaatctattgtcccccagaagcttccgttctcctcgccagctatgcagtccaggccaagcttaccctgcaaagcgccaaatctcgcgtcgccttctttgaggagctttag

SEQ ID NO: 255740 - DNA, 4733 bp, Artificial Sequence
  derived and/or modified sequence
tgcgcttcccgcgggcgcgcggagtgaggacggtgacagccacgcgcgcgcgtacgcgcccgatgcagcgcggccccgtgaccctagtcggccgctgagaggcgcgcggagtctgggccgctgccgtctaggggtcccgtcccgaggcgtccccggcatctccggcccgaatcccggagtgccgggtcgcgcctgcaccgaaggtcccggctcctgtgccctccctgcagccgtcagggcccgtcccccaactcccctttccgctcaggcagggtcctcgcggcccatgctggccgctggggacccgcgcagcccagaccgttcccgggccgggcagccggccaccatggtggccctgaggcctgtgcagcaactccaggggggctaaagggctcagagtgcaggccgtggggcgcgagggtcccgggcctgagccccgcgccatggccggggccatcgcttcccgcatgagcttcagctctctcaagaggaagcaacccaagacgttcaccgtgaggatcgtcaccatggacgccgagatggagttcaattgcgagatgaagtggaaagggaaggacctctttgatttggtgtgccggactctggggctccgagaaacctggttctttggactgcagtacacaatcaaggacacagtggcctggctcaaaatggacaagaaggtactggatcatgatgtttcaaaggaagaaccagtcacctttcacttcttggccaaattttatcctgagaatgctgaagaggagctggttcaggagatcacacaacatttattcttcttacaggtaaagaagcagattttagatgaaaagatctactgccctcctgaggcttctgtgctcctggcttcttacgccgtccaggccaagctcaccttgcagagcgccaagtcccgagtggccttctttgaagagctctagcaggtgacccagccaccccaggacctgccacttctcctgctaccgggaccgcgggatggaccagatatcaagagagccatccatagggagctggctgggggtttccgtgggagctccagaactttccccagctgagtgaagagcccagcccctcttatgtgcaattgccttgaactacgaccctgtagagatttctctcatggcgttctagttctctgacctgagtctttgttttaagaagtatttgtcttcctttgtctaatgtgggattcctgactcccttcgtccaaggcaccggtgtgtgtgtgtcttgcactccagagctgacctccaccgcccagcctgggaagtcattgtagggagtgagacactgaagccctgagaagccagtgccatcatccccaccccgcccagggttccggaacattcattcccccaccggtgaggacctggcatgcagcgaagcagcccagcccggcggatcccaggccagcacgcctgccggcttctcatcgtcagggagcccgcccagagctcgtgacgagcaagtgctgggtccccgccaggcaccccgaggcggcgctctggctggcagctggtggggaataggcagggcagctgtggctggggagagactttaggcagaagctgtgatgcaggctgactgccagccgaggggctgggtagtgccgtgcgggagctgatggtacagggcactcgctgtccccctccggccaccctagaccagggtccgagaggcaggcaggagccactcatgtcttccccattgcccgacgcccatagacgctccttcctgtgtggggctggggtactccctggtcgtactgcagtcagcacccgtaacccggctatgaccagggatctgtaagccctgtggctccacaggtgctgcttctcactggcccagactctgagctccaccggcccagtctgcacggcccatctgcttcaccttccctcccagccacgtgccagtggccacagcccacttcccaacccactgttgtacccaggcctcactttgctgttgcccttgtccctcttcgggccctgaattttctgttccctgggggccagccagggccctttgtgcccctcccagcacaggcctgatgcaggtgtccactcacaggtggcgctcacctaggctgtcacaggacccacctccatgccaggcaacagagggccacagaaccacccccacggctcactccttggtctggggccaccttcttgccctttctttttttttttttttttttttttccgagatggagtctctctctgtcacccaggtgggagtgtggtggcacaatctcggctcactgcaacctccacctcctgagttcaagcaattctcctgcctcagcctcccaagtagctgggactacaggcatgcaccaccacacttggccaatgttctgtatttttaatagggacggggttttgccatgttagctaggctggtctcaaactcacacctgggattacaggcatgagccactgcacccagccccttcttgccctttcttttctccatggctgatgctgctgtggccagccagggcccttgagatccttccagtttggctgttatgcaaagcaggtgatttgtcttaatcagataaaagatagaggctatgggggcctcaagatttttggagagcagaggtggtctctggcaattccatctggttttgagaaacttagcagctcacagagcacagagatcctgccttcttcctactatcaggctgacctaatggggttgggctgctcggcaactgcttgggtcaccttgccccaaggaaaccagccctgggtgccacccagccacttagggtctacagggtgggactccagacctagagcgtaagtatggatgttgtggccctgtgtcttcctagtgtgacccagccaggagcggaagcttcaggcgtttgtaaagtgaggtctggctctgcctcctccgttttttttttttttctgtttctgtttctgttttttttttgagatggagtctcgctctgtcgcccaggctggagtgcagtgtcacgatctcagctcactgcaacctccgcctcccaggtacaagagattctcctgcctcagcctcccgagtagctgggactacaggcgtgtgccaccatgcctggctaatttttgtatttttagtagagatggggtttcgccatgttagccagactggtctcgaactcctgacctcaggtgatcctcccaccccggcttcccaaagttctgggattataggcgtgagccaccatgcccggtctcttctcagtcttgaagcccatccctggatttccaccaggagttactttcctcctgacctgtaaatttgttctttaacaatggctgcaggtgggagcatatggtggtttataaaaacgctgtcgggctttgtttccttctttagctgccgtgtctacttctgaagtctgggaagtgccaagccacgcggcctcaagggagctggctggtgtttgagctgtggcagaagcacctggggctccagggagcaggctgggaactgcaggaccttgctcagccaggagcacttccccctccttgaggcaggaatactgaggtgcctccccacagatggagaaggtggagaggaggatgggcctcaggagcatctcaagccccagtagcaggagaaagaaagaaagagatgcctggttttcacagactggttcctgtggctgggatgactgcatccttttttttttttttttgagacggagtttttgcctttgtcgcccaggctggagtgcaatggcgtgatctcggctcaccgcaacctccgcctcccggattcaagcaattctcctgcctcagcctcccgagtagctgggattacaggcacgcacctccacgtccggctaattttgtatttttagtggagacggggtttctccatgtcggtcaggctggtctcgaactcccgacctcaggtgatctgcccacctcggcctcccaaagtgctgggattacaggcatgagccaccgcgcttggccagactgcgtcctttttaagcgaacattttagggcctgggagtttgtcaagtaaggaagtctcaagcccaaagagcagcgtcctgaccatggtggtttcattacgagcccttctgctggctctcaggcagaagccccacagcaccgggaccattcatgaggtcactgcccagctcatgatgtccgtgaggctgtccttttggccagtagccgtgtgcagctgtgtggcacagatggcttcgttcatcctgatcaaggccccacctcagccacagcagtccccccaacctgtgttgtccaccctattattcatgtacctgccaggccctgctagatagcaccccgtggcattacataacacttcatgagtggctgtgtcttgtaattttggggacaggtttctctctttccctctcttttttttgtcaaaagcccagagactgacaaccagctgcagtgtctaagtgttcctcactgacagggtggggcctcaccacccctggagggagcagcgttggcagggagacagcctggcccagtgaccctgggcccaagccagcccctccagggctttcagggaagcgccatccattttcaaagatgtcaaacgtcacttcttcctgtagggcccgagtcctgcctcctatcagggccagatcatagaaggctattttctattctggggaacgattataacttaaatgattgttttaataaaaattctaagctgg

SEQ ID NO: 255741 - DNA, 498 bp, Artificial Sequence
  derived and/or modified sequence
atggcaggcgctatcgccagccgcatgtctttctcatctctgaagaggaagcagccaaaaacattcaccgtgaggatcgtcactatggatgcggagatggagttcaactgtgaaatgaaatggaaagggaaggacctgttcgacctggtgtgtcgcacccttggtcttcgggaaacctggttctttggcctccagtatactatcaaagacacagtcgcatggcttaaaatggataaaaaggtcttagaccacgacgtatccaaggaggaaccagtgacttttcacttcctggccaagttttaccctgagaacgcggaagaggagctggtccaggaaatcactcagcacctttttttcttacaggtcaagaaacagatattggatgagaaaatttactgcccccctgaggcctcagtcctgttagcatcatatgccgtgcaagctaagttaaccctgcagtctgccaagtccagggtggcattcttcgaggaattatag

SEQ ID NO: 255742 - protein, 224 aa, Artificial Sequence
  derived and/or modified sequence
MPRPGSAQRWAAVAGRWGCRLLALLLLVPGPGGASEITFELPDNAKQCFYEDIAQGTKCTLEFQVITGGHYDVDCRLEDPDGKVLYKEMKKQYDSFTFTASKNGTYKFCFSNEFSTFTHKTVYFDFQVGEDPPLFPSENRVSALTQMESACVSIHEALKSVIDYQTHFRLREAQGRSRAEDLNTRVAYWSVGEALILLVVSIGQVFLLKSFFSDKRTTTTRVGS

SEQ ID NO: 255743 - DNA, 675 bp, Artificial Sequence
  derived and/or modified sequence
atgcccagacccggcagcgcccagagatgggccgccgtggccggcagatggggctgcagactgctggccctgctgctgctggtgcccggccccggcggcgccagcgagatcaccttcgagctgcccgacaacgccaagcagtgcttctacgaggacatcgcccagggcaccaagtgcaccctggagttccaggtgatcaccggcggccactacgacgtggactgcagactggaggaccccgacggcaaggtgctgtacaaggagatgaagaagcagtacgacagcttcaccttcaccgccagcaagaacggcacctacaagttctgcttcagcaacgagttcagcaccttcacccacaagaccgtgtacttcgacttccaggtgggcgaggacccccccctgttccccagcgagaacagagtgagcgccctgacccagatggagagcgcctgcgtgagcatccacgaggccctgaagagcgtgatcgactaccagacccacttcagactgagagaggcccagggcagaagcagagccgaggacctgaacaccagagtggcctactggagcgtgggcgaggccctgatcctgctggtggtgagcatcggccaggtgttcctgctgaagagcttcttcagcgacaagagaaccaccaccaccagagtgggcagctag

SEQ ID NO: 255744 - DNA, 675 bp, Artificial Sequence
  derived and/or modified sequence
atgcccagaccaggctccgcccagcgctgggcagctgtggccggtcggtgggggtgtcggctgttagcgctgctccttcttgtgccaggtccagggggcgccagcgagataactttcgagttgcccgacaacgcgaagcaatgtttttatgaggatatcgctcagggcactaagtgtacacttgagttccaggtgattaccggcgggcactacgacgtggattgcaggctggaagatcctgatggcaaggtgctctacaaggagatgaaaaagcaatacgactcgttcacctttaccgccagcaagaacgggacatacaaattctgctttagtaatgagttcagcactttcacgcacaagacagtttactttgatttccaggtgggtgaagatccacctctctttccttctgaaaaccgcgtgtctgctctaactcagatggagagtgcctgtgttagtattcacgaagcacttaaatccgtcattgattaccagacacacttccgattgagggaagcccagggccggtctcgagcagaagatctgaacaccagggtcgcgtactggagcgtgggcgaggccctcatccttcttgttgtatcaattggtcaggtgtttctgctgaaaagttttttctctgacaagcgaactacgacgacaagagtaggttcatag

SEQ ID NO: 255745 - DNA, 675 bp, Artificial Sequence
  derived and/or modified sequence
atgccccggcccggcagcgcccagcgctgggccgctgtggccggccgctggggctgccgcctgctggccctgctgctgctggtgcccggccctggaggagccagcgagatcacctttgagctgcctgacaatgccaagcagtgcttctatgaagatattgcccagggcaccaagtgcaccctggagttccaggtgatcactggaggccactatgatgtggactgccgcctggaggaccctgatggcaaggtgctgtacaaggagatgaagaagcagtatgacagcttcaccttcaccgccagcaagaatggcacctacaagttctgcttcagcaatgagttcagcaccttcacccacaagacagtgtactttgacttccaggtgggggaggaccccccactcttccccagcgagaacagagtgtctgccctgacccagatggagagcgcctgtgtgtccatccacgaggccctgaagagcgtcatcgactaccagacccacttccggctgcgggaggcccagggccgcagcagagctgaggacctgaacaccagggtggcctactggagcgtgggggaggccctgatcctgctggtggtgtccatcggccaggtgttcctgctgaagagcttcttcagtgacaagaggaccaccaccaccagggtgggcagctag

SEQ ID NO: 255746 - DNA, 675 bp, Artificial Sequence
  derived and/or modified sequence
atgccccggcccggcagcgcccagcggtgggccgccgtggccggccggtggggatgccggctcctggccctgttgctgctcgtaccgggcccaggaggagccagtgagattactttcgagcttcccgataacgccaagcagtgcttctacgaggatatcgctcagggcactaaatgtacgcttgagtttcaggtaattacaggaggccactacgacgtagactgtaggttggaagacccagatggaaaggtcctgtataaggaaatgaaaaaacaatacgacagtttcacgttcaccgcgagtaagaacggcacctacaagttctgctttagtaatgagttttctacatttacccataaaaccgtgtattttgactttcaggttggcgaagaccctcccctgttcccctccgagaacagggtgtccgccttgacacagatggaatccgcttgtgtgtctatccatgaagccctcaagtctgtgatcgactaccagacacacttccgccttcgcgaagcccagggtaggtccagggcagaggacttgaacacacgagtggcttactggagcgttggagaagcccttatactcctcgttgtttccattggacaggtgtttttgctgaagagtttcttttccgacaagagaactacaaccacaagggtgggcagctag

SEQ ID NO: 255747 - DNA, 675 bp, Artificial Sequence
  derived and/or modified sequence
atgccccgtcctggctctgctcagcgatgggccgcagtcgcaggcagatggggatgtagacttctggccctgttgctgctggttcctggcccagggggagcctcagaaattacgttcgagttacccgataacgccaagcaatgtttttacgaggacatcgcccagggtaccaagtgtactctagagttccaggtgattacaggtggtcactacgatgtcgactgtaggcttgaggatcccgatgggaaggtcttatacaaagagatgaaaaagcaatatgattcctttaccttcactgcctccaaaaacggcacctacaagttttgcttttcaaatgaattctctacattcactcacaagactgtctactttgactttcaagtgggagaagatccaccactgttcccgagtgaaaatcgggtgagcgcacttactcagatggagagcgcttgtgtctctatccatgaggcattaaaatctgtgatcgattaccaaacccacttcaggctaagggaagctcagggcaggtcgcgggctgaggacctcaatacccgggtcgcctattggagtgtcggagaggccctaatccttttagttgtgagcataggccaagtgtttctgctaaagagtttcttcagtgacaagcgtaccaccacaacaagggttggcagttag

SEQ ID NO: 255748 - DNA, 3757 bp, Artificial Sequence
  derived and/or modified sequence
cccaggctgcaacggaggcagagccaacgcctcgcgggcttccacgtacgcactccaacgcgtgttcccggagaagaacgcatccgggtcacgggagccggtgtctcaggctccgccccttcaccccccgaaaggctaatccccacttccgaccctctcaggccttttccgcttctcttttacctccccaggtccgcccgtctgcgcccctcacaggaagccggagggtcgctctgatcccgaatctcccacaggcgtgaacctgctctgctgtgtatctttgcggggtggcctgcgctgaggcctgccgcgcgcggtgagtccgcgcagacctgaccctgcgtctcgcagctcggttgaggccgccgccgccttctcgggatgccgcggccggggtccgcgcagcgctgggcggccgtcgcgggccgttgggggtgcaggctgctcgcactgctgctactggtgcctggacccggcggcgcctctgagatcaccttcgagcttcctgacaacgccaagcagtgcttctacgaggacatcgctcagggcaccaagtgcaccctggagttccaggtgattactggtggtcactatgatgtagattgtcgattagaagatcctgatggtaaagtgttatacaaagagatgaagaaacagtatgatagttttaccttcacagcctccaaaaatgggacatacaaattttgcttcagcaatgaattttctactttcacacataaaactgtatattttgattttcaagttggagaagacccacctttgtttcctagtgagaaccgagtcagtgctcttacccagatggaatctgcctgtgtttcaattcacgaagctctgaagtctgtcatcgattatcagactcatttccgtttaagagaagctcaaggccgaagccgagcagaggatctaaatacaagagtggcctattggtcagtaggagaagccctcattcttctggtggttagcatagggcaggtatttcttttgaaaagctttttctcagataaaagaaccaccacaactcgtgttggatcataactacgttttgagaattgatgcaccattgccactgtaatattgctgtcctctaattaattttaggtactgaagaacttaatattggcaacatttttaaatccttactcatacacttgttgggagggatgtacaatgcatattcccaaactgtggaaaggacacctttttttatttgtaaaggtggaaaaactttggaactcattttgggctattcatgttaaatattcaacaccaatgatctactctgttcgcagttgtttatatctactcttcgcacactaaactttggtattttgattccttttaaccatttaagactacttttcttataggtagttgatattttaaaaactttagatttaatgtctacatgtgttagggaggaagaaaattgccttttaattgttaataagaaaaccaaatgtgatgaactgtagcccaagccctattctgcactgttcagttttatggaggaaaaataaatctaccataggaatgttagttaatattgatatatcatggtaaaattgatttctcactagcttagaaaatgtcagacttttgtttttggggtttataatttaaaccagctatgctattttttcataaaggcatttgtagtacacagaaaacagtagtttcagtagtgtaaaagagtttatacaggccttaaatatcagactttgtaacaggtagaaatattacagaataatttaagacactacaatgggggcaaatgaaataggaaaatttttagtgagttacacgtactcattacattttcagtgcttttacaaggaaaaaaggtgatatgtttaattttaaaattttaattggctagctcttgcccttatatgactttaatgtctgtgagtcattcccagcttaaattaacaattgttagtattagtctcacacataagtgccatacattttatcctcatggatgtgatgcactgaaaagttagttgctctccttttttcttttttttgtcgtgcatattttatttctgtagtttctggttagctaccctaaagtgatttaaaaatttagaatgctttgtgtttcctatttggtaatcttcattgacttttctttagttaatgagtattaaatagtgcatattctgtagactatagggtttacattgtgttgcatcttataacttgtatagattgagctgattgaaataagattttgttccaagtattatctgatagaatacaagatgattcaaaattatatagatatttaaagcttttctgctgttttttttttttttaattgcaactgcttttctgccgtgcctctcttccctacccaaaagtgatgagttctgaacaagacaagactgtcatattgtagagactttggtatgtgataccatagaatactgattggatagccatcctagtcacttaccaatactgactagaagttaactcttaattctaagctatcttaaaatgcatatatatacttcttgcatggaagagcaaaacaaattcaagttgtcatgcctgataatttcagatgccaccgtatagcaaagggtgaacatgttttcaaccctttaactttttacggtgtttgaagaccagctactccttaatatttatcaatggattaagaagtttaagattttgcagatttatcaatttgggtttttgtactgaagttgtcttgcggctttgcaagtgtccctttatatttaaatttgaaagttgtaagcactgatgttaatgtgattgatcagcatgggcatatgtaaaatgtccttttctggttgcctctctatgctattgtgttcagatacttacaccataattaaacagtaagttatagacttgctgagtttggcatagatagtgcactcatttaatctgtgcctctcaaaacttcagaatattagcatattaccacaaataatttttggtgaaactattgagatattaaaatttttgaaatcactactgttacctgttatagaaaatagtgttggcttagtctagtctctgtgtaactggttacattttgatggttgtctatactcaactggatatgtgtatgtaaattagaaaatacatacctatccagacataaatgctaagtaacatttttttcttcctccaactacataatttgtagctcatcatttttccttaatcctttcctaacttgttgcagcagtttgaatttcccagatatttatgtttgaacataatggctcagaatacatatttgaacatcatagttgtatatatttttaaagtagaataaataatggaaagcaacttgatatacaagtttatactaaaatttcaactgtgtgaagatacattttaaggcattactttgctaataatctacacattcttttttctattaaataaacaaatggtttgtggttcacagctttcatccaagcttggtgataatcaattttgaaaatacagtggactgaaaagcaaatttattctttcgaagatttcatttaaatctctgtactatgcatttttgtttcagtttgtaaatgtgtaacatttatagttaaataggacaaagcaggccctatgactattgttttcaaaaaattaatatataaataattcagaggggtttttcatttacttttgaaaagaaatttctttaacaggattgcacctatcaatttcttgtagaataaaaaaaaatctttca

SEQ ID NO: 255749 - protein, 712 aa, Artificial Sequence
  derived and/or modified sequence
MATSSMSKGCFVFKPNSKKRKISLPIEDYFNKGKNEPEDSKLRFETYQLIWQQMKSENERLQEELNKNLFDNLIEFLQKSHSGFQKNSRDLGGQIKLREIPTAALVLGVNVTDHDLTFGSLTEALQNNVTPYVVSLQAKDCPDMKHFLQKLISQLMDCCVDIKSKEEESVHVTQRKTHYSMDSLSSWYMTVTQKTDPKMLSKKRTTSSQWQSPPVVVILKDMESFATKVLQDFIIISSQHLHEFPLILIFGIATSPIIIHRLLPHAVSSLLCIELFQSLSCKEHLTTVLDKLLLTTQFPFKINEKVLQVLTNIFLYHDFSVQNFIKGLQLSLLEHFYSQPLSVLCCNLPEAKRRINFLSNNQCENIRRLPSFRRYVEKQASEKQVALLTNERYLKEETQLLLENLHVYHMNYFLVLRCLHKFTSSLPKYPLGRQIRELYCTCLEKNIWDSEEYASVLQLLRMLAKDELMTILEKCFKVFKSYCENHLGSTAKRIEEFLAQFQSLDAETKEEEDASGSQPKGLQKTDLYHLQKSLLEMKELRRSKKQTKFEVLRENVVNFIDCLVREYLLPPETQPLHEVVYFSAAHALREHLNAAPRIALHTALNNPYYYLKNEALKSEEGCIPNIAPDICIAYKLHLECSRLINLVDWSEAFATVVTAAEKMDANSATSEEMNEIIHARFIRAVSELELLGFIKPTKQKTDHVARLTWGGC

SEQ ID NO: 255750 - DNA, 2139 bp, Artificial Sequence
  derived and/or modified sequence
atggctacgagtagcatgagcaaaggctgcttcgtgtttaagcctaatagcaagaagagaaaaatcagcctccctatagaggactattttaacaagggaaagaacgaacccgaagattcaaagctgagatttgaaacatatcagctcatctggcagcagatgaaatcggaaaatgagcggctgcaggaagaactgaataagaatctgttcgacaacttgatcgagtttctccagaagtcccactcagggtttcagaagaactctcgagaccttggcgggcagattaaactgagagaaatcccaacagctgcgctggtgctcggcgtcaatgtgacagaccatgatctgacatttgggagtcttacagaggctctccaaaacaatgttactccatacgttgtgagcctgcaggccaaagattgccctgatatgaagcactttctgcagaaactgatctcacagctgatggactgttgtgtcgacattaagtcaaaagaggaagagtctgtgcacgtgacacagcgtaagacccactacagcatggattcactctcatcttggtacatgaccgtgacccagaaaactgaccccaagatgctgtccaaaaagaggacaacctcctcacagtggcagtccccccccgttgtggtcatattgaaggacatggaatcgtttgccacaaaggtgttgcaagactttataattatctcctctcagcacctgcacgaatttcctctcattcttatattcggcatcgcaaccagtccaatcatcatccatcgcctgctcccccatgctgtgagctctctgctgtgtatagagctcttccaaagtctttcttgtaaagagcacctgactactgtgctggacaaactgttgcttacgacccagtttccattcaagatcaacgaaaaagtgctccaggtcctgacgaatatctttctgtaccatgacttctcggtccagaatttcatcaaaggcttgcagctgagcctgctcgagcacttttacagtcagccactctctgtactgtgttgtaatctacccgaggcaaagcggcggatcaacttcctatctaacaaccagtgcgagaatatccggagattgccatctttccggcgttacgtggagaagcaagcttctgagaagcaggtggctcttcttaccaacgagcggtatctaaaggaggagacacaactattgctggagaatcttcatgtgtatcacatgaactattttctggtgcttcgctgtttgcataagtttacctcttccctgccaaaatatcctctgggaaggcagatacgcgagctgtattgtacttgcctcgaaaaaaacatatgggattccgaagagtacgcctccgtgctgcagttactgcgcatgctcgcgaaggacgaactgatgactattctcgagaagtgtttcaaagtgttcaaaagctactgcgagaaccacctcgggagcacggccaaaaggatcgaggagttcttagctcagtttcagtcactcgacgccgaaaccaaggaagaggaagacgcctccggctctcagcctaagggactgcagaagaccgacctgtaccatctgcagaagtcccttctggagatgaaggagctgagaagatccaagaaacagaccaaatttgaagtgctgcgggagaatgttgtcaattttattgattgtctcgtccgggagtatctcctgccaccagagactcagcctctccatgaggtggtttacttctcagcagcccacgccctgcgggaacacctgaatgcggcccccagaatagcgcttcacacggccctgaataacccctactactatctcaagaacgaagcccttaaatccgaagagggctgcatcccaaatatcgcacctgatatctgcattgcgtacaagttgcacctcgagtgttctagactgattaatctagtcgattggagtgaagcttttgcaacggtagttaccgcagcggaaaaaatggatgcaaatagtgccacttctgaagagatgaacgagattatccatgcaagatttattcgggctgtgagcgagctcgagctcctgggcttcattaaacctaccaagcaaaaaacagaccacgtggctagactgacttggggaggttgctag

SEQ ID NO: 255751 - DNA, 2139 bp, Artificial Sequence
  derived and/or modified sequence
atggccaccagctccatgagcaagggctgctttgtgttcaagcccaacagcaagaagaggaagatcagcctgcccatcgaggactacttcaacaagggcaagaatgaacctgaggacagcaagctgcgctttgagacctaccagctgatctggcagcagatgaagtcagaaaatgaaaggctgcaggaggagctgaacaagaacctgtttgacaacctgattgagttcctgcagaagagccacagcggcttccagaagaacagccgggacctgggcggccagatcaagctgcgggagatccccacagctgccctggtgctgggcgtgaatgtgacagaccatgacctgaccttcggcagcctgacagaggccctgcagaacaacgtgaccccctacgtggtgtccctgcaggccaaggactgcccagacatgaagcacttcctgcagaagctgatcagccagctgatggactgctgcgtggacatcaagagcaaggaggaggagagcgtgcacgtgacccagaggaagacccactacagcatggacagcctgagctcctggtacatgacagtgacccagaagacagaccccaagatgctgagcaagaagaggaccaccagcagccagtggcagagcccccctgtggtggtgatcctgaaggacatggagagctttgccaccaaggtgctgcaggacttcatcatcatcagcagccagcacctgcacgagttccccctcatcctgatcttcggcatcgccaccagccccatcatcatccaccggctgctgccccatgctgtgagcagcctgctgtgcatcgagctgttccagagcctgagctgcaaggagcacctgaccaccgtgctggacaagctgctgctgaccacccagttccccttcaagatcaatgagaaggtgctgcaggtgctgaccaacatcttcctgtaccatgacttctctgtgcagaacttcatcaagggcctgcagctgagcctgctggagcacttctacagccagcccctgtctgtgctgtgctgcaacctgcctgaggccaagaggcgcatcaacttcctgagcaacaaccagtgtgagaacatccggcggctgcccagcttcagaagatatgtggagaagcaggccagcgagaagcaggtggccctgctgaccaatgaaagatacctgaaggaggagacccagctgctgctggagaacctgcacgtgtaccacatgaactacttcctggtgctgcgctgcctgcacaagttcaccagcagcctgcccaagtaccccctgggccggcagatccgggagctgtactgcacctgcctggagaagaacatctgggacagcgaggagtatgcctctgtgctgcagctgctgaggatgctggccaaggatgagctgatgaccatcctggagaagtgcttcaaggtgttcaagagctactgtgagaaccacctgggcagcacagccaagagaattgaggagttcctggcccagttccagagcctggatgctgagaccaaggaggaggaggatgccagcggcagccagcccaagggcctgcagaagacagacctgtaccacctgcagaagagcctgctggagatgaaggagctgcggcgcagcaagaagcagaccaagtttgaggtgctgcgggagaatgtggtgaacttcatcgactgcctggtgcgggagtacctgctgcccccagagacccagcccctgcacgaggtggtgtacttctctgctgcccacgccctgcgggagcacctgaatgctgccccccgcatcgccctgcacacagccctgaacaacccctactactacctgaagaatgaggccctgaagtctgaggagggctgcatccccaacatcgccccagacatctgcatcgcctacaagctgcacctggagtgcagccgcctcatcaacctggtggactggagcgaggcctttgccaccgtggtgacagctgctgagaagatggatgccaacagcgccaccagcgaggagatgaatgagatcatccacgcccgcttcatccgggctgtgtctgagctggagctgctgggcttcatcaagcccaccaagcagaagacagaccacgtggcccggctgacctggggcggctgctag

SEQ ID NO: 255752 - DNA, 2139 bp, Artificial Sequence
  derived and/or modified sequence
atggccaccagcagcatgagcaagggctgcttcgtgttcaagcccaacagtaagaaaaggaagataagcttacctattgaagattatttcaataaggggaagaatgagcctgaagactcaaaactccgtttcgagacttaccagttgatctggcaacagatgaaatcagagaacgagagactgcaggaagaactcaacaagaatctgttcgataacctcatagagttcttacagaagagccactcgggattccagaaaaacagcagggatttgggagggcagatcaagctgcgagagattcccacagccgccctggtcctgggggttaatgtgacagaccacgatttgacgtttgggtccctcaccgaggctctccagaacaacgtcacgccttacgtggtgtccctccaggctaaagactgcccagacatgaaacatttcctgcagaaactgattagtcaattgatggactgttgtgtggatatcaagagtaaagaggaagagagtgttcacgtcacccagaggaagactcactatagcatggactccctcagctcttggtatatgactgtaacccagaagaccgaccccaaaatgctgtcaaagaaacgaaccacatcctcccagtggcagtcccccccagtcgtggtcatcctgaaggatatggaaagcttcgcaacaaaggtactccaggacttcatcatcatatcctcgcagcacctgcatgaatttccattgatcctcatattcgggattgccacctcccccatcatcatccaccggctgctgccccatgccgtaagcagcctcctttgcatcgaactgtttcaatcgcttagctgtaaagagcatctcaccactgtattagacaaactacttctgactacgcaatttccattcaagattaatgagaaagtgctgcaggtcctgaccaacatctttttgtaccatgatttcagcgtccaaaatttcatcaaggggctccagctttcactactagagcatttttattcacagccgctgagcgtgctctgttgtaatctcccagaagccaagcggaggattaatttcctcagtaataaccagtgcgagaatatccggaggctcccttcgtttcgcagatacgtggaaaagcaggcttctgaaaaacaggtggccctgttaacgaatgaaagataccttaaagaagaaactcagctgctattggaaaatcttcacgtataccacatgaactattttctagtgctgcgctgccttcataaattcacctctagccttccgaagtatccactgggacgacaaatcagggagttgtactgcacctgtttggaaaagaatatctgggactctgaagaatacgcctccgttctgcagttgttgagaatgctcgcaaaggacgaacttatgaccatactggagaaatgttttaaagtctttaaatcctactgtgaaaaccatttagggagcaccgccaagcgcatagaggagtttttagctcagtttcagagtcttgacgctgaaacgaaggaggaagaggatgcctccggttcacagcccaagggcctccagaaaactgacctctatcacctgcagaaatccctgttggaaatgaaagagctaagacggagcaagaagcagactaagtttgaagttttgagggaaaacgtcgtcaacttcatagactgcttagtgcgggaatacctactcccccccgagacacagcccttgcatgaggtggtgtacttctcggccgcccacgccctccgggagcacctgaatgcagcgcctagaatcgcactgcacacggcgctgaacaacccgtactactatcttaagaacgaggccctgaaatccgaagagggatgcattcccaacatcgctccagacatctgcattgcatataagttacatttagaatgtagccgcctcataaatctggtggactggtcagaggccttcgcgacggtagtaaccgcagccgagaagatggacgccaactccgcaactagtgaagaaatgaatgagattatacacgctagatttatcagggccgtgtcggagctcgagctactcggcttcatcaaacccacaaaacagaaaactgaccatgtggcccgactgacctggggaggttgttag

SEQ ID NO: 255753 - DNA, 2501 bp, Artificial Sequence
  derived and/or modified sequence
gagtgcatctggaatacgcagagtcagtaagaccatggctacgtcctcgatgtctaagggttgctttgtttttaagccaaactccaaaaagagaaagatctctctgccaatagaggactattttaacaaagggaaaaatgagcctgaggacagtaagcttcgattcgaaacttatcagttgatatggcagcagatgaaatctgaaaatgagcgactacaagaggaattaaataaaaacttgtttgacaatctgattgaatttctgcaaaaatcacattctggattccagaagaattcaagagacttgggcggtcaaataaaactcagagaaattccaactgctgctcttgttcttggtgtgaatgtcacagatcatgatttgacattcggaagtctaacagaggcccttcagaataatgtcacaccatatgtagtctcattgcaagctaaagattgtccagatatgaaacattttttgcaaaagttgatctcacagttgatggactgctgtgtagatataaaatccaaagaggaggaaagtgttcacgtcacccaaagaaagacacattattcaatggattcactttccagttggtatatgactgtcacacagaagacggacccaaaaatgctaagcaaaaaaaggactacttctagccaatggcagtctcctcctgttgtcgttatcttgaaggatatggaaagctttgccacaaaagtactacaagacttcataattatcagcagtcaacatctccatgaatttccactaatactcatttttggaatagccacatctcctattatcatccaccgattgcttcctcatgcagtatcatctctattgtgcatagaactgttccaatctttgtcttgtaaggagcacctgactacggtactcgataagctacttcttacaactcagtttccctttaaaataaatgaaaaagtattacaggttctgaccaacatctttttgtatcatgatttctcagttcaaaactttataaaaggacttcagctttctctattagagcatttctattcccagcccttaagtgtcctgtgctgtaatcttccagaagccaaaagaagaataaattttttatcaaataatcaatgtgaaaacatccgacgtctaccatcttttaggaggtacgtggaaaagcaagcttcagaaaagcaagttgcgctcttgaccaatgagagatatttgaaggaggaaacacaattattactagaaaacctgcatgtttatcatatgaattacttcctggttttgagatgtcttcataagttcacctcttctcttcccaagtatccactaggtcgacagatcagagagttgtactgtacatgtttagaaaagaacatatgggattcagaggagtatgcatcagtcttgcagctgctgaggatgttggcaaaggatgaactgatgaccatacttgagaaatgtttcaaggtttttaagtcttattgtgaaaaccaccttggcagcacagctaagagaatagaggagttcctggcccagtttcagagcctcgatgcagaaaccaaagaggaagaagatgcttctgggtcacagccaaaggggcttcagaagacagacctctatcatcttcagaagtccttattggaaatgaaggagttaagaagaagtaagaagcaaaccaaatttgaagtactcagagaaaatgttgtgaacttcattgactgtctagtgagagaataccttctgcctcctgagacacagcctctccatgaggtggtgtacttcagtgctgcccatgcccttcgtgagcatttaaatgctgctccgcgaattgccctccatactgcactcaacaatccttactattatctcaagaatgaagcactgaaaagcgaagaaggctgcattccgaatatcgccccagacatctgcatagcatacaaactgcacctagagtgtagcaggctcatcaacctcgtggactggtcagaggcttttgcaacagttgtgacagctgctgaaaaaatggatgcaaattctgcaacctcagaagaaatgaatgaaattatccatgctcggtttattagagctgtttctgaactagaacttttaggatttataaaacctaccaaacagaagactgaccatgtggcaagactaacatggggaggctgctagaaagcaaataagcaaagccagaactatcacatttagcttaagagaaaaaggtgaccagtcatatttacatatattagaggagcctgttttgttgagaagataaatgtgtaacccccattgatgtttaaccagaaaagtacattgctaaccccaaacaggcatgtatcaaaacacctgtggagtactttagactccaacaaataataatgtaactaaaactgctcacacattttactgtactttccaaagtcattactaaattgtgagtaaatcattcttgaacttagagtatgtaaatgtaataaattccgttatccaggagtataaa

SEQ ID NO: 255754 - DNA, 2050 bp, Artificial Sequence
  derived and/or modified sequence
ggaatacgcagagtcagtaagaccatggctacgtcctcgatgtctaagggttgctttgtttttaagccaaactccaaaaagagaaagatctctctgccaataggcattggtcaaagagataagaggacaccccagggctctaattgaaaagagaatccaattacaccttccaaagaggactattttaacaaagggaaaaatgagcctgaggacagtaagcttcgattcgaaacttatcagttgatatggcagcagatgaaatctgaaaatgagcgactacaagaggaattaaataaaaacttgtttgacaatctgattgaatttctgcaaaaatcacattctggattccagaagaattcaagagacttgggcggtcaaataaaactcagagaaattccaactgctgctcttgttcttggtgtgaatgtcacagatcatgatttgacattcggaagtctaacagaggcccttcagaataatgtcacaccatatgtagtctcattgcaagctaaagattgtccagatatgaaacattttttgcaaaagttgatctcacagttgatggactgctgtgtagatataaaatccaaagaggaggaaagtgttcacgtcacccaaagaaagacacattattcaatggattcactttccagttggtatatgactgtcacacagaagacggacccaaaaatgctaagcaaaaaaaggactacttctagccaatggcagtctcctcctgttgtcgttatcttgaaggatatggaaagctttgccacaaaagtactacaagacttcataattatcagcagtcaacatctccatgaatttccactaatactcatttttggaatagccacatctcctattatcatccaccgattgcttcctcatgcagtatcatctctattgtgcatagaactgttccaatctttgtcttgtaaggagcacctgactacggtactcgataagctacttcttacaactcagtttccctttaaaataaatgaaaaagtattacaggttctgaccaacatctttttgtatcatgatttctcagttcaaaactttataaaaggacttcagctttctctattagagcatttctattcccagcccttaagtgtcctgtgctgtaatcttccagaagccaaaagaagaataaattttttatcaaataatcaatgtgaaaacatccgacgtctaccatcttttaggaggtacgtggaaaagcaagcttcagaaaagcaagttgcgctcttgaccaatgagagatatttgaaggaggaaacacaattattactagaaaacctgcatgtttatcatatgaattacttcctggttttgagatgtcttcataagttcacctcttctcttcccaagtatccactaggtcgacagatcagagagttgtactgtacatgtttagaaaagaacatatgggattcagaggagtatgcatcagtcttgcagctgctgaggctaggtttggccttccttgatattcagttatttggagctcaaagtggacaagagctgttgctgcccctatcctgggaagctaatccttcacatgctgctaacttgggttagatcttctgccagcagaacctcacccgtctttcccctccaagcaagtcagtgccggtgattccttggacaccagaaatgctaatcttgtctatttgaataggcctaaaggatgttggcaaaggatgaactgatgaccatacttgagaaatgtttcaaggtttttaagtcttattgtgaaaaccaccttggcagcacagctaagagaatagaggagttcctggcccagtttcagagcctcgatgcagaaaccaaagaggaagaagatgcttctgggtcacagccaaaggggcttcagaagacagacctctatcatcttcagaagtccttattggaaatgaaggagttaagaagaagtaagaagcaaaccaaatttgaagtactcagagaaaatgttgtgaacttcattgactgtctagtgagagaataccttctgcctcctgagacacagcctctccatgag

SEQ ID NO: 255755 - DNA, 2139 bp, Artificial Sequence
  derived and/or modified sequence
atggctacctctagtatgtctaaaggctgcttcgtgtttaagccaaacagtaaaaagcgcaagatcagcctgcctattgaggactattttaacaagggcaagaacgagcccgaggattcgaagctacggttcgaaacataccagttaatttggcagcaaatgaaatctgaaaacgaacgcttacaggaggagctgaacaagaatctgtttgataatctgatagagtttctccagaagagtcattccggctttcaaaaaaatagccgcgacctgggaggacagattaagcttcgagagattcctaccgcagctctagtgctaggcgtcaatgtaaccgatcacgatctaactttcggaagcctgacagaagcgctgcagaacaacgtgaccccttacgttgtgagccttcaggccaaggattgccctgatatgaaacatttcctacaaaaattgatctcacaattgatggactgctgcgttgacataaagtctaaggaagaggaatcagtgcacgtaacccagagaaagactcattattcgatggattcactgtcctcttggtatatgacagtcacccagaagaccgacccaaagatgctgtcaaaaaagaggaccacctcttcgcagtggcagagcccacccgtcgtggtgattctgaaggatatggagagttttgctaccaaagttctgcaggacttcatcataatctcatctcaacacctgcacgaattccctctgatcctgatcttcggaatagccacctcccccataatcatacaccgcctccttccccatgccgtcagctcacttctgtgcatcgaactgttccagagcctgtcatgcaaagagcacctgacaaccgtgctagataaactgttgctgaccacccagtttccctttaaaatcaatgaaaaggtgcttcaggtgttgacaaatatcttcctgtaccacgatttttcagtccagaacttcataaaagggttacagctgagtttacttgaacacttctactcacaaccattaagcgtgctgtgctgtaatttaccagaggccaaaaggaggattaactttctgagtaacaaccagtgtgagaacatacgcagactgccgtctttccgaagatacgtcgaaaagcaagcctctgaaaaacaggtcgccctcctgacgaatgaacggtacttgaaagaggaaacacagctgctcctggagaacttacacgtttatcacatgaactatttcctggtgctgagatgcctccacaagtttacctcatccctccctaaatacccattgggacgccagatcagggagttatactgcacctgtctggagaaaaatatatgggattctgaggagtacgcctccgtcctgcagctgttgcgtatgctggcaaaggacgagcttatgactattctggagaaatgcttcaaggtgttcaaatcatattgcgagaaccacttggggagcaccgccaaacgcatcgaagaatttctggcccaattccagtcacttgatgccgagactaaggaagaagaagatgcctcaggttctcaacccaagggcctacagaagactgacctgtaccacctgcaaaagagcctgttagagatgaaagagctgcgcaggagtaagaagcaaaccaagttcgaagtgttgagggaaaacgtggtaaacttcattgattgcctagtccgcgagtatcttctcccacctgagactcaaccgctgcatgaggtcgtgtacttttcggccgctcacgctttgcgcgagcacctgaatgccgctcccagaatcgcgctgcacaccgccctcaacaatccatattattatttgaagaatgaagccctcaaatccgaagaaggatgcatccccaatatcgctcctgatatctgtattgcttataagctgcatttggagtgtagtcgtttgatcaatttggtggactggagcgaagcgtttgccaccgtggtgaccgcggctgagaagatggatgccaacagcgcaacatcagaagaaatgaatgagatcatacacgctagattcattagagccgttagcgaactggagttattggggtttattaaacccaccaagcagaaaaccgatcacgttgcaaggctgacatggggagggtgctag

SEQ ID NO: 255756 - DNA, 2139 bp, Artificial Sequence
  derived and/or modified sequence
atggccaccagcagcatgagcaagggctgcttcgtgttcaagcccaacagcaagaagagaaagatcagcctgcccatcgaggactacttcaacaagggcaagaacgagcccgaggacagcaagctgagattcgagacctaccagctgatctggcagcagatgaagagcgagaacgagagactgcaggaggagctgaacaagaacctgttcgacaacctgatcgagttcctgcagaagagccacagcggcttccagaagaacagcagagacctgggcggccagatcaagctgagagagatccccaccgccgccctggtgctgggcgtgaacgtgaccgaccacgacctgaccttcggcagcctgaccgaggccctgcagaacaacgtgaccccctacgtggtgagcctgcaggccaaggactgccccgacatgaagcacttcctgcagaagctgatcagccagctgatggactgctgcgtggacatcaagagcaaggaggaggagagcgtgcacgtgacccagagaaagacccactacagcatggacagcctgagcagctggtacatgaccgtgacccagaagaccgaccccaagatgctgagcaagaagagaaccaccagcagccagtggcagagcccccccgtggtggtgatcctgaaggacatggagagcttcgccaccaaggtgctgcaggacttcatcatcatcagcagccagcacctgcacgagttccccctgatcctgatcttcggcatcgccaccagccccatcatcatccacagactgctgccccacgccgtgagcagcctgctgtgcatcgagctgttccagagcctgagctgcaaggagcacctgaccaccgtgctggacaagctgctgctgaccacccagttccccttcaagatcaacgagaaggtgctgcaggtgctgaccaacatcttcctgtaccacgacttcagcgtgcagaacttcatcaagggcctgcagctgagcctgctggagcacttctacagccagcccctgagcgtgctgtgctgcaacctgcccgaggccaagagaagaatcaacttcctgagcaacaaccagtgcgagaacatcagaagactgcccagcttcagaagatacgtggagaagcaggccagcgagaagcaggtggccctgctgaccaacgagagatacctgaaggaggagacccagctgctgctggagaacctgcacgtgtaccacatgaactacttcctggtgctgagatgcctgcacaagttcaccagcagcctgcccaagtaccccctgggcagacagatcagagagctgtactgcacctgcctggagaagaacatctgggacagcgaggagtacgccagcgtgctgcagctgctgagaatgctggccaaggacgagctgatgaccatcctggagaagtgcttcaaggtgttcaagagctactgcgagaaccacctgggcagcaccgccaagagaatcgaggagttcctggcccagttccagagcctggacgccgagaccaaggaggaggaggacgccagcggcagccagcccaagggcctgcagaagaccgacctgtaccacctgcagaagagcctgctggagatgaaggagctgagaagaagcaagaagcagaccaagttcgaggtgctgagagagaacgtggtgaacttcatcgactgcctggtgagagagtacctgctgccccccgagacccagcccctgcacgaggtggtgtacttcagcgccgcccacgccctgagagagcacctgaacgccgcccccagaatcgccctgcacaccgccctgaacaacccctactactacctgaagaacgaggccctgaagagcgaggagggctgcatccccaacatcgcccccgacatctgcatcgcctacaagctgcacctggagtgcagcagactgatcaacctggtggactggagcgaggccttcgccaccgtggtgaccgccgccgagaagatggacgccaacagcgccaccagcgaggagatgaacgagatcatccacgccagattcatcagagccgtgagcgagctggagctgctgggcttcatcaagcccaccaagcagaagaccgaccacgtggccagactgacctggggcggctgctag

SEQ ID NO: 255757 - DNA, 357 bp, Artificial Sequence
  derived and/or modified sequence
atgttccactggcaggccaccatcatgggccccaacgacagcccctaccagggcggcgtgttcttcctgaccatccacttccccaccgactaccccttcaagccccccaaggtggccttcaccaccagaatctaccaccccaacatcaacagcaacggcagcatctgcctggacatcctgagaagccagtggagccccgccctgaccatcagcaaggtgctgctgagcatctgcagcctgctgtgcgaccccaaccccgacgaccccctggtgcccgagatcgccagaatctacaagaccgacagagagaagtacaacagaatcgccagagagtggacccagaagtacgccatgtag

SEQ ID NO: 255758 - DNA, 357 bp, Artificial Sequence
  derived and/or modified sequence
atgttccactggcaagcgactataatgggcccgaatgacagcccataccagggaggggtcttctttcttactatacacttccccactgactaccctttcaaacctcctaaggtggcttttactactcgcatctaccatccgaacattaactcaaacggctccatctgcctggacatcctgcggagccagtggagtccagcactcaccataagtaaggtccttctgtctatttgttccttactttgcgatcccaacccggatgatccacttgtgccggagattgccagaatctacaaaacagatcgggaaaagtataacaggattgctagagagtggacgcaaaaatatgcgatgtag

SEQ ID NO: 255759 - DNA, 357 bp, Artificial Sequence
  derived and/or modified sequence
atgtttcattggcaggccaccatcatgggcccaaacgactcaccttatcagggcggtgtgttttttctgactatacacttccctacagactacccatttaaaccacctaaagtcgcttttacaactaggatttatcatcccaacattaactctaacgggagcatctgtctagatatcctgagaagccaatggagtcctgccctgacgattagtaaagttctactgtctatatgctccctgctttgtgaccctaatccggacgaccctctggtcccagaaatcgcccgtatatataagaccgatagagagaagtacaatcgcatcgctcgagaatggacacagaagtacgcgatgtag

SEQ ID NO: 255760 - DNA, 357 bp, Artificial Sequence
  derived and/or modified sequence
atgttccactggcaggccaccatcatgggccccaatgacagcccctaccagggcggcgtcttcttcctgaccatccacttccccacagactaccccttcaagccacccaaggtggccttcaccacccgcatctaccaccccaacatcaacagcaatggcagcatctgcctggacatcctgcggagccagtggagccctgccctgaccatcagcaaggtgctgctgagcatctgcagcctgctgtgtgaccccaacccagatgaccccctggtgcctgagatcgcccgcatctacaagacagaccgggagaagtacaaccgcatcgcccgggagtggacccagaagtatgccatgtag

SEQ ID NO: 255761 - DNA, 357 bp, Artificial Sequence
  derived and/or modified sequence
atgttccactggcaggccaccatcatgggccccaacgacagcccctatcaaggcggcgtctttttccttactatccattttccgaccgactatcctttcaagcctcccaaagtggcctttaccacacggatttaccaccctaacatcaatagcaatggttccatctgtctcgacatcctgaggtcccagtggagccccgccctcacaatttcaaaagtactgctgtccatttgctctttgctgtgcgacccgaacccggatgatcctctcgtgccagaaatcgccagaatctataagactgacagggagaagtacaatcggattgcccgggaatggactcaaaagtatgctatgtag

SEQ ID NO: 255762 - DNA, 357 bp, Artificial Sequence
  derived and/or modified sequence
atgttccactggcaggccaccatcatgggccccaacgacagcccctaccagggtggcgtattcttcttgacaatccactttcctactgactacccctttaaaccccccaaggtagccttcaccactcgcatctaccaccctaacatcaattctaatggatctatttgccttgatatcctgagatcgcagtggtcgccagctctgacaatcagtaaggtgttactgtcaatatgttcattgttgtgtgaccccaacccagatgaccccctggtccccgagatcgcccgcatctataagacagaccgcgaaaagtacaatcgtatcgctagagagtggacccaaaagtacgccatgtag

SEQ ID NO: 255763 - DNA, 357 bp, Artificial Sequence
  derived and/or modified sequence
atgttccactggcaggccacgattatgggcccaaacgactccccctaccagggaggcgtttttttcctgacaatccattttcctactgattatcctttcaagcctccgaaggtcgccttcaccacgaggatttaccacccaaacatcaatagtaacggcagcatctgcctggatatcctgcgatctcaatggtctccagctctgacaatatcgaaagtgcttctgtctatttgttcccttttgtgcgaccccaatccagatgaccccttggttcccgagatcgctcgaatctataaaaccgaccgcgagaaatataaccgtattgctcgcgagtggacacagaaatatgcgatgtag

SEQ ID NO: 255764 - DNA, 357 bp, Artificial Sequence
  derived and/or modified sequence
atgtttcactggcaggcgacaatcatggggccaaacgacagcccttatcaggggggagtcttctttctgaccattcattttccaactgattatccctttaaaccacccaaagtggcctttacaactcgaatctaccatcctaatattaatagcaatggctccatctgcctggatattctgagatcccagtggtcgcccgcactcacgatcagcaaagtgctgctgagtatctgtagcctgctgtgcgatccgaaccccgatgatcccctggttcctgaaatagcacgtatctacaaaacagacagagagaaatacaacaggattgcccgagagtggacacagaagtacgccatgtag

SEQ ID NO: 255765 - protein, 384 aa, Artificial Sequence
  derived and/or modified sequence
MEVSGHPQARRCCPEALGKLFPGLCFLCFLVTYALVGAVVFSAIEDGQVLVAADDGEFEKFLEELCRILNCSETVVEDRKQDLQGHLQKVKPQWFNRTTHWSFLSSLFFCCTVFSTVGYGYIYPVTRLGKYLCMLYALFGIPLMFLVLTDTGDILATILSTSYNRFRKFPFFTRPLLSKWCPKSLFKKKPDPKPADEAVPQIIISAEELPGPKLGTCPSRPSCSMELFERSHALEKQNTLQLPPQAMERSNSCPELVLGRLSYSIISNLDEVGQQVERLDIPLPIIALIVFAYISCAAAILPFWETQLDFENAFYFCFVTLTTIGFGDTVLEHPNFFLFFSIYIIVGMEIVFIAFKLVQNRLIDIYKNVMLFFAKGKFYHLVKK

SEQ ID NO: 255766 - DNA, 1155 bp, Artificial Sequence
  derived and/or modified sequence
atggaggtcagtggacacccacaagcccgcaggtgttgcccggaagccctcggcaagttatttccaggactctgtttcctgtgctttctcgtcacttatgcactggtcggcgcagttgtcttttccgccatagaagatggccaggttctcgttgctgcagacgacggagagtttgagaagttcctggaggaactgtgccggatcctcaattgttctgagactgtcgtcgaggatagaaagcaggatctccaggggcacctccagaaggtgaaaccacagtggtttaatcggacgactcactggtccttccttagcagcctgtttttctgttgcaccgtgttttctaccgtggggtatgggtatatataccctgtgaccaggctgggaaaatacctgtgcatgctgtatgctctttttggaattcctctcatgtttttagtgttgacggacactggagacatcctggccacgatcctctccacttcctacaaccggtttcggaaatttcccttttttacacgccccctcctgtcaaagtggtgtccaaaatccctttttaaaaagaagcctgatccaaagccagctgatgaagccgttcctcagatcatcatttccgccgaagaactccctggaccaaagttgggaacttgcccctcccggccaagctgttccatggagctgtttgagcggagtcatgctttagagaagcagaatacactgcagctgcctccgcaagctatggaacgctcaaacagttgcccagagctggttctgggacgcttgtcttatagcatcattagtaacctcgacgaagtgggccagcaagtggaaagattggatatcccgctgccaattattgcacttatcgtgttcgcctacatctcctgcgccgcagccattctgcctttctgggaaacgcaactcgattttgaaaacgctttttatttctgcttcgtaaccttaactacaattggctttggggacactgtgttggaacatccaaatttcttcttgttcttttccatctacatcattgtggggatggagatcgtctttatcgccttcaagctggtccagaacaggcttattgacatttataagaacgtgatgctattcttcgcaaaggggaagttctaccacctcgtcaaaaagtag

SEQ ID NO: 255767 - DNA, 1155 bp, Artificial Sequence
  derived and/or modified sequence
atggaggtgtctggccacccccaggcccggcgctgctgcccagaggccctgggcaagctgtttcctggcctgtgcttcctgtgcttcctggtgacctacgccctggtgggcgctgtggtgttcagcgccattgaagatggccaggtgctggtggccgcagatgatggagaatttgagaagttcctggaggagctgtgccgcatcctgaactgcagcgagaccgtggtggaggacaggaagcaggacctgcagggccacctgcagaaggtgaagccccagtggttcaacagaaccacccactggagcttcctgagcagcctcttcttctgctgcaccgtcttcagcacagtgggctacggctacatctaccctgtgacccggctgggcaagtacctgtgcatgctgtatgccctgtttggcatccccctgatgttcctggtgctgacagacacaggagacatcctggccaccatcctgagcaccagctacaaccgcttcaggaagttccccttcttcacccggcccctgctgagcaagtggtgccccaagagcctcttcaagaagaagccagaccccaagccagcagatgaggccgtgccccagatcatcatctctgctgaggagctgcccggccccaagctgggcacctgccccagccggcccagctgcagcatggagctgtttgagaggagccacgccctggagaagcagaacaccctgcagctgcccccccaggccatggagaggagcaacagctgcccagagctggtgctgggccgcctgagctacagcatcatcagcaacctggatgaggtgggccagcaggtggagcggctggacatccccctgcccatcatcgccctgattgtgtttgcctacatcagctgtgccgccgccatcctgcccttctgggagacccagctggactttgaaaatgccttctacttctgctttgtgaccctgaccaccatcggctttggagacacagtgctggagcaccccaacttcttcctgttcttcagcatctacatcatcgtgggcatggagatcgtgttcatcgccttcaagctggtgcagaaccggctgattgacatctacaagaatgtgatgctgttctttgccaagggcaagttctaccacctggtgaagaagtag

SEQ ID NO: 255768 - DNA, 1155 bp, Artificial Sequence
  derived and/or modified sequence
atggaggtgagcggccacccccaggcccggcggtgctgccccgaggctcttgggaaactcttccctggtctgtgcttcttatgtttcttggtcacctatgctttggtaggcgcggtcgttttcagcgccatcgaggatggtcaagtgctggttgctgcagatgatggcgaattcgagaagtttttagaggaactttgtaggattttaaactgcagtgaaactgtagtggaagaccggaaacaggacctgcagggacacctgcagaaggttaaaccccagtggttcaacagaactacgcattggtccttcttgtctagtctgttcttctgctgtacagtcttttccaccgtgggatacgggtatatttaccctgtcactaggctgggcaaatacctctgcatgctttatgctctctttgggatccctctcatgtttctcgtactcactgacaccggggatatattggccaccatcctaagcacttcttataaccgcttcagaaagtttcctttcttcaccaggcccctcctaagtaaatggtgtcccaaatcattgtttaagaaaaagcctgacccaaaaccagccgatgaagccgtccctcagatcatcatctccgccgaggaactcccgggcccaaagctaggcacctgtccttcaaggccctcatgctcaatggagctctttgagagaagccacgctctcgagaaacagaatactctgcagcttccacctcaggccatggaacgcagcaattcatgccccgaactcgtgcttggtcgactctcgtattcaatcatttctaatttggacgaggtgggccaacaggtcgagcgccttgacatccccctgcctattattgccctgatcgtttttgcctacatctcatgtgccgccgctatattacccttctgggagacccagttggatttcgaaaatgccttctatttctgctttgttacgttaaccacgatcggatttggagacacagtgctcgagcatcctaatttctttctgtttttctcaatttacataatagtgggcatggagattgtctttatcgcttttaaactcgtgcagaacagattgatcgatatatacaaaaatgtgatgctcttcttcgcaaagggcaagttctatcatctagtaaagaaatag

SEQ ID NO: 255769 - DNA, 1155 bp, Artificial Sequence
  derived and/or modified sequence
atggaggtctcggggcacccccaggccaggagatgctgcccagaggccctgggaaagctcttccctggcctctgcttcctctgctttctggtgacctacgccctggtgggtgctgtggtcttctctgccattgaggacggccaggtcctggtggcagcagatgatggagagtttgagaagttcttggaggagctctgcagaatcttgaactgcagtgaaacagtggtggaagacagaaaacaggatctccaggggcatctgcagaaggtgaagcctcagtggtttaacaggaccacacactggtccttcctgagctcgctctttttctgctgcacggtgttcagcaccgtgggctatggctacatctaccccgtcaccaggcttggcaagtacttgtgcatgctctatgctctctttggtatccccctgatgttcctcgttctcacggacacaggcgacatcctggcaaccatcttatctacatcttataatcggttccgaaaattccctttctttacccgccccctcctctccaagtggtgccccaaatctctcttcaagaaaaaaccggaccccaagcccgcagatgaagctgtccctcagatcatcatcagtgctgaagagcttccaggccccaaacttggcacatgtccttcacgcccaagctgcagcatggagctgtttgagagatctcatgcgctagagaaacagaacacactgcaactgcccccacaagccatggagaggagtaactcgtgtcccgaactggtgttgggaagactctcatactccatcatcagcaacctggatgaagttggacagcaggtggagaggttggacatccccctccccatcattgcccttattgtttttgcctacatttcctgtgcagctgccatcctccccttctgggagacacagttggatttcgagaatgccttctatttctgctttgtcacactcaccaccattgggtttggggatactgttttagaacaccctaacttcttcctgttcttctccatttatatcatcgttggaatggagattgtgttcattgctttcaagttggtgcaaaacaggctgattgacatatacaaaaatgttatgctattctttgcaaaagggaagttttaccaccttgttaaaaagtga

SEQ ID NO: 255770 - DNA, 1155 bp, Artificial Sequence
  derived and/or modified sequence
atggaagtgagtggccatccacaggctcggaggtgctgcccggaggctcttgggaagttgttcccagggctatgcttcctctgtttccttgtaacttacgccctcgtgggggctgtcgtgttttctgcaatagaagacggccaggtcctcgtcgccgctgacgatggcgaatttgaaaagttcctggaagagctttgtagaatcctgaactgttcagaaacagtcgtggaggacagaaagcaggaccttcagggccacttgcaaaaagtgaagcctcagtggttcaatcgcaccacccactggtcctttctttcaagcctgtttttttgttgtaccgtcttcagcactgtgggatacgggtacatctatccagttactcggttaggcaaatacctttgcatgttgtacgccctatttggaattcccctgatgttcctggtgctgaccgacactggagacatcctcgccactatactctccacaagctataataggtttaggaaattcccatttttcaccagacccttactgtccaagtggtgccccaagtctctgttcaagaaaaagcctgaccctaaacctgcagatgaagcagtgccccaaatcattatttccgccgaggagcttccgggtccaaaattaggaacttgcccatcacgaccgtcttgctctatggaactgtttgagcgctcccacgcattagaaaagcaaaacacactccagttgccaccgcaggccatggaacgctccaactcctgcccagagcttgtactgggcagactatcatatagcataatcagcaacctggatgaggtgggacagcaggtggagcgtcttgacatcccgcttcccatcatcgccttgatcgtgtttgcatatatctcatgcgccgctgccatcctgcctttttgggaaacccagcttgacttcgagaacgcattctacttctgtttcgtgactcttacaacaatcgggttcggagacacagtccttgagcaccctaacttttttctgttcttctcaatctatattatagtgggaatggagattgtatttattgcctttaaactagtgcaaaataggctcatcgacatctacaaaaatgtgatgctgttcttcgcaaaaggtaagttttaccatctggtgaagaagtag

SEQ ID NO: 255771 - DNA, 1155 bp, Artificial Sequence
  derived and/or modified sequence
atggaggtgagcggccacccccaggccagaagatgctgccccgaggccctgggcaagctgttccccggcctgtgcttcctgtgcttcctggtgacctacgccctggtgggcgccgtggtgttcagcgccatcgaggacggccaggtgctggtggccgccgacgacggcgagttcgagaagttcctggaggagctgtgcagaatcctgaactgcagcgagaccgtggtggaggacagaaagcaggacctgcagggccacctgcagaaggtgaagccccagtggttcaacagaaccacccactggagcttcctgagcagcctgttcttctgctgcaccgtgttcagcaccgtgggctacggctacatctaccccgtgaccagactgggcaagtacctgtgcatgctgtacgccctgttcggcatccccctgatgttcctggtgctgaccgacaccggcgacatcctggccaccatcctgagcaccagctacaacagattcagaaagttccccttcttcaccagacccctgctgagcaagtggtgccccaagagcctgttcaagaagaagcccgaccccaagcccgccgacgaggccgtgccccagatcatcatcagcgccgaggagctgcccggccccaagctgggcacctgccccagcagacccagctgcagcatggagctgttcgagagaagccacgccctggagaagcagaacaccctgcagctgcccccccaggccatggagagaagcaacagctgccccgagctggtgctgggcagactgagctacagcatcatcagcaacctggacgaggtgggccagcaggtggagagactggacatccccctgcccatcatcgccctgatcgtgttcgcctacatcagctgcgccgccgccatcctgcccttctgggagacccagctggacttcgagaacgccttctacttctgcttcgtgaccctgaccaccatcggcttcggcgacaccgtgctggagcaccccaacttcttcctgttcttcagcatctacatcatcgtgggcatggagatcgtgttcatcgccttcaagctggtgcagaacagactgatcgacatctacaagaacgtgatgctgttcttcgccaagggcaagttctaccacctggtgaagaagtag

SEQ ID NO: 255772 - DNA, 1380 bp, Artificial Sequence
  derived and/or modified sequence
atggccagcggcgtggaggtgctgagattccagctgcccggccacgaggccgccaccctgagaaacatgaaccagctgagagccgaggagagattctgcgacgtgaccatcgtggccgacagcctgaagttcagaggccacaaggtgatcctggccgcctgcagccccttcctgagagaccagttcctgctgaaccccagcagcgagctgcaggtgagcctgatgcacagcgccagaatcgtggccgacctgctgctgagctgctacaccggcgccctggagttcgccgtgagagacatcgtgaactacctgaccgccgccagctacctgcagatggagcacgtggtggagaagtgcagaaacgccctgagccagttcatcgagcccaagatcggcctgaaggaggacggcgtgagcgaggccagcctggtgagcagcatcagcgccaccaagagcctgctgccccccgccagaacccccaagcccgcccccaagccccccccccccccccccctgcccccccccctgctgagacccgtgaagctggagttccccctggacgaggacctggagctgaaggccgaggaggaggacgaggacgaggacgaggacgtgagcgacatctgcatcgtgaaggtggagagcgccctggaggtggcccacagactgaagccccccggcggcctgggcggcggcctgggcatcggcggcagcgtgggcggccacctgggcgagctggcccagagcagcgtgccccccagcaccgtggcccccccccagggcgtggtgaaggcctgctacagcctgagcgaggacgccgagggcgagggcctgctgctgatccccggcggcagagccagcgtgggcgccaccagcggcctggtggaggccgccgccgtggccatggccgccagaggcgccggcggcagcctgggcgccggcggcagcagaggccccctgcccggcggcttcagcggcggcaaccccctgaagaacatcaagtgcaccaagtgccccgaggtgttccagggcgtggagaagctggtgttccacatgagagcccagcacttcatcttcatgtgccccagatgcggcaagcagttcaaccacagcagcaacctgaacagacacatgaacgtgcacagaggcgtgaagagccacagctgcggcatctgcggcaagtgcttcacccagaagagcaccctgcacgaccacctgaacctgcacagcggcgccagaccctacagatgcagctactgcgacgtgagattcgcccacaagcccgccatcagaagacacctgaaggagcagcacggcaagaccaccgccgagaacgtgctggaggccagcgtggccgagatcaacgtgctgatcagatag

SEQ ID NO: 255773 - DNA, 1380 bp, Artificial Sequence
  derived and/or modified sequence
atggcgagtggggtcgaagtgctccggttccagctgccaggccacgaggcagcgactttacgtaacatgaaccagttgagggccgaagagcggttttgcgatgttacaatagtagcggattctctaaaatttagaggccacaaggttatcctagctgcctgctccccattcctgagggaccagtttctcctgaatccatcctcagagctgcaggtctccctgatgcacagcgcccgcattgtcgccgacctcctcctcagttgttacacgggcgccttggaattcgctgttagagacattgtgaactaccttactgcagcctcctaccttcagatggagcacgtagtcgagaaatgcagaaatgcgttgagccaattcatcgagccaaagattgggctgaaagaggacggtgttagtgaggcttctttggtgtcatccatatcggccacgaagagtttgctgcctcctgctcgaacacctaaacccgctccaaaaccaccgccaccaccacccttaccccccccactccttcggccagtgaaactggaattccccctcgacgaggacctggagctgaaagctgaggaggaggacgaagacgaggacgaagatgtttctgacatctgcattgttaaagtggagtctgctttggaggtcgctcatcgccttaaacctccaggtgggttgggtggcggcctggggattggggggtccgttggcggacatctgggcgaattggcacagagtagcgtgcctcccagcaccgtggcccccccccaaggggtggtgaaggcttgctattctttgtcggaggatgcagagggtgagggcctgctgcttatccccggcggacgggcatcagtgggcgccacaagtggacttgtggaggccgccgcagtagcaatggccgcaagaggcgccggcggcagcctgggcgccggaggctcgagaggacctctcccaggtggtttttctggtggtaaccccctgaagaatatcaaatgcacaaagtgccccgaagtgtttcagggcgtcgagaaattagtgttccatatgcgtgcacaacattttatctttatgtgcccccgatgtgggaaacagtttaatcacagctcaaaccttaatagacacatgaacgtccatagaggcgtgaagagccacagttgcggtatttgtggcaagtgttttacccagaagtccactctgcacgaccaccttaaccttcactctggagcccgcccatataggtgctcctactgcgatgttcgttttgcccataagcccgctatacgaagacacctgaaggaacagcatggaaaaactacagcagagaacgtcctggaagcctcagtggcagagattaatgttctgattcgctag

SEQ ID NO: 255774 - DNA, 1380 bp, Artificial Sequence
  derived and/or modified sequence
atggccagcggcgtcgaagtactgagatttcagttacctggccacgaggctgcaactctacgaaatatgaaccagctgcgcgctgaagagaggttttgtgacgtgacaatcgtggcggactcccttaaattcagaggccataaggttatcttggcagcctgcagcccctttctgcgggatcaatttctcttgaatccatcaagtgagttacaggtaagtttgatgcactcagctagaattgtagctgacctcctcctcagctgctacacaggcgccctggaatttgccgtcagagatatcgtgaattatctcactgccgctagttatctgcagatggagcatgtagtagaaaagtgcagaaatgccttgtcccaattcatcgaacccaaaatcgggctgaaggaagacggcgtaagcgaggctagcctcgttagtagtattagcgccacgaagagcctgcttcctcctgctcgcaccccaaagcctgcaccaaaaccccccccaccccctcccttgcccccgccattgcttagaccagtgaaactggaatttcctcttgatgaagacctcgaattaaaggccgaggaggaagatgaagatgaagacgaggatgtgtcagacatttgtatagtaaaggtggaatccgctctcgaggtagctcataggctaaagccaccaggcggtcttggaggaggcttggggattggaggttcggttggtggccatcttggcgagctcgctcagagttctgttcccccctctactgtcgccccacctcagggggtggtaaaagcttgctactcactgtccgaagatgcggagggagaggggctgctcctaatccccggaggacgtgcctcagttggggcaacttccggattggtcgaagccgctgccgtcgcaatggccgcacgcggcgcagggggctctcttggggccgggggaagtaggggccctctcccgggagggtttagtggagggaatcctctcaaaaatataaagtgtaccaaatgtcccgaggtgttccaaggagttgaaaagctggtcttccacatgcgtgcacagcacttcatcttcatgtgccccagatgtggaaagcagtttaaccatagtagcaacctaaaccgtcatatgaacgtacatcgaggcgtgaagtcccactcatgcggaatttgtggcaagtgtttcacccagaagtctacccttcacgaccacctcaacctccacagtggtgcacgcccctaccggtgcagctattgcgacgttaggttcgcacataagcccgccatacgcagacacctcaaagaacagcatgggaagaccacagctgagaatgttttagaggcttcggtggcggaaatcaacgtccttatacgttag

SEQ ID NO: 255775 - DNA, 1380 bp, Artificial Sequence
  derived and/or modified sequence
atggcgtcgggtgttgaggtactccgctttcagcttcccggccacgaagcagccacactccgaaacatgaatcagctcagagccgaagagaggttttgtgacgttactatcgtagcagatagcctgaaatttagaggtcacaaggtcattctcgccgcctgttcccccttcctgagggaccaattcctgctgaatccctccagtgaactacaggtgtcgctcatgcacagcgccaggatcgtagccgacttgctgttgtcatgctatacaggcgcattagagttcgctgttcgtgacattgtgaactacctgactgccgctagttatctccagatggagcacgtcgttgaaaagtgcaggaacgccttgagtcagtttatcgagcccaaaataggccttaaggaagatggcgtttctgaggccagtctggtgtcatctatatcggccaccaagtccctcctgcctcctgcccgcacacccaagcccgctcctaagccccccccccccccaccactcccaccccctttgctccggccggtgaagctggagttcccccttgacgaggatctggagctgaaagccgaggaagaggacgaagatgaagatgaagatgtctctgatatttgcatcgtgaaagtggagagcgctttagaggtcgcacaccgcctgaagcctcctggagggctggggggtggcctaggcattggtgggtcagtcggtggccacctgggggaactcgctcaatcctctgtccccccgagtactgtggcaccccctcaaggtgtcgtcaaagcctgttatagtctgtctgaagacgctgagggagaggggcttctgttgatcccgggtggtcgtgcttccgttggagcgacgagtggacttgtcgaggcagctgcagttgcgatggccgcgcgcggagcaggcgggtctctgggtgcaggtggtagtcgtgggccactcccgggaggcttttccggcgggaatcccttaaaaaacataaagtgtaccaagtgccctgaggtctttcaaggcgttgaaaaactcgtctttcatatgcgtgcacagcacttcatctttatgtgccccagatgtgggaagcagttcaatcactcatctaatctaaatagacacatgaacgtccatcgaggcgtaaaatcgcattcatgcggcatctgtggaaaatgcttcacccagaagagcactctgcatgaccatctgaaccttcacagtggagcgaggccttaccgttgttcctattgcgacgttagatttgcccataaaccggcaatcagacggcatctcaaagaacagcacgggaagaccaccgccgaaaacgtgctggaggcaagtgtggccgagattaacgtcttgatacgatag

SEQ ID NO: 255776 - DNA, 1380 bp, Artificial Sequence
  derived and/or modified sequence
atggccagcggcgtggaggtactcaggtttcagttaccaggacacgaggcggcaactctgaggaacatgaaccagctccgtgctgaagagcggttttgcgatgtcactatcgttgcagacagcttgaagttccgagggcataaagtgattttggccgcgtgctccccttttctccgtgaccagttcctgctgaatccaagtagtgagctgcaggtgtctctcatgcattcggcccggatcgttgctgatctgttgttgagttgctacacgggcgccttggaatttgcagtgagagacatcgtcaattacttgaccgctgcttcatatctccagatggaacacgtcgtggaaaagtgccgtaacgccctttcacagttcattgagcctaaaatcgggttaaaagaggacggggtgtctgaggcgtctctcgtatcatccatttccgcaacaaagtctctgctgcctccggcacgtacgccaaaacctgccccaaaacctccaccccccccaccccttcccccgccactgctgcgtccagtgaagctggagttccctcttgacgaggatctcgaattgaaggctgaggaggaggacgaggacgaagatgaagacgtgagcgatatctgtatagtcaaagtggaatcagccctcgaggttgcccaccggctgaaaccacctggaggcctgggtgggggattaggtattggcggcagcgtgggtggccatctgggggagctcgcacagtcctctgtccccccgagcacagtggcacctccacagggggtggtgaaagcgtgttattcgctttccgaagacgctgaaggggagggcctcttattaattcctggtggcagggcaagcgttggcgccacctctggtctcgtggaggccgccgccgtggctatggctgctcgcggcgccggtggttctctgggtgccgggggctcccgaggtcctctgccggggggattttccgggggaaatcctttgaagaacattaaatgcacgaagtgtcctgaagtttttcaaggagtggaaaaactggtttttcacatgagagcacagcattttattttcatgtgtccgcgctgtgggaagcagtttaaccattccagcaacctgaatcgccacatgaacgtgcaccggggcgtgaagtcccatagctgcgggatttgtgggaagtgcttcactcagaaatccaccctgcacgatcatcttaacttgcactctggcgccaggccgtatcggtgctcttactgtgacgttcggtttgcccataaaccggccatacgccggcacctgaaggaacaacatgggaagaccacagctgaaaatgtgctcgaggcatcagtggctgaaatcaacgtactgattcgttag

SEQ ID NO: 255777 - DNA, 1380 bp, Artificial Sequence
  derived and/or modified sequence
atggcctccggagtcgaagttttaagatttcagcttccaggacacgaagccgctaccctccgtaacatgaatcagctacgcgccgaagagagattttgcgacgtcacaatcgtagccgattctttgaaattcagggggcataaggtaatcctcgccgcctgttcaccattcctgcgggaccagtttctccttaacccatcaagcgagctgcaggtgtcccttatgcattctgcacgtatcgtagctgacctcttgctgtcctgctacacaggggctctggaattcgcagttcgggatattgtgaactatctgacagccgcgagctatctgcagatggaacacgtggttgagaaatgccgaaacgccctatctcaattcatcgagcccaaaatcgggctgaaagaagatggtgtaagcgaggcgtcattggtgagttccatctcagctaccaaaagcctcctgcctccagcacgcacccctaaaccggcaccaaaaccgccaccacccccccccctcccacccccattactgcgacccgtaaagctggaatttccattggacgaggacctggagcttaaggccgaggaggaggatgaggacgaagacgaggatgtcagtgacatttgtatagttaaagtagaaagcgccctcgaggtggctcaccgcctcaagccccccgggggtttaggcggtggtctgggaatcgggggatcggtagggggtcacctgggtgagctcgctcagagctctgtgccccctagcaccgtcgcacctccccaaggagttgttaaggcttgctacagcctgtcggaggacgcagaaggggagggattgctattgatcccaggtggacgggccagcgtgggggctaccagtggcttggtagaggcagctgctgtcgccatggcagctcggggagcaggtggctctctgggagcaggtggctcgcgcggaccactcccaggcggtttttcgggaggcaaccccttgaagaacattaagtgcacaaaatgccccgaggtgttccaaggtgttgagaaactggtgttccatatgagagcccaacatttcatatttatgtgcccccgttgtggaaagcaattcaaccactcttcaaacttgaaccggcatatgaacgttcatcggggcgtgaaaagccatagctgtggaatctgtggtaagtgttttactcagaaaagtaccttgcacgatcatctaaacttgcacagcggggcccggccctacaggtgttcctactgcgatgtccgatttgcacacaagcccgccatcaggcgccacctcaaggagcagcacggcaagaccacagctgagaatgtactggaggctagcgttgctgagatcaatgttctgatcagatag

SEQ ID NO: 255778 - DNA, 1380 bp, Artificial Sequence
  derived and/or modified sequence
atggccagcggcgtggaggtgctgcgcttccagctgcccggccatgaagctgccaccctgaggaacatgaaccagctgcgggcagaggagcgcttctgtgatgtgaccatcgtggccgacagcctgaagttccggggccacaaggtgatcctggccgcctgcagccccttcctgcgggaccagttcctgctgaaccccagcagcgagctgcaggtgtccctgatgcacagcgcccgcatcgtggccgacctgctgctgagctgctacaccggggccctggagtttgctgtgcgggacatcgtgaactacctgacagctgccagctacctgcagatggagcacgtggtggagaagtgcagaaatgccctgagccagttcatcgagcccaagattggcctgaaggaggatggagtgtctgaggccagcctggtgagcagcatcagcgccaccaagagcctgctgcccccagcccggacccccaagccagcccccaagcccccacctcctccacccctgcccccacccctgctgcggcctgtgaagctggagttccccctggatgaggacctggagctgaaggccgaggaggaggatgaagatgaagatgaagatgtgtctgacatctgcatcgtgaaggtggagagcgccctggaggtggcccaccggctgaagcccccaggcggcctgggcggcggcctgggcattggaggctctgtgggcggccacctgggggagctggcccagagctctgtgccccccagcacagtggccccaccccagggcgtggtgaaggcctgctacagcctgtctgaagatgctgagggggagggcctgctgctgatccctgggggccgggcctctgtgggcgccaccagcggcctggtggaggccgctgctgtggccatggccgcccggggagctgggggcagcctgggcgccggcggcagccggggccccctgcccggcggcttcagcggcggcaaccccctgaagaacatcaagtgcaccaagtgcccagaggtgttccagggcgtggagaagctggtgttccacatgagggcccagcacttcatcttcatgtgcccccgctgtgggaagcagttcaaccacagcagcaacctgaacagacacatgaatgtgcacagaggagtgaagagccacagctgtggcatctgtgggaagtgcttcacccagaagagcaccctgcatgaccacctgaacctgcacagcggggcccggccctaccgctgcagctactgtgatgtgcgctttgcccacaagccagccatcagaagacacctgaaggagcagcacggcaagaccacagcagaaaatgtgctggaggcctctgtggccgagatcaacgtgctgatcagatag

SEQ ID NO: 255779 - DNA, 1380 bp, Artificial Sequence
  derived and/or modified sequence
atggccagcggcgtggaggtgctgcggttccagctgcccggccacgaagctgccaccctccgaaatatgaaccagctaagagccgaagaacggttttgtgacgttaccattgttgcggacagtcttaagttcagaggccacaaggttatccttgctgcatgctcccccttcctaagggatcagttcttgttgaatcccagttcggagctgcaagtgagcctgatgcattctgctcgcattgttgcagacctcttgctgagttgttatacaggagctctggaatttgccgtgagggatatagttaattacctgacggctgcctcttatcttcagatggaacatgtcgtggagaaatgccgcaacgctctgtcacagtttattgaacctaagattgggctgaaggaagatggagtgtccgaggcgtcactggtcagttctatcagtgccacgaagtcccttctgccacctgcacgcacgccaaaaccagccccaaaaccacctccaccaccgcccctgcccccacccctgctgcgccctgtgaaattagagttcccactggacgaagatcttgaactgaaggcagaggaggaggacgaggacgaggatgaggatgtctccgatatctgtatcgttaaggtagaaagcgccctggaggtggcccaccggttaaagcctcccgggggtcttgggggtggactgggtatcgggggctcggtgggcgggcatcttggagagcttgcccaatctagcgtgccaccatcgaccgtggcaccaccacagggggtggttaaagcttgctacagtctgagcgaggacgcagaaggagaggggctgctactcattccgggtggcagggcttctgtgggcgcaaccagcggcttagtggaggccgccgctgttgccatggcagcgagaggagctggggggagtctgggggctggaggcagccgggggcccctgcccggaggattttccggagggaacccattaaagaacataaaatgcaccaaatgtcccgaggtatttcagggggtggaaaagctggtgtttcatatgcgggcacaacattttatatttatgtgcccacggtgcggcaagcagtttaatcactcatctaacctgaatcgccacatgaatgtgcaccgtggcgtcaaatctcactcatgtggaatatgtggaaaatgtttcacccaaaagagcaccctgcacgaccatttgaacctgcactctggagcacgcccatatcggtgcagctactgcgatgttaggtttgcgcataaacctgcgattagacgacacctgaaggaacagcacggaaaaacaactgccgagaacgtgctcgaagctagcgtcgccgagatcaatgtactgattaggtag

SEQ ID NO: 255780 - DNA, 1380 bp, Artificial Sequence
  derived and/or modified sequence
atggccagcggcgtggaggtgctgcggttccagctgcccggccacgaggctgctactttgcgaaatatgaaccagttacgggcagaagagagattttgcgacgttaccatcgtggccgacagtcttaagttccggggccacaaagtaattctggctgcatgcagcccattcctacgcgaccagtttttgctgaacccttcttccgagctgcaggtctccttgatgcactcagcacgcattgtggcagacctcctgttatcttgctatacaggtgccctcgagttcgctgtacgggatatcgtgaactacctgaccgcagcgtcctacttgcaaatggaacatgtcgtggagaagtgtagaaatgcactgagtcagttcatcgagcctaagattggcttgaaggaagatggcgttagtgaagcgtctctagtgtcaagcattagcgcaacgaagtccctgctccctcctgctcggaccccgaagcctgcacccaaacctcctccaccaccccccctgccccctcctctcctgcggccagtcaagctcgaattcccactcgacgaggacttggaactcaaagccgaagaggaagacgaggatgaagacgaagatgtatcggatatctgtattgtaaaagtcgaaagcgctctggaggtggctcacagactcaagcctcccggcggcttagggggcggcctgggaatcggcggatccgtggggggccatttaggcgagctggcccagtcctccgtcccaccttccacggttgcccctccccaaggggtggtaaaggcatgttactccctctccgaggatgcagagggcgagggcctgttgcttatccctggtgggagggcgagtgttggagcaacaagtggtctggttgaagcggccgctgtagcaatggccgcaaggggggctggagggagtctgggggccggggggtcccgggggcccctgccagggggattttccggagggaatcccttaaaaaatatcaagtgtacaaaatgtcctgaggtgttccagggggtggagaagcttgtgtttcacatgagagcccaacacttcatattcatgtgcccaaggtgtggcaaacagttcaaccactcctctaacctcaatcgccacatgaatgtgcatcggggtgtcaagtctcatagttgtggaatttgtggaaagtgttttactcaaaaaagtaccctgcatgatcatttgaatcttcacagcggagctaggccttacagatgtagctactgtgatgtgagatttgcacacaagccagccataaggaggcatcttaaagagcagcacggaaagaccaccgccgaaaatgtattagaggctagcgttgccgagattaatgtgctcattaggtag

SEQ ID NO: 255781 - DNA, 1380 bp, Artificial Sequence
  derived and/or modified sequence
atggccagcggcgtggaggtgctgcggttccagctgcccggccacgaagcagcaacactccggaatatgaatcagctacgagcagaagaacgtttctgtgatgtcaccattgtcgctgatagtctaaaatttcgtggtcataaagtcattctggccgcatgctctcccttcctccgggatcagtttcttctgaacccttcttccgagctccaggtaagtctgatgcacagtgctcgcatcgtagcagatctgctgttgagttgctacaccggagccctcgagttcgctgtgcgggatattgtcaactacctaaccgccgcctcttacctgcaaatggagcacgtggtggaaaagtgtcgaaacgctctgtcccagttcatcgagcccaaaatcggcctgaaagaggatggcgttagcgaggcaagtctcgtttcctcaatcagtgctactaagagtctcttgccacccgcacgaacacccaagcctgctccaaaacccccgcctccgccccccctaccccccccactcctgcgacctgtcaagcttgaattccccctggacgaagatctggagcttaaagctgaagaagaagacgaagacgaggatgaggatgtgagtgacatatgcatcgtgaaggtggaatccgccctagaggtggctcataggctgaagccgccaggaggactgggagggggactaggaatcggcgggagtgtgggtggacatctaggcgagctggctcagtcaagtgtcccacccagcacagttgcacccccgcaaggcgtggttaaggcctgctacagcctcagtgaagacgcagagggggaggggctcttactgatacccggaggcagggcgtccgtaggcgccacatccgggttagtggaggcagccgctgttgctatggctgctaggggggcgggaggcagcctgggggctggcggatctagaggccccctgcccgggggcttctcagggggcaaccctttaaagaatattaaatgtacgaaatgcccggaagtgtttcagggagttgagaaactggtgtttcatatgcgtgctcaacactttatctttatgtgcccccgctgtgggaagcagttcaatcattctagcaacctcaatagacacatgaatgttcataggggggtgaagtcccattcttgtgggatctgcgggaagtgcttcactcagaagtctaccctgcacgatcaccttaatctacactcaggtgccaggccttacaggtgtagctattgtgacgtgaggttcgctcacaaaccagccatacggcgccacctgaaagagcagcacggaaaaactacagcggagaacgtcttggaggcatccgtggctgaaatcaacgttttgattcggtag

SEQ ID NO: 255782 - DNA, 1380 bp, Artificial Sequence
  derived and/or modified sequence
atggccagcggcgtggaggtgctgcggttccagctgcccggccacgaagccgcaactctacgaaatatgaaccagttgcgagctgaggagaggttctgcgacgttaccatcgtcgctgattcgctcaaattcagaggccataaggttatcctggcagcttgtagtccttttctgagggaccagtttctgcttaatcccagctctgaacttcaagtgagtctcatgcattcagccaggattgtcgccgacttactgctgagttgctacactggggctctggaatttgccgttcgcgacattgtaaattatttaaccgctgcatcttacctgcagatggagcatgtggtggaaaaatgtcggaatgctttgagtcaatttatcgaacctaagattggcctgaaggaagacggcgtctcagaagcctctctcgtcagtagtatttcagctacaaagagcctactcccccctgcacgtacacccaaaccagcaccgaagccacctcctccccccccgctgccaccacccttactgagaccagtcaagttggagtttcctctagacgaggatttggagctaaaagccgaggaggaagatgaggatgaggatgaggatgtgtctgacatctgtattgtgaaggtagagtctgcacttgaggtggcccataggctcaagccgccaggcggattaggcggaggactgggaataggtggttccgtgggggggcatctgggtgaactggcacaatcatccgtccctccatcaactgtagcgccgccgcagggagtggtgaaggcttgctatagtctttccgaggacgcggagggagagggcttactgctgattcccgggggtagggcttccgtgggtgccacttccggcttggtagaagcagcagccgttgccatggccgcccggggtgctgggggctccctgggcgcaggcggctccaggggtccccttcccgggggcttttctggcggtaatccactgaaaaatataaaatgtactaaatgtcccgaagtcttccagggcgtggagaagcttgttttccatatgcgcgcccagcacttcatctttatgtgtccgcgttgtgggaagcagttcaaccactctagtaatttaaataggcacatgaacgtgcaccgaggagttaaaagccacagttgtggaatttgtgggaagtgttttactcagaaatctactctacacgaccatctgaaccttcacagtggggcacggccttaccggtgctcctattgtgatgtgaggttcgcgcacaagcccgccatcagacgccatctcaaggagcagcacggtaaaactacagccgaaaacgttctcgaggccagcgtggcggagattaacgtgcttatcaggtag

SEQ ID NO: 255783 - DNA, 1380 bp, Artificial Sequence
  derived and/or modified sequence
atggccagcggcgtggaggtgctgcggttccagctgcccggccacgaggccgccacactgaggaatatgaaccagctgagagccgaagagcgtttctgtgatgtgaccatcgtagcggacagtctcaagttccgcggtcacaaagtgatattggctgcctgtagcccgttcctgcgggaccaatttcttctgaatccgtcatcagagctccaggtttccttaatgcactctgcacgaatcgtcgccgatttactcctcagctgttacacgggcgccctggagtttgccgtgcgcgatatagttaactaccttaccgccgcatcttaccttcaaatggaacatgttgtcgaaaagtgtcgtaacgctttgtcccagttcatcgagccaaaaatcggcttgaaggaagatggcgtgagcgaggcttccctcgtgtcatctatttccgccactaagtccctcctgccaccagcaaggaccccaaagcctgcacccaagccccccccaccccccccactgcctcccccgctcctccggccagtaaaacttgagtttcccctagatgaggatctggaacttaaggccgaggaggaggacgaagatgaggacgaagacgtctcagacatttgcattgtgaaggtggagtccgcccttgaggtcgcccacaggctgaaacccccagggggtcttggtggcgggcttggcatcggcgggtccgtaggcggtcacctcggagaattggcccagtccagcgtgccgccgtcaactgttgcacctccacagggcgttgtaaaagcatgctattctctgtccgaggacgcggaaggggagggcctgctgctgattccaggaggcagagctagcgtcggtgctacttccggactcgtcgaagccgcggccgtagccatggccgcaagaggcgccgggggatctctgggtgccggggggagccgtggaccgctcccagggggcttttccggcggtaaccccctaaagaacattaagtgtaccaagtgtccagaagtgttccagggggttgaaaaactggtctttcacatgcgagcacagcactttattttcatgtgtccacgctgtggtaaacagtttaaccacagctcaaatctgaacaggcacatgaatgtccacaggggcgtgaaaagccactcgtgcggtatatgtgggaagtgcttcacccagaagagtaccctacacgaccacctcaacctccatagcggcgcccgcccctaccggtgttcttactgcgacgttagattcgcacataaaccagccatcagacggcacctcaaggagcagcacgggaaaacaactgccgaaaatgtgctggaagctagcgtcgcggagatcaacgtcctaatccgatag

SEQ ID NO: 255784 - DNA, 1380 bp, Artificial Sequence
  derived and/or modified sequence
atggccagtggcgtagaagtcctgcggttccagctgcctgggcatgaggccgcaacactgcgaaatatgaaccaactacgggcagaggagaggttttgcgacgtgaccatcgtggcagactcccttaagtttcgaggccacaaggttatccttgccgcatgtagccctttcctgagggatcaattcttactgaaccctagcagcgaacttcaggtgagtttgatgcactccgcccgaattgttgctgacctgctgctgtcatgttatactggcgctttagagtttgctgtacgagatattgtcaactacctcacagcagccagttatctccagatggaacacgtggtcgagaaatgccggaacgcactttctcaattcattgaacccaagatcgggttgaaagaggacggtgtgtccgaggcctcattagtcagctccatctctgctacaaaaagtctattgccaccggcacggacacctaaaccggctccgaaaccccctcctcctcccccacttcctccccctctactccggccagtgaagcttgagttccctctcgacgaggatcttgagctcaaggccgaggaggaggacgaagatgaagacgaggacgtgtccgatatatgcatcgtcaaagtagaaagtgccctggaggttgctcatcggctcaagccaccgggagggctcggcggtggcttgggcatcggtggatcagtagggggacacctaggggaactcgcgcagtcgagtgtgcctccgtccacagtagctcctccccagggcgtagtaaaggcatgttatagtctgtccgaggatgcagaaggagaaggtctcctgctgattccagggggtcgggcttccgtcggggcaactagcggtttagtggaagcagctgctgtggcaatggcagctcgtggcgctggaggctccctgggtgccggtgggtccaggggaccgctgccaggcggtttttctgggggtaatcctcttaagaatataaagtgcacaaaatgccctgaagtgttccagggggtggagaagcttgtttttcatatgagggcccagcacttcatatttatgtgtcccaggtgtggcaaacagttcaatcattcttcaaatctaaaccgacacatgaatgtacacagaggggtgaagagtcacagctgtgggatctgcggcaagtgtttcacacagaagtctactctgcacgatcacctaaacctgcacagcggagccagaccataccgatgttcctattgtgacgttcgctttgcccataagcccgctattcggaggcatctcaaggaacagcatgggaagaccacggcggagaatgtactcgaggcgtctgtagctgagattaatgtgctgatccggtag

SEQ ID NO: 255785 - DNA, 1380 bp, Artificial Sequence
  derived and/or modified sequence
atggccagcggagtggaggtgctgcgcttccagcttcccggacacgaagcagcaaccttacggaatatgaaccagttgagagctgaagagaggttctgtgatgtcacaatcgtggccgacagtctgaaatttcgagggcacaaagtcatcctggcggcttgttcccccttcctgcgggaccagttcctgttgaatccgagttccgagttgcaagtgagtttaatgcacagtgcgcgtattgtggccgatctcctgctgagctgctatacaggagcactggaattcgcagtgcgggacatcgtgaactacctcaccgccgcttcatatcttcagatggagcatgtcgttgaaaagtgccgaaatgctctctctcaattcatcgagcctaagattggactgaaggaggatggcgtcagtgaagcctcgcttgtgtcttctatcagtgctacaaagagtttactgcctcctgctagaacacccaagcccgctcccaagccgccaccacctcctccgttgcctccaccactgcttcggcctgtcaaactggagtttccattagacgaagatctggagcttaaagctgaggaagaagatgaggatgaagacgaggacgtgtccgacatatgcatcgttaaggtagaatccgccctggaggtggctcatcgactgaaacccccaggcggacttggagggggtctcggtattgggggaagtgtgggtggacatctgggtgaattggcccagagctcggttcccccttccaccgtagctcctccccagggggttgttaaagcctgctacagcctgtccgaagatgccgagggcgagggtcttcttttaatacccggtggaagggccagcgtgggtgcaacttctggactggtcgaggctgcggctgttgccatggcagcgagaggggcaggtgggtcacttggcgctggcggttcgcggggtcccctgcctggtggattctccggcggaaacccgctcaaaaacattaagtgtaccaagtgccccgaagtgttccagggtgtcgagaaattggtctttcacatgagggctcagcatttcatttttatgtgtccccgttgcgggaaacagtttaaccactcgtcaaatcttaaccggcacatgaatgtgcaccgtggcgtgaagtcccattcctgcggtatctgtggtaagtgcttcacccaaaaatcaactctgcacgatcaccttaacttgcacagtggggctcggccataccgatgttcctactgcgacgtgaggtttgcccacaagcccgctattaggcgccacctgaaggaacaacacggtaaaaccacagctgagaacgtgctagaggccagcgtggccgagatcaatgtgctcattaggtag

SEQ ID NO: 255786 - DNA, 1380 bp, Artificial Sequence
  derived and/or modified sequence
atggcctccggcgtagaggtgctccgctttcaattgcccggtcatgaggccgcaaccttaaggaacatgaaccagctgagagccgaggaaaggttctgtgatgtgacaatagtggcagattctttgaagttccggggacataaagtgattctggctgcttgtagccccttccttagagatcagtttctgctgaacccgagctccgagctgcaggtgtcactcatgcatagcgccagaattgtggccgaccttcttctgtcctgttatacaggcgcactggagttcgccgtcagagatatcgtcaactacctgaccgctgcatcttacctgcagatggagcatgtggtggagaagtgtcgcaacgcactttcccagtttattgagcccaaaattggccttaaagaagacggagtttccgaagcaagcttggtgtcgtctatctctgctacgaagtccctgctgccacccgcaagaacaccaaagcccgcaccaaagccccctcctcctcctccactgccacctcccctgcttcgccctgtgaagttggaattccccctggacgaagacctcgagctcaaggcagaggaggaggacgaggatgaagacgaagatgtctctgacatttgcatcgtgaaagtggagtcagcactggaagtggcacacagactgaagccccctgggggactcgggggaggactgggtattggaggatccgttggcggacatctaggggagctggcacagtcatcagttccaccgtcgaccgtggctccccctcaaggcgtcgtgaaagcctgctactcgctctccgaagatgctgaaggcgaggggctgctgttgatacccggaggaagggcctcggtcggagcaactagtgggttagtggaagctgccgctgtggccatggcggcacggggagctgggggatcattgggggctggcggtagtcggggtcctctgccaggtggatttagtggcggaaatccactgaagaatattaagtgtaccaagtgccctgaggtgtttcagggcgtcgaaaagcttgtgtttcacatgagggcacagcatttcatctttatgtgccctagatgtggcaagcagttcaaccattcgtccaacctaaacaggcatatgaatgtgcatcgaggggtgaagagccacagttgtgggatttgcgggaagtgcttcacacaaaagagcacgttacatgatcatctcaaccttcattccggggctcggccataccgatgtagctactgtgacgttcggtttgctcataagccggctatccggaggcatcttaaggagcagcacggaaaaacaaccgccgagaatgttctggaagcctctgtggccgaaattaatgttctcatcaggtag

SEQ ID NO: 255787 - DNA, 1380 bp, Artificial Sequence
  derived and/or modified sequence
atggcctcaggcgtagaagtcctgcgtttccagctacctggccatgaggccgcaactctccggaacatgaaccagttgagggcggaggagcggttttgtgacgtaactatcgtggcggactccttaaaatttcgaggacataaggtgatcctcgcggcttgcagcccgttcctacgcgaccaattccttctgaatccgtcctcggaactacaggttagccttatgcattcagcgagaatagtggctgacctgctgctgagctgctatactggcgctctagaatttgctgtgcgggacatcgttaactacctgaccgccgcttcctacctgcagatggaacatgtggtcgagaagtgtaggaatgccttatcgcagttcatcgaaccgaagattggacttaaggaggatggggtgagcgaggcgtctcttgttagttccatatcagctactaaatcactgctaccccctgcccgaaccccaaagcccgctcctaagccaccacctcctccacctctgccccctcccttgttgcggcctgtgaaactggagttccctcttgatgaagacctggaactgaaggccgaggaggaggacgaggacgaagacgaagatgtgtctgatatttgtattgtgaaggtggagtcagcattagaagtcgcgcaccgtctgaagccaccgggtggcctgggcggagggctgggtattggcggttctgtcgggggtcatttaggtgagcttgcacaatcctctgtgcccccatccacagttgcaccccctcagggtgtggtgaaggcgtgctactccctcagtgaggacgctgagggagagggcctccttctcatcccaggtggcagggccagcgtgggcgcaactagtggactggtcgaagccgctgccgttgcaatggctgctaggggtgctggaggatccctcggagcgggtggctccagaggtccacttcccggtggcttttcaggtggaaaccccttgaaaaacatcaagtgtactaaatgtccggaggtgttccagggggtcgagaagcttgtgttccatatgcgagctcagcattttatcttcatgtgcccacggtgcggcaagcagttcaatcattcatctaacctcaacagacacatgaacgtacacagaggcgtgaagtctcacagttgcggcatttgtggtaagtgcttcacgcagaaaagtaccctacacgatcacctcaatttgcatagcggggctagaccctatcgctgcagctattgcgacgtgcggtttgcccacaagcctgctatacggaggcacttgaaggagcagcatggtaagactaccgccgagaatgtactagaggcttctgttgccgagatcaatgtactcatacggtag

SEQ ID NO: 255788 - DNA, 1380 bp, Artificial Sequence
  derived and/or modified sequence
atggctagcggcgttgaagtgttgcggtttcagctgcccggtcatgaagccgctacactacgcaacatgaaccagttgcgcgcagaggagcgtttttgcgacgtgacgattgtggcggactccctcaagttccgaggtcataaagttatcctggcggcttgttctcctttcctgcgggaccagtttttactgaatccctcatcggagctccaggtttccctcatgcacagtgcccgtatcgtggcagatctactactgagttgctataccggggctctcgagtttgctgttagagatattgtgaattacctcaccgcagcttcttacctgcagatggaacatgtggtggaaaaatgcaggaatgccctgtcccaattcattgaaccgaaaattggtctcaaggaagatggcgtgagcgaggcctcactggtttcgagtatctctgctactaaaagtctgctaccccctgccaggacacctaaaccagctcccaaaccacctcctccaccgccactccccccacctctgttgaggcctgtgaagctcgagttccccctcgacgaggacctggagctgaaagccgaagaggaagacgaggacgaagatgaggacgtgtctgacatatgtattgttaaggtggagagcgcacttgaggtggctcaccgtctgaaacctcccggtgggcttggtggaggcctggggatcggaggctctgtgggaggccatctgggggaattagcccagtcctctgtacccccaagcacggtcgcgccaccccaaggagtggtcaaagcgtgttattcactgtctgaggacgcagagggcgagggattgctcctgattccgggagggagagctagcgtgggcgctacctcggggctggtggaggcagccgctgttgccatggccgcacgtggagctggcggaagcctgggcgcaggaggctcacgaggcccactgcctggtgggttctccggcggtaacccgctgaagaatattaaatgcaccaaatgccctgaagtatttcagggcgtagaaaagctggtcttccacatgcgtgcacagcactttatttttatgtgcccacggtgcggcaaacaatttaatcactcttccaacctgaatcggcacatgaacgtgcatcggggagtaaagtctcactcttgtggaatctgtgggaaatgttttactcagaagagtaccttacatgaccacttaaacctgcacagcggggctcgtccataccggtgttcatactgtgatgttaggtttgcacataaacctgccatcaggcgccacttgaaagaacagcacgggaagaccaccgctgagaatgtgctcgaagcatctgtggccgagatcaatgtgcttattagatag

SEQ ID NO: 255789 - protein, 479 aa, Artificial Sequence
  derived and/or modified sequence
MGSPAAPEGALGYVREFTRHSSDVLGNLNELRLRGILTDVTLLVGGQPLRAHKAVLIACSGFFYSIFRGRAGVGVDVLSLPGGPEARGFAPLLDFMYTSRLRLSPATAPAVLAAATYLQMEHVVQACHRFIQASYEPLGISLRPLEAEPPTPPTAPPPGSPRRSEGHPDPPTESRSCSQGPPSPASPDPKACNWKKYKYIVLNSQASQAGSLVGERSSGQPCPQARLPSGDEASSSSSSSSSSSEEGPIPGPQSRLSPTAATVQFKCGAPASTPYLLTSQAQDTSGSPSERARPLPGSEFFSCQNCEAVAGCSSGLDSLVPGDEDKPYKCQLCRSSFRYKGNLASHRTVHTGEKPYHCSICGARFNRPANLKTHSRIHSGEKPYKCETCGSRFVQVAHLRAHVLIHTGEKPYPCPTCGTRFRHLQTLKSHVRIHTGEKPYHCDPCGLHFRHKSQLRLHLRQKHGAATNTKVHYHILGGP

SEQ ID NO: 255790 - protein, 42 aa, Artificial Sequence
  derived and/or modified sequence
IHTGEKPYPCPTCGTRFRHLQTLKSHVRIHTGEKPYHEPVTS

SEQ ID NO: 255791 - DNA, 96 bp, Artificial Sequence
  derived and/or modified sequence
atgtctgagaagacaggagagcctgctgctgaaaatagagacaaggaggcctctgtggccggggcccagatcaccctgcagacccagaccccctag

SEQ ID NO: 255792 - DNA, 1440 bp, Artificial Sequence
  derived and/or modified sequence
atgggcagccctgccgcgcccgagggcgctctggggtatgtgagagagtttacaagacactccagcgatgtgctgggcaatctcaatgaactacgcctgcgtgggatcttgactgacgtgaccctattggtgggtggccaacccctgcgtgcgcacaaagcagttctcatagcatgttccgggtttttctattcaattttccgagggagagcgggagtgggagtggacgtgctgtctttgccagggggccccgaagcgcgtggcttcgcacctctactagactttatgtataccagtagactcaggctatccccagcaacagcaccggccgtgttagcagcagctacatacctccaaatggaacacgtggtgcaagcctgtcacagattcatccaagccagctatgaacctctgggcattagcctacgccccctggaagctgaaccaccaacacctcccacggctccgcctcctggcagccctaggcggtcagagggccaccctgaccctcctaccgagtcacggtcatgcagccagggtccaccaagccccgctagcccagatcccaaggcgtgtaattggaagaaatataaatacatagttctgaattcccaggcaagccaggccgggtcattggtgggcgagaggagtagcggccagccatgccctcaggcaagattaccttccggagatgaggcatccagttcttcatccagctcctcaagcagcagcgaggagggcccaatccccggaccccagagtagactaagccccactgcagcaacagttcagttcaagtgcggagcacccgccagcactccctatttgcttacctctcaggcccaggacacatccggcagccccagtgaacgcgccaggccgttgccagggagtgaattcttcagctgccagaactgcgaggccgtggcaggatgctcaagcggtcttgactcccttgtgccgggtgacgaagataagccctacaagtgccaattgtgccggagttcctttcgttataaaggcaatctggcaagtcatagaactgtccatacgggggagaagccgtaccactgctccatttgtggagcccggtttaaccggcccgctaatctcaaaacgcattccagaattcactcaggagaaaaaccatacaaatgtgagacatgtggttctagatttgtacaagtggctcatctaagggctcacgtgctgatacatacaggagaaaagccctatccatgtccaacgtgtggcacccgtttccgtcatctgcagaccctgaagagtcacgtgaggattcacaccggcgaaaaaccctaccattgtgacccctgcggcctgcatttccgacacaaatctcaactccgcttgcatcttagacaaaaacacggagcagccaccaataccaaagtccactaccacattctgggtggcccatag

SEQ ID NO: 255793 - DNA, 129 bp, Artificial Sequence
  derived and/or modified sequence
attcataccggtgaaaagccatatccctgccccacctgtggcacaaggtttcggcatttgcagacactgaaatcccacgtgcggatccacactggtgaaaagccatatcatgaaccagtgacttcctag

SEQ ID NO: 255794 - DNA, 1440 bp, Artificial Sequence
  derived and/or modified sequence
atgggcagccctgctgcccctgagggcgccctgggctacgtgcgggagttcaccaggcacagcagtgatgtgctgggcaacctgaatgagctgcggctgcggggcatcctgacagatgtgaccctgctggtgggcggccagcccctgcgggcccacaaggctgtgctgattgcctgcagcggcttcttctacagcatcttccggggccgggccggcgtgggcgtggatgtgctgagcctgcccggcggccctgaggcccggggctttgcccccctgctggacttcatgtacaccagccggctgcggctgagccctgccacagccccagctgtgctggccgccgccacctacctgcagatggagcacgtggtgcaggcctgccaccgcttcatccaggccagctatgagcccctgggcatcagcctgcggcccctggaggccgagccccccaccccacccacagcccctcctcctggcagcccccggcgctctgagggccacccagaccccccaacagagagccgcagctgcagccagggcccccccagccctgccagcccagaccccaaggcctgcaactggaagaagtacaagtacatcgtgctgaacagccaggccagccaggccggcagcctggtgggggagaggagcagcggccagccctgcccccaggcccggctgcccagcggagatgaggccagcagcagcagcagcagcagcagcagcagcagcgaggagggccccatccctggcccccagagccggctgagccccacagctgccaccgtgcagttcaagtgtggggccccagccagcaccccctacctgctgaccagccaggcccaggacaccagcggcagccccagcgagcgggcccggcccctgcccggcagcgagttcttcagctgccagaactgtgaggccgtggccggctgcagcagcggcctggacagcctggtgcctggagatgaggacaagccctacaagtgccagctgtgccgcagcagcttccgctacaagggcaacctggccagccacaggacagtgcacactggagagaagccctaccactgcagcatctgtggggcccgcttcaacagacctgccaacctgaagacccacagccgcatccacagcggggagaagccctacaagtgtgagacctgtggcagcagatttgtgcaggtggcccacctgcgggcccacgtgctgatccacactggagagaagccctacccctgccccacctgtggcacccgcttccgccacctgcagaccctgaagagccacgtgcgcatccacactggagagaagccctaccactgtgacccctgtggcctgcacttccgccacaagagccagctgcggctgcacctgcggcagaagcatggagctgccaccaacaccaaggtgcactaccacatcctgggcggcccctag

SEQ ID NO: 255795 - DNA, 129 bp, Artificial Sequence
  derived and/or modified sequence
atccacactggagagaagccctacccctgccccacctgtggcacccgcttccgccacctgcagaccctgaagagccacgtgcgcatccacactggagagaagccctaccacgagcctgtgaccagctag

SEQ ID NO: 255796 - DNA, 1440 bp, Artificial Sequence
  derived and/or modified sequence
atgggcagccccgccgcccccgagggcgccctgggctacgtgcgggagtttactcgccacagttcagatgtgctgggaaatttgaatgagctgcggttgcgcggaattcttacagatgtgaccctcctcgtcggggggcagccgctgcgggcgcacaaggcggtgttgatagcttgcagcggttttttctacagtatctttaggggaagggctggagtgggggttgacgtcctcagcctccctgggggccccgaagctagggggttcgccccattgttagactttatgtacacatcccgccttcgcctttctcctgctactgcacctgctgttcttgctgccgcaacatatctgcagatggagcacgtggtgcaagcctgtcatcggttcattcaggccagctatgaaccactcgggatctccctgaggccattggaggccgaacccccaactccccctacggctccccctccaggcagcccgcgacggtctgaaggccaccccgacccccctacagaatcaaggagttgttcacagggtccaccatctcctgcctctccagacccgaaggcatgtaattggaaaaaatacaagtacattgtgctaaacagtcaggcctcccaggctggtagtcttgttggggaacgttcctctggacagccctgccctcaggccagattgccttctggggacgaggcctcgtcgtcctcttctagctcttcctccagctcagaagagggccccatccccggaccccagagccgtctgagtccaaccgccgctaccgtgcagtttaaatgtggcgccccagcatctaccccatacctcctcacaagccaggctcaggacaccagtggttctccatccgagcgggcaaggccactccctggttccgagtttttctcttgccagaactgcgaggctgtagcaggttgctccagcggactggactccttagtacctggagacgaggacaagccttacaagtgccagctgtgtcgatccagtttccgttataaaggaaacttagcttcccaccgaacggttcatactggtgagaagccctatcactgtagtatttgtggggcccgcttcaatcgtccggctaatctgaagacccattcaaggatccactctggagagaagccatataaatgtgaaacctgtggctctcgctttgtgcaggtagcccatctgagggcacatgttctgatacacactggggaaaagccttatccatgtcccacatgtggcaccagatttaggcacttgcagacgctgaaaagccatgtccgcattcacacaggcgaaaagccatatcactgcgacccctgcgggcttcatttcaggcacaagtcccaactgcggttgcatttgcgccagaagcacggggccgccacaaacactaaggtgcactaccatattctgggtgggccctag

SEQ ID NO: 255797 - DNA, 129 bp, Artificial Sequence
  derived and/or modified sequence
atccacaccggcgagaagccctacccctgccccacctgcggcaccagattccgccacctgcagacattaaagagtcatgtgcgtatccacacgggcgagaagccctatcacgagcctgttacctcatag

SEQ ID NO: 255798 - DNA, 1440 bp, Artificial Sequence
  derived and/or modified sequence
atgggctccccagccgcaccagagggagcacttggttatgttagagagtttacacgtcactcatccgatgtcttggggaacctgaatgaattgaggctgcgaggaattttgacggatgtgactcttctcgttggcggacaacctctgcgcgctcataaagccgtgttaatcgcctgttccggatttttctatagtatcttccgaggccgagcaggggtgggggtcgatgtcttgtccctgcccggagggccagaggcgagaggcttcgccccattgctcgacttcatgtatacctcaaggctgcgccttagtcccgcaaccgcgcctgctgtgcttgcagcggctacgtaccttcagatggagcatgtcgtgcaggcttgtcacaggttcatacaggcttcctatgaaccccttgggatttcactgaggccactcgaagcagagccaccgaccccacccacagcccctcctccagggtcaccccgtcgctccgaagggcatccagaccctcccaccgagtcccgcagctgtagccagggccctccatccccagctagtcctgatcccaaagcctgcaattggaagaagtacaagtacattgtccttaatagccaggccagccaggccggatcactggttggggaaagatcaagcggccagccttgccctcaagcaaggctaccatctggagacgaggcttctagcagtagcagtagttcaagtagctcctcggaagagggaccgatcccaggaccacagtcccgcttgtcgcccactgctgctactgttcaattcaagtgtggggctcccgcatccaccccatatctcctgacaagtcaagcgcaggacacctcaggaagccccagcgagcgtgccagacctctgcctggcagcgaattctttagttgccaaaactgcgaggccgtggccggatgttcctccgggttggattcgctggtcccgggtgatgaagacaagccctacaaatgtcagctgtgtagaagctcctttcgctataaaggtaaccttgcatctcatcggactgtccacacaggggaaaagccttaccactgcagtatttgcggagccaggttcaatcggcctgctaatctgaagactcacagtcggatccattccggagaaaaaccctacaaatgtgaaacttgcggtagtcgctttgtacaagtggcccatcttcgagctcatgtgttgattcacacaggggagaaaccctacccatgtccaacctgcggcacacgcttccggcatctgcaaacccttaaatcacacgtgcggatccacacgggtgagaagccgtaccactgtgatccatgcggccttcacttccggcacaagtctcagttgagactgcacctgcggcagaaacatggcgctgccacaaataccaaggtacattatcacatcctcggtggaccctag

SEQ ID NO: 255799 - DNA, 129 bp, Artificial Sequence
  derived and/or modified sequence
attcacacgggagagaaaccatacccctgtccgacctgcggtactcgcttcagacatctccagacgttgaagtctcatgtccggatccacactggagagaaaccatatcacgaacccgtcactagctag

SEQ ID NO: 255800 - DNA, 3525 bp, Artificial Sequence
  derived and/or modified sequence
gagaccccgccccccttaagaagagaagccgcggcccctgcaggacgggggcctgtgtcgctatgggttcccccgccgccccggagggagcgctgggctacgtccgcgagttcactcgccactcctccgacgtgctgggcaacctcaacgagctgcgcctgcgcgggatcctcactgacgtcacgctgctggttggcgggcaacccctcagagcacacaaggcagttctcatcgcctgcagtggcttcttctattcaattttccggggccgtgcgggagtcggggtggacgtgctctctctgcccgggggtcccgaagcgagaggcttcgcccctctattggacttcatgtacacttcgcgcctgcgcctctctccagccactgcaccagcagtcctagcggccgccacctatttgcagatggagcacgtggtccaggcatgccaccgcttcatccaggccagctatgaacctctgggcatctccctgcgccccctggaagcagaacccccaacacccccaacggcccctccaccaggtagtcccaggcgctccgaaggacacccagacccacctactgaatctcgaagctgcagtcaaggcccccccagtccagccagccctgaccccaaggcctgcaactggaaaaagtacaagtacatcgtgctaaactctcaggcctcccaagcagggagcctggtcggggagagaagttctggtcaaccttgcccccaagccaggctccccagtggagacgaggcctccagcagcagcagcagcagcagcagcagcagtgaagaaggacccattcctggtccccagagcaggctctctccaactgctgccactgtgcagttcaaatgtggggctccagccagtaccccctacctcctcacatcccaggctcaagacacctctggatcaccctctgaacgggctcgtccactaccgggaagtgaatttttcagctgccagaactgtgaggctgtggcagggtgctcatcggggctggactccttggttcctggggacgaagacaaaccctataagtgtcagctgtgccggtcttcgttccgctacaagggcaaccttgccagtcatcgtacagtgcacacaggggaaaagccttaccactgctcaatctgcggagcccgttttaaccggccagcaaacctgaaaacgcacagccgcatccattcgggagagaagccgtataagtgtgagacgtgcggctcgcgctttgtacaggtggcacatctgcgggcgcacgtgctgatccacaccggggagaagccctacccttgccctacctgcggaacccgcttccgccacctgcagaccctcaagagccacgttcgcatccacaccggagagaagccttaccactgcgacccctgtggcctgcatttccggcacaagagtcaactgcggctgcatctgcgccagaaacacggagctgctaccaacaccaaagtgcactaccacattctcggggggccctagctgagcgcaggcccaggccccacttgcttcctgcgggtgggaaagctgcaggcccaggccttgcttccctatcaggcttgggcataggggtgtgccaggccactttggtatcagaaattgccaccctcttaatttctcactggggagagcaggggtggcagatcctggctagatctgcctctgttttgctggtcaaaacctcttccccacaagccagattgtttctgaggagagagctagctaggggctgggaaaggggagagattggagtcctggtctccctaagggaatagccctccacctgtggcccccattgcattcagtttatctgtaaatataatttattgaggcctttgggtggcaccggggccttcattcgattgcatttcccactcccctcttccacaagtgtgattaaaagtgaccagaaacacagaaggtgagatcacagctctgctggcagagattactagcccttggctctctcgtttggcttgggtattttatattatttctgtcataacttttatctttagaattgttctttctcctgtttgtttgcttgttagtttgtttaaaatggaaaaaggggttctctgtgttctgcccctgtaattctaggtctggaacctttatttgttctagggcagctctgggaacatgcgggattgtggaattgggtcaggaaccctctctggtattctggatgttgtaggttctctagcagtctagaaatggatacagacatttctctgttcttcaagggtgataggaaccattatgttgagcccaaaatggaagtaataataaatgcctcctggaggctgtgggtgtgggggattctgtatctggattccgtatcactccaagtggaggctggcaggtttttctgcaagatggtccagaatctaaaatgtcccattaatctggtcacttgggtttggctctgctgtatccatctatagtggtagagacccaccagggctcaagtggagtccatcatcctcccacgggggcctgttcttagcactgagttgatcgctccatgggggagagatcagacattccttatcagagatgatgtgaccttttctgactctgcccagtctctatgaatgttatggcctagggaagaatcatgaaactctttagcttgattagatggtaaacagtgttaacccatcctttactacagaggcatatgggtttgaatgttacctggggttctctctattgagttgagccccttcttcctttagtgggttttggacatcttctggcaagtgtccagatgccagaaccttcttttcctctagaagggatggtgcttggtaaccttaccttttaaaagctgggtctgtgacctggtcttcccatccctgcattcctgtctggaaccagtgaatgcattagaaccttccataggaaaagaaaaggggctgagttccattctgggtttgctgtagtttggttgggattattgttggcattacagatgtaaaagattgactagcccataggccaaaggcctgttctagttgaccaagtttcaagtaggattaagaggttggttgaggggtgcagtttctggtgtaggccaggtaggtagaaagtgaggaacagggttgcctcttggctgggtggagtctctgaaatgttagaagaagcgctgaagccttgattgatagttctgccccttgttgccctggggcttatctgattatgggacgagggtagaaagtaagaagcacttttgaatttgtggggtagaacttcaacaataagtcagttctagtggctgtcgcctggggactagtgagaaagctactcttctccctcttccctctttctccccatggccccactgcagaattaaagaaggaagaagggaaggcggaggagtctataagaaggaatcatgatttctatttagcagattggatgggcaggtggagaatgcctgggggtagaaatgttagatcttgcaacatcagatccttggaataaagaagcctctctgtgc

SEQ ID NO: 255801 - DNA, 475 bp, Artificial Sequence
  derived and/or modified sequence
tgctcatcggggctggactccttggttcctggggacgaagacaaaccctataagtgtcagctgtgccggtcttcgttccgctacaagggcaaccttgccagtcatcgtacagtgcacacaggggaaaagccttaccactgctcaatctgcggagcccgttttaaccggccagcaaacctgaaaacgcacagccgcatccattcgggagagaagccgtataagtgtgagacgtgcggctcgcgctttgtacaggtggcacatctgcgggcgcacgtgctgatccacaccggggagaagccctacccttgccctacctgcggaacccgcttccgccacctgcagaccctcaagagccacgttcgcatccacaccggagagaagccttaccacgaaccagtgacttcatgaagtttctccggagccacctgcatcctgctgctctgaagtcacttcctgcctgaggtgtggaggctgc

SEQ ID NO: 255802 - DNA, 1440 bp, Artificial Sequence
  derived and/or modified sequence
atgggcagccccgccgcccccgagggcgccctgggctacgtgagagagttcaccagacacagcagcgacgtgctgggcaacctgaacgagctgagactgagaggcatcctgaccgacgtgaccctgctggtgggcggccagcccctgagagcccacaaggccgtgctgatcgcctgcagcggcttcttctacagcatcttcagaggcagagccggcgtgggcgtggacgtgctgagcctgcccggcggccccgaggccagaggcttcgcccccctgctggacttcatgtacaccagcagactgagactgagccccgccaccgcccccgccgtgctggccgccgccacctacctgcagatggagcacgtggtgcaggcctgccacagattcatccaggccagctacgagcccctgggcatcagcctgagacccctggaggccgagccccccaccccccccaccgcccccccccccggcagccccagaagaagcgagggccaccccgacccccccaccgagagcagaagctgcagccagggcccccccagccccgccagccccgaccccaaggcctgcaactggaagaagtacaagtacatcgtgctgaacagccaggccagccaggccggcagcctggtgggcgagagaagcagcggccagccctgcccccaggccagactgcccagcggcgacgaggccagcagcagcagcagcagcagcagcagcagcagcgaggagggccccatccccggcccccagagcagactgagccccaccgccgccaccgtgcagttcaagtgcggcgcccccgccagcaccccctacctgctgaccagccaggcccaggacaccagcggcagccccagcgagagagccagacccctgcccggcagcgagttcttcagctgccagaactgcgaggccgtggccggctgcagcagcggcctggacagcctggtgcccggcgacgaggacaagccctacaagtgccagctgtgcagaagcagcttcagatacaagggcaacctggccagccacagaaccgtgcacaccggcgagaagccctaccactgcagcatctgcggcgccagattcaacagacccgccaacctgaagacccacagcagaatccacagcggcgagaagccctacaagtgcgagacctgcggcagcagattcgtgcaggtggcccacctgagagcccacgtgctgatccacaccggcgagaagccctacccctgccccacctgcggcaccagattcagacacctgcagaccctgaagagccacgtgagaatccacaccggcgagaagccctaccactgcgacccctgcggcctgcacttcagacacaagagccagctgagactgcacctgagacagaagcacggcgccgccaccaacaccaaggtgcactaccacatcctgggcggcccctag

SEQ ID NO: 255803 - DNA, 129 bp, Artificial Sequence
  derived and/or modified sequence
atccacaccggcgagaagccctacccctgccccacctgcggcaccagattcagacacctgcagaccctgaagagccacgtgagaatccacaccggcgagaagccctaccacgagcccgtgaccagctag

SEQ ID NO: 255804 - protein, 491 aa, Artificial Sequence
  derived and/or modified sequence
MAIPKHSLSPVPWEEDSFLQVKVEEEEEASLSQGGESSHDHIAHSEAARLRFRHFRYEEASGPHEALAHLRALCCQWLQPEAHSKEQILELLVLEQFLGALPPEIQAWVGAQSPKSGEEAAVLVEDLTQVLDKRGWDPGAEPTEASCKQSDLGESEPSNVTETLMGGVSLGPAFVKACEPEGSSERSGLSGEIWTKSVTQQIHFKKTSGPYKDVPTDQRGRESGASRNSSSAWPNLTSQEKPPSEDKFDLVDAYGTEPPYTYSGKRSSKCRECRKMFQSASALEAHQKTHSRKTPYACSECGKAFSRSTHLAQHQVVHTGAKPHECKECGKAFSRVTHLTQHQRIHTGEKPYKCGECGKTFSRSTHLTQHQRVHTGERPYECDACGKAFSQSTHLTQHQRIHTGEKPYKCDACGRAFSDCSALIRHLRIHSGEKPYQCKVCPKAFAQSSSLIEHQRIHTGEKPYKCSDCGKAFSRSSALMVHLRIHITVLQ

SEQ ID NO: 255805 - DNA, 1476 bp, Artificial Sequence
  derived and/or modified sequence
atggccatccccaagcacagcctgagccccgtgccctgggaggaggacagcttcctgcaggtgaaggtggaggaggaggaggaggccagcctgagccagggcggcgagagcagccacgaccacatcgcccacagcgaggccgccagactgagattcagacacttcagatacgaggaggccagcggcccccacgaggccctggcccacctgagagccctgtgctgccagtggctgcagcccgaggcccacagcaaggagcagatcctggagctgctggtgctggagcagttcctgggcgccctgccccccgagatccaggcctgggtgggcgcccagagccccaagagcggcgaggaggccgccgtgctggtggaggacctgacccaggtgctggacaagagaggctgggaccccggcgccgagcccaccgaggccagctgcaagcagagcgacctgggcgagagcgagcccagcaacgtgaccgagaccctgatgggcggcgtgagcctgggccccgccttcgtgaaggcctgcgagcccgagggcagcagcgagagaagcggcctgagcggcgagatctggaccaagagcgtgacccagcagatccacttcaagaagaccagcggcccctacaaggacgtgcccaccgaccagagaggcagagagagcggcgccagcagaaacagcagcagcgcctggcccaacctgaccagccaggagaagccccccagcgaggacaagttcgacctggtggacgcctacggcaccgagcccccctacacctacagcggcaagagaagcagcaagtgcagagagtgcagaaagatgttccagagcgccagcgccctggaggcccaccagaagacccacagcagaaagaccccctacgcctgcagcgagtgcggcaaggccttcagcagaagcacccacctggcccagcaccaggtggtgcacaccggcgccaagccccacgagtgcaaggagtgcggcaaggccttcagcagagtgacccacctgacccagcaccagagaatccacaccggcgagaagccctacaagtgcggcgagtgcggcaagaccttcagcagaagcacccacctgacccagcaccagagagtgcacaccggcgagagaccctacgagtgcgacgcctgcggcaaggccttcagccagagcacccacctgacccagcaccagagaatccacaccggcgagaagccctacaagtgcgacgcctgcggcagagccttcagcgactgcagcgccctgatcagacacctgagaatccacagcggcgagaagccctaccagtgcaaggtgtgccccaaggccttcgcccagagcagcagcctgatcgagcaccagagaatccacaccggcgagaagccctacaagtgcagcgactgcggcaaggccttcagcagaagcagcgccctgatggtgcacctgagaatccacatcaccgtgctgcagtag

SEQ ID NO: 255806 - DNA, 1476 bp, Artificial Sequence
  derived and/or modified sequence
atggccattccaaagcactctctgtctcccgtgccctgggaggaggattcttttctgcaagtgaaggtggaggaggaggaggaagcttcattgtctcagggtggggagagttcacatgatcacatcgcgcacagcgaggcagccagattgcggttcaggcacttcaggtatgaggaggccagcggaccccatgaagcccttgcacatttacgtgcactgtgttgtcaatggctgcagcccgaagctcactctaaggagcaaattctcgagttgctagttctagagcagtttctgggagctctgccgcccgaaatccaagcatgggtcggggctcagagcccaaagagcggcgaggaagcagctgtgttggtcgaggatcttacgcaggtactggacaaacgagggtgggatccaggggcggagcccaccgaagcgtcatgcaagcagagcgatctcggagagtcagagcctagtaatgtgactgagaccttgatggggggggtgtctctaggacccgcctttgtaaaagcctgtgaaccagagggtagctccgagagatctggactctctggcgaaatttggacaaaatcggtcactcagcagattcactttaaaaaaacttctggcccttataaggacgtccccacagaccagagggggcgggaatcgggagcttcccggaatagttcctcagcgtggcccaacctcacttctcaggaaaagcccccctctgaggataaattcgatttggtggacgcttacggcacagagcctccttatacctattccggaaagcgatcgagtaagtgtcgagagtgtcgcaagatgttccagtcagcttctgcgctggaggcccaccagaaaacacactcaaggaaaactccgtacgcctgctccgagtgtggaaaggcattctccagaagcacacaccttgcccaacatcaggtcgtgcacacaggcgccaagcctcacgagtgcaaggagtgcgggaaagcttttagccgcgttacacaccttacgcagcaccagagaatacacacaggggagaaaccgtacaagtgcggagaatgcgggaagacctttagcagaagcacccatctaacccagcaccagagggtgcatacgggcgaaaggccatatgaatgtgatgcttgtggcaaggcatttagccagagtacccatcttacccagcaccagcggattcatacaggcgagaagccatacaagtgtgacgcttgcgggagagcgttctcggactgttctgccctgattaggcatctacgtatccacagtggggaaaaaccgtatcagtgtaaagtgtgtccgaaagcattcgctcagagttccagtttaattgagcaccagaggatccacactggcgagaagccttataaatgttcagactgcgggaaggccttttcaagatcgtccgcactcatggtgcatctccggatacacattacggtgctgcagtag

SEQ ID NO: 255807 - DNA, 1476 bp, Artificial Sequence
  derived and/or modified sequence
atggccatccccaagcacagcctgagccctgtgccctgggaggaggacagcttcctgcaggtgaaggtggaggaggaggaggaggccagcctgagccagggcggggagagcagccatgaccacatcgcccacagcgaggccgcccggctgcgcttccgccacttccgctatgaggaggccagcggcccccatgaggccctggcccacctgcgggccctgtgctgccagtggctgcagcctgaggcccacagcaaggagcagatcctggagctgctggtgctggagcagttcctgggcgccctgcccccagagatccaggcctgggtgggcgcccagagccccaagagcggggaggaggccgctgtgctggtggaggacctgacccaggtgctggacaagaggggctgggaccccggggctgagcccacagaggccagctgcaagcagagcgacctgggggagagcgagcccagcaatgtgacagagaccctgatgggcggcgtgtccctgggccctgcctttgtgaaggcctgtgagcctgagggcagcagcgagaggagcggcctgagcggggagatctggaccaagtctgtgacccagcagatccacttcaagaagaccagcggcccctacaaggatgtgcccacagaccagaggggccgggagagcggggccagcaggaacagcagcagcgcctggcccaacctgaccagccaggagaagccacccagcgaggacaagtttgacctggtggatgcctacggcacagagcccccctacacctacagcggcaagaggagcagcaaatgtcgggagtgcaggaagatgttccagagcgccagcgccctggaggcccaccagaagacccacagcaggaagaccccctatgcctgcagtgaatgtgggaaggccttcagccgcagcacccacctggcccagcaccaggtggtgcacactggagccaagccccatgagtgcaaggaatgtgggaaggccttcagccgggtgacccacctgacccagcaccagaggatccacactggagagaagccctacaagtgtggggagtgtgggaagaccttcagccgcagcacccacctgacccagcaccagagggtgcacactggagagcggccctatgaatgtgatgcctgtgggaaggccttcagccagagcacccacctgacccagcaccagaggatccacactggagagaagccctacaagtgtgatgcctgtggccgggccttcagtgactgcagcgccctgatccgccacctgcgcatccacagcggggagaagccctaccagtgcaaggtgtgccccaaggcctttgcccagagcagcagcctcatcgagcaccagaggatccacactggagagaagccctacaagtgcagcgactgtgggaaggccttcagccgcagcagcgccctgatggtgcacctgcgcatccacatcaccgtgctgcagtag

SEQ ID NO: 255808 - DNA, 1476 bp, Artificial Sequence
  derived and/or modified sequence
atggccatccccaagcacagcctgagccccgtgccctgggaggaggattcctttctacaggtcaaggtggaggaggaggaggaggcctccctgagccaggggggagagtcctcccatgatcacattgcgcactctgaggctgcccggctccgatttaggcactttcggtacgaggaggcttctgggccgcacgaggcccttgcccatctgcgcgcactgtgctgccagtggctacagccagaggcacattcgaaggagcaaattctcgaattgctcgtgttagagcaattcctcggggcacttcccccagaaattcaggcctgggtgggagcccagtcacccaagtctggagaggaggctgccgtattggtggaggacctaacacaggtccttgataaaaggggatgggatccaggagccgagccaaccgaagcatcatgtaaacagagtgacttgggcgaatctgagcctagcaatgttaccgaaacacttatgggtggcgtgagcctgggtcctgctttcgttaaggcgtgcgagcctgaaggatcctcagaacgttcgggcttaagcggagagatctggaccaaaagcgtgacccaacagatccatttcaaaaaaacgtctggcccctacaaggatgtgcctaccgatcaaagggggagggagtctggagccagccgaaattcttccagtgcatggcctaaccttacctctcaagaaaagccgccatctgaggacaaattcgacctcgtggacgcctatggcactgagccaccttatacatatagcggcaaacgctcttccaagtgccgggaatgcaggaagatgtttcaaagcgccagtgcgttggaggcccaccaaaaaactcacagccgaaaaactccatatgcttgtagcgagtgcggcaaggcattctcgcgctccactcacctcgctcagcatcaagtcgtgcataccggcgctaagccccacgaatgcaaagaatgtggaaaagcattctctcgggtgacgcacctgacccagcaccagaggattcatacgggagagaaaccatataaatgcggggagtgcggcaagacgttctcccggtccactcacttaactcagcatcaacgggtgcacacaggcgaacgtccgtacgaatgtgatgcctgtgggaaggcctttagccagagcacccacctaactcagcatcagagaatacatacgggcgaaaagccctacaagtgcgacgcatgcggccgcgccttttcagattgtagcgccctcataaggcacctgcgcattcattctggggagaaaccctaccagtgcaaggtgtgccctaaggcctttgctcagagcagtagcctgattgagcatcagcgcattcacaccggggagaaaccttacaaatgctccgattgtggcaaggctttcagcaggtccagcgctctgatggtgcacttgcggatccacattacagtccttcagtag

SEQ ID NO: 255809 - DNA, 1476 bp, Artificial Sequence
  derived and/or modified sequence
atggccattccaaagcactcactgtcccccgtcccctgggaagaggatagttttctgcaggttaaggtcgaggaagaggaagaggcttcgctatctcagggcggagagtcttcccatgaccacatcgctcacagcgaagcagctcgattgagatttaggcattttaggtacgaggaggcctccggcccacacgaggccctggcccatttgagagctctttgttgtcaatggctgcaacctgaagcgcacagcaaagagcaaatcctggaactcctcgtccttgagcagttcttgggcgcactgcctccagagattcaggcctgggtcggagcccagagtcccaagtctggagaggaggcagctgtgctggtcgaagacctgacccaggtcttggacaagcgtggctgggacccaggcgctgagccgacggaagccagctgcaagcagtcagacctgggagaatccgaaccttccaatgtaaccgagactctgatgggtggcgtgagcctggggccagcatttgtcaaagcatgtgaaccagaaggcagctctgaacgctccggcctgtccggcgaaatctggaccaagagcgtaactcagcagatacacttcaaaaagaccagcggcccttacaaggatgtcccaacagatcaacgcggacgggaaagcggggctagcaggaactcttcatctgcctggcctaatttaactagccaggaaaagccaccttccgaggacaaatttgatctggttgacgcctatggaactgagcccccttacacatacagcggcaagcggagctctaaatgccgggagtgtagaaaaatgttccagagtgctagcgctcttgaggcccatcagaaaactcacagccggaaaaccccctacgcatgcagtgaatgtgggaaggcatttagccgcagcacacacctggctcaacatcaagtcgtccacacaggggctaagccacatgagtgcaaagaatgcggcaaagcgttcagccgggtcactcatctgactcagcaccaacgtatccatacgggagagaagccttacaaatgtggcgaatgcggcaaaactttctcccgttcaacccacctcactcaacaccagagggttcataccggggagaggccctacgaatgtgacgcctgcggcaaggcttttagtcagtccactcacctgacccaacatcagaggattcacacgggcgagaagccctacaaatgtgacgcttgcggcagagccttctcagactgcagcgctctcattaggcaccttaggatacattccggcgaaaagccctaccagtgcaaagtgtgtcccaaggcatttgcccaaagttctagcttgatcgagcaccagagaattcataccggtgaaaagccttacaagtgtagcgactgcggaaaggcattttcccgcagctccgcactgatggtccatctaagaatacacataacggttctacagtag

SEQ ID NO: 255810 - DNA, 4643 bp, Artificial Sequence
  derived and/or modified sequence
gaggtgtgctgggagctgtggtccgggtcggcgggcgcgcaagttggctagtctctgcggccacctccggaagggtccgccggctgtgctggtgaggcccagttccaaggctccggcatcctgtgtctcactgagcactgctgcccgatggccatccccaagcactccctgagcccagtgccgtgggaagaggacagcttccttcaagtgaaggtggaggaggaagaggaagccagcctctcccagggcggagaatccagccatgaccacattgctcactctgaggctgcacgcctgcgcttccggcacttccgctatgaggaggcatctggtccacacgaggccctggcccacctccgagcgctgtgctgtcagtggctgcagcccgaggcgcactccaaggagcagatactggagctgctggtgctggagcagttcctgggtgcgctgcccccagagatccaagcctgggtgggagcccagagtcccaagagcggagaggaagccgctgtgctggtggaggatctgactcaggtgctggacaagagaggatgggatccaggagccgagcccacagaggcaagctgcaagcagagtgacctgggagagtcagagccatcaaatgtcactgagaccctcatgggaggtgtttcccttggacccgcctttgtcaaggcatgtgaacctgagggcagctcagagaggtctggactatcaggggagatctggacaaagtctgtcacccaacagatccacttcaagaaaacttcagggccttacaaggatgtccccacagaccagcgtggccgtgaatctggtgcctcgaggaacagttctagtgcgtggccaaacctcacctcccaagagaagcctccttcagaagacaaatttgatctggtggatgcttatgggacagagcctccatacacctactcagggaagaggtcctccaagtgtcgcgagtgtaggaagatgttccagagtgcttcggcgctcgaggcacaccagaagacccattctcggaagaccccatatgcctgcagcgagtgtgggaaagccttcagccggagcactcacctcgcccagcaccaggttgtccacacaggggcgaagccccatgagtgtaaggaatgtgggaaggccttcagccgagtcacccacctgactcagcaccaaaggattcatactggagagaaaccctacaaatgtggggaatgtggtaaaaccttcagccgcagcactcacctcacccagcaccagcgggtgcacacgggggagcggccctacgagtgtgacgcgtgtgggaaagccttcagccagagcacgcacctgactcaacaccagcgcatccacaccggggagaagccctacaagtgtgacgcgtgtggccgagccttcagcgactgctcagccctgatccgacatctgagaatccactctggagagaagccatatcagtgtaaggtttgtccgaaggcctttgcacagagctcctccctcattgagcaccagaggatccacacgggagagaagccttataagtgcagcgactgtgggaaggccttcagtcgtagctcagccctgatggttcacttgcggatccacatcacggtgctgcaatgaccggaagtcgcccctgggggcgtagcacagcgtcttctcggaggctcgaggtctaagagaaacgctgagttcctgaagagccacagacagggtgggtgattgatgagttgtcaaaatgataggtgcctgagggcagactcgggctgtctaggaaccactctgcatttgaggaaccctgatgagcacaaggtgattcaggccagctggagaagcttccagaagggccctgcactgctaccctctatttcccactcagggctgtcccagagagaaggcagccgaactgaggatttagactggttctgagggccagggcaaatgaaggcgcatgtctctcagaactcagcgtcccaagacgctctgggcgggccaactgtagcttgttctcatgtggttcttcttgcctgcttttctgctgcttagcccagaacggacacctgccatgcccacctctgtgccttggcacctactatttccactccagactattttgtgcctaactgcaaggctgacttttgagactgcctcttccacgatgccttttctacactctgcctctctcatggtttcctgtcgtaatcagtggtgctgcttgacacctgcccagcatgttcctgtctctccttttccttccacatcccaccagtcaccagcgctattgttttaacctaaagcttatctgtaattcacctccttttccaccactgctaccttatgtgagccctcattgcctcttgcctggattatagccggggtctccttcctgaccacttcctgcctttattctctgcccctgtatcactctccaggggactcttgatattacttagatctgactgtgtcactccaaggtggaaagctctccaacccatcttctacagcacagcttcctgaacagggtataagtatgctgagatgcaggctgctctgggccccgagcaacctctccagttatcctcatatgcatgtatgaatactgtcatttttctgtgcgtgcagtgaaaatggcctcatctcataccatggctccaccttccatacaccagccacacggaactactgtggtccctgaaggagccatacattttcccacttatgtgcctttgtacctgtgcctggaaccctcctcttctttttctttttcttttcttttctttttttttttttgagatggagtctcgctctgtcgcccaggctggagtgcagtggcgcgatctcggctcactgcaagctctgcctcccgggttcatgccattctcctgcctcagcctcccaagtagctgggactacaggcgcctgccaccacgcccagctagtttttttttttttttgtatttttagtagagatggagtttcaccatgttagccaggatggtctcgatctcctgacctcgtgatccacccgcctcggcctcccaaagtgctgggattacaggcgtgagccaccgcacctggccctcctttttcatctaaggtgtttcaaatgttgcccaaagaaacctccctgctctccgggagcagacttcagcttgccctctctgcttccagagcacctcctagatacctctcttacaactcctgccaccttgttttacttatttgctccttgtagagctgccttttccaaggataccataaactcctgagagcaggggccatgtcttactctcagtatctacaacacacaagactcagtaggccctgactgatgtctcttacatgaatgtgactggtgcccccaggaggcagtcaccgtgctgtctctgccccacattgtccttatgtatgtttacatggatgtctccccagcagcttgaaccctggagagcaagaataatctgattttcctgggggccagcacccaaataagcctggcatgcagtggcctcaataaaatgtgactgtattgagtcattttctagggccccagatcccctggtgtcatggacttagtctttgccagcattctgtccatgtgttctctggtcttctctcacaatgctgcatccctgtcccatttttagggtccctgtctatcactggatgctgcagcttctgttcattactgttagtgtatcattcttcatgcctctgtttctgtgatggtctcatcatatgtgaaccatttgacctggcgtattgtgtactagtcaccgtcaccatctctccatatgtatctccctgtatttcgggcccattccctctatgtcaagagtaaatagaggcacagagactgatgagaaacgttcataacatgaaggtaagactcagggagacagagactttgtggaagtatctctgagggagtcccagacacaggcagagagggccacatatcgtgtgccagaggctgagagactgagagggatgacaggcttaggggaaaactcagagaggagagatgcacattcctagtgaaattgcacaggcttccagcatgctggagggaacagaaaaggcatgggcctgaattcaggctgcagagcctgactcctccctgtggctacttttgggacctaagataagtgactttcctgaacctccatgacctcctcatatgtaaaccagggacaggacccaccttgtgtagtgcctgacccaaagcctggccctgcacactgtctctgactcacagcaatcatcagcacctctctttgcctcctacttgctcagtctctgtcacaagaactggatctccatccccttgatgctctgagcatcttcacccatttggtcgttgagacatatctgtccatgtctgtctaaaaggggaggagatgagggagaaaaaagggaatctactcagagcctgtgtgtgctgcccagtctaccaaataatttatatacatctcagtcctcacacaaccatccctgttttatagaggaggaagtggcttagagaatgtaactgaccaaagtcacactgccaggaactggaagcactaggatttgacagcatatccaaatatgtcagcaatttcaataaacatgactgtactcaacaaaccaagtgtaaagac

SEQ ID NO: 255811 - protein, 522 aa, Artificial Sequence
  derived and/or modified sequence
MSLRVHTLPTLLGAVVRPGCRELLCLLMITVTVGPGASGVCPTACICATDIVSCTNKNLSKVPGNLFRLIKRLDLSYNRIGLLDSEWIPVSFAKLNTLILRHNNITSISTGSFSTTPNLKCLDLSSNKLKTVKNAVFQELKVLEVLLLYNNHISYLDPSAFGGLSQLQKLYLSGNFLTQFPMDLYVGRFKLAELMFLDVSYNRIPSMPMHHINLVPGKQLRGIYLHGNPFVCDCSLYSLLVFWYRRHFSSVMDFKNDYTCRLWSDSRHSRQVLLLQDSFMNCSDSIINGSFRALGFIHEAQVGERLMVHCDSKTGNANTDFIWVGPDNRLLEPDKEMENFYVFHNGSLVIESPRFEDAGVYSCIAMNKQRLLNETVDVTINVSNFTVSRSHAHEAFNTAFTTLAACVASIVLVLLYLYLTPCPCKCKTKRQKNMLHQSNAHSSILSPGPASDASADERKAGAGKRVVFLEPLKDTAAGQNGKVRLFPSEAVIAEGILKSTRGKSDSDSVNSVFSDTPFVAST

SEQ ID NO: 255812 - DNA, 1569 bp, Artificial Sequence
  derived and/or modified sequence
atgagcctgagagtgcacaccctgcccaccctgctgggcgccgtggtgagacccggctgcagagagctgctgtgcctgctgatgatcaccgtgaccgtgggccccggcgccagcggcgtgtgccccaccgcctgcatctgcgccaccgacatcgtgagctgcaccaacaagaacctgagcaaggtgcccggcaacctgttcagactgatcaagagactggacctgagctacaacagaatcggcctgctggacagcgagtggatccccgtgagcttcgccaagctgaacaccctgatcctgagacacaacaacatcaccagcatcagcaccggcagcttcagcaccacccccaacctgaagtgcctggacctgagcagcaacaagctgaagaccgtgaagaacgccgtgttccaggagctgaaggtgctggaggtgctgctgctgtacaacaaccacatcagctacctggaccccagcgccttcggcggcctgagccagctgcagaagctgtacctgagcggcaacttcctgacccagttccccatggacctgtacgtgggcagattcaagctggccgagctgatgttcctggacgtgagctacaacagaatccccagcatgcccatgcaccacatcaacctggtgcccggcaagcagctgagaggcatctacctgcacggcaaccccttcgtgtgcgactgcagcctgtacagcctgctggtgttctggtacagaagacacttcagcagcgtgatggacttcaagaacgactacacctgcagactgtggagcgacagcagacacagcagacaggtgctgctgctgcaggacagcttcatgaactgcagcgacagcatcatcaacggcagcttcagagccctgggcttcatccacgaggcccaggtgggcgagagactgatggtgcactgcgacagcaagaccggcaacgccaacaccgacttcatctgggtgggccccgacaacagactgctggagcccgacaaggagatggagaacttctacgtgttccacaacggcagcctggtgatcgagagccccagattcgaggacgccggcgtgtacagctgcatcgccatgaacaagcagagactgctgaacgagaccgtggacgtgaccatcaacgtgagcaacttcaccgtgagcagaagccacgcccacgaggccttcaacaccgccttcaccaccctggccgcctgcgtggccagcatcgtgctggtgctgctgtacctgtacctgaccccctgcccctgcaagtgcaagaccaagagacagaagaacatgctgcaccagagcaacgcccacagcagcatcctgagccccggccccgccagcgacgccagcgccgacgagagaaaggccggcgccggcaagagagtggtgttcctggagcccctgaaggacaccgccgccggccagaacggcaaggtgagactgttccccagcgaggccgtgatcgccgagggcatcctgaagagcaccagaggcaagagcgacagcgacagcgtgaacagcgtgttcagcgacacccccttcgtggccagcacctag

SEQ ID NO: 255813 - DNA, 1569 bp, Artificial Sequence
  derived and/or modified sequence
atgtcactcagagtccatactctacccaccctgctcggtgctgtcgtgcgcccggggtgtcgggaactgctgtgtctgctgatgatcacagtgaccgtgggccctggggcttcaggagtgtgccctacagcatgtatttgtgcaactgacatcgtctcatgcaccaacaaaaacctaagcaaggttcctggaaatttgttcagactcatcaaaaggctggacctctcatataatagaatcgggcttctggacagtgagtggattcctgtctccttcgccaagttaaatacactcatactcaggcataataacatcacatccatttctaccggatcattttctactacccctaatctgaagtgtctggatctgtcttccaacaagctcaaaactgtaaaaaatgcggtgttccaggaactaaaagtgcttgaagtgcttttgttgtacaacaaccacatttcatacctagatccttcagcatttgggggactgagccagttgcaaaagctatacctgagcggtaattttctcacccagttcccaatggatctctacgtcggcagatttaagctggcagaactgatgtttttggacgtctcttataaccggattccttccatgcccatgcaccacattaatctggtgccaggtaaacagttacggggaatttatctccatggaaatcctttcgtgtgcgactgctccctttacagcttattagtcttttggtaccgccggcactttagctctgtgatggacttcaagaatgattacacctgcaggctgtggtcagacagccgacattctcgccaagtgctcctgctgcaagacagctttatgaattgcagtgactctatcatcaatgggagcttcagggcattgggcttcatccacgaagcgcaggtgggagagaggctcatggttcactgtgattctaagactgggaatgctaataccgatttcatctgggtaggaccagataacagacttctggaaccagataaggagatggagaacttctatgtcttccacaacggatctctggttatcgagtccccaagatttgaggacgctggggtttactcctgcatagccatgaataagcagagactactaaatgaaaccgtggatgtgacgatcaacgtatccaactttacggtcagcagatctcacgcccatgaggctttcaacacagccttcaccactctcgctgcgtgtgtagcgagtatcgtactcgtccttctgtatctttacctcaccccttgcccatgcaagtgtaagactaagaggcagaaaaacatgctgcaccaatcaaatgcccattctagcatcttgtcccctggccctgcatctgacgcctcggctgatgagagaaaggctggagccgggaagagggtagtgttcttggaacccctgaaggacactgctgctgggcaaaacggcaaggtcaggctatttcccagtgaggcagtaatcgccgaaggtattctcaaatcaacacgcggcaagtcagatagcgactcagtgaatagtgttttctcggacacccctttcgttgcctcaacttag

SEQ ID NO: 255814 - DNA, 1569 bp, Artificial Sequence
  derived and/or modified sequence
atgagtctgagagtccacacactgcctacactgctcggcgccgtcgtgaggcctggctgtagggaactcctgtgtctgctgatgatcactgtgacagtgggccccggcgcatctggagtctgcccgacggcctgtatctgcgccaccgatattgtctcctgcactaataagaacctgagtaaagtgccaggaaacttgttcagacttatcaaacggttggacctcagttacaacaggatagggctgctggactctgagtggatccccgtaagcttcgctaagctaaacactctaatacttcgccacaataatatcacctccatttccactggatccttctcgactacaccaaatttgaagtgtctcgatctctccagtaacaagctcaaaactgtgaagaacgctgtgtttcaggagcttaaagtgctagaggtgttgctcctgtacaacaatcatatatcttatttggatccatccgcattcgggggtctctcacagctgcaaaagctgtacttgagtggtaatttcttgacgcagtttccaatggatctctatgtcggccgcttcaaactggctgagctcatgtttctggatgtttcctataatcgcattccttctatgcctatgcaccacataaatctggtgcctgggaagcagctgcgcggtatctatctgcacgggaacccattcgtttgtgactgctcactttactccttgctcgtgttttggtatcgtagacacttcagcagtgtgatggactttaagaacgactatacctgccgcctctggagtgacagtcggcattcgaggcaggtcctcctcctgcaggacagttttatgaactgttccgactccatcattaatggatccttccgggcactcgggttcattcatgaggcccaggttggcgaacgcctcatggtccattgcgattctaagactgggaacgctaatacagactttatatgggttggtcccgataatcgattactggaacctgataaagagatggagaatttttacgtgttccataacggtagtttggttatcgagtcacctagattcgaggatgcaggggtgtactcctgcattgctatgaataagcagcgcctcctgaatgaaacagtcgatgtaacaatcaacgtgtccaacttcaccgtgtctcggtcccacgcacacgaagctttcaatacggcttttaccactctcgctgcgtgtgtggcaagtatcgtgcttgtactgctgtatttgtacctgacaccatgcccatgtaaatgtaaaaccaaacgacaaaagaatatgctacaccagtcaaacgcccatagttccattttgtctcctggacctgcctcagatgcatcagccgatgaacgaaaagcaggcgccggtaagagggtggtcttcttggagcccctgaaggacacagccgccgggcagaatgggaaggtaaggctgtttccctcggaggcagtcatcgctgagggtattctgaaatcaactagaggaaaatccgactctgactctgtcaactcagtcttcagcgacacaccattcgttgcctctacatag

SEQ ID NO: 255815 - DNA, 1569 bp, Artificial Sequence
  derived and/or modified sequence
atgtccctcagagtccacactctgcctaccctgctgggggctgtcgtaaggccaggatgccgcgaactgttgtgcttgcttatgataacggtcaccgtgggaccaggcgcctccggagtgtgcccgacagcatgcatttgtgcaacagatattgtatcctgcactaacaaaaatttatctaaagtgcccggtaaccttttccgcttgattaaaaggctggacctctcctacaaccggattggcctgcttgattctgaatggattcctgtgtccttcgccaagctaaatacactcatcttgagacataacaacatcacgtctattagcactggctctttctcgactactccgaatctcaagtgtctggacctgtcctccaacaaactcaaaacagtaaagaacgccgtgttccaggagttaaaagttctggaggtgctattgttgtataacaaccacatcagctatctagatccctctgcttttggtggactaagccaactgcaaaaactctacctgtccgggaatttccttactcagttcccaatggacctctacgtcgggcgttttaagctagcggagttaatgtttctggatgtgagttacaacagaataccatctatgcctatgcaccatataaacttagtgcccggcaaacagctccgaggcatctaccttcatggtaatccctttgtgtgcgactgtagcctgtactcactactggttttttggtatcgacgtcacttcagttcggtcatggatttcaaaaacgactacacttgccgactgtggtccgactccagacactcccgccaggtactcctgttacaggattcctttatgaactgtagcgattctatcattaatggatcatttagagcattaggcttcattcacgaagcgcaggtgggtgagaggctgatggtccactgcgacagcaagacaggaaatgcgaacaccgacttcatatgggtcgggcctgataatagattactagagcctgacaaggagatggagaatttctatgtcttccacaacggctctctggtgattgagtcccctcggttcgaagacgcaggtgtgtattcctgcattgcaatgaataaacagcgactgctgaacgagacggtggacgtgaccattaacgtcagcaattttaccgtcagtcgatcccatgcgcacgaagccttcaatacggctttcacgacactagctgcttgtgtggcctcgattgtccttgtgttgctgtatctgtacctcacaccctgcccctgcaagtgtaaaacaaaaaggcagaaaaacatgctccaccagtcgaacgcacacagctctatcctctctccaggaccagcctccgacgcatcagcggacgagaggaaggctggggccggaaagagagtcgtctttctggaacccctgaaagataccgccgccggccagaacggcaaagtgagactgttcccttcggaagctgtgattgcagagggcatcctgaaatccacccggggcaaatcagattccgattctgtaaattccgtattttctgacaccccctttgtcgccagcacttag

SEQ ID NO: 255816 - DNA, 1569 bp, Artificial Sequence
  derived and/or modified sequence
atgagcctgagggtacacaccctgcctacattgctgggagctgtggtaagaccaggatgcagagagctgctctgcctgttaatgattaccgtcacagtcggtccaggggctagtggcgtctgtccaaccgcatgcatttgcgctactgacatcgtttcttgcacaaataagaatctgtccaaagtgccaggcaatttgtttcgactgattaagcgcctggacttgtcttacaaccggatcggcctgctggattcagaatggataccagtttcatttgcaaagctgaacacactgatcctccggcataacaacatcacgtcaattagcacaggctccttctcaactacgcctaatctcaagtgcctcgatctgtcttctaacaagctgaagaccgttaaaaatgccgtttttcaagagctgaaagtgcttgaggtgctcctcttatataacaaccacataagttacctcgatccatcagccttcggtggcttatcacagttgcaaaaactctatctttctggtaattttctgacacagtttccgatggacctgtacgtgggtcgctttaagctagccgaactcatgtttctcgatgtgagttataatagaataccttctatgcctatgcaccatatcaatctggtacctggaaaacaattacggggtatctatctgcacggtaacccttttgtgtgtgactgttctctttactctttgttggtcttctggtatagacgccatttttcaagtgttatggattttaagaatgattacacatgccgattatggtccgatagccggcattcaagacaagtcctgctactccaagattcttttatgaactgtagcgatagtattattaatggtagctttcgcgctctggggttcatccacgaggctcaagtcggtgaacgacttatggtccattgtgactccaagacagggaatgccaataccgactttatctgggttgggcctgacaatagactgctggagcccgataaagagatggagaacttttacgtgttccacaacggaagcttagtcatcgagtccccccgctttgaggacgccggtgtctactcatgtatcgcaatgaacaagcaacgactgctgaatgaaaccgttgacgttactatcaacgtgtctaatttcaccgtgtctcgctcacacgcccatgaggcatttaacacagcttttaccactctcgctgcatgtgtcgcttcaatcgtgctggtactgttgtacctgtatctcaccccatgtccatgcaaatgcaaaactaagaggcagaagaatatgctacatcaaagcaatgcacactcttccatcctgagtcccggtcccgcttcagatgcctctgcagacgagcgcaaagccggggctggtaagcgtgtcgtattcctcgagccgctgaaagacacagccgccgggcaaaatggcaaagtcagactctttcccagtgaagcagttattgcagagggcattctgaaaagcacccggggtaaatcggactctgatagcgtgaactccgttttctccgacaccccattcgtcgcctccacatag

SEQ ID NO: 255817 - DNA, 3763 bp, Artificial Sequence
  derived and/or modified sequence
gggtcctgcagcctcccgagtgcggagaggcggggccgcccgctgccgcccggctgcctgcgccccctcccgcggccccggctctgggagcggggcgccccgcgcgcgggcacacggcggccagagcgccgaggcggtaccttcagcctgcaatgagaggaacccgggagagcccccgggagccagcgaagagcttggctgctgcgtccagggctgctgctgccgccgcggctgcttgaaactcctcaaagttgagagccggctagagggtgccgcccgccgggagccggagggaaaggaagtcggaaggtgcaagagtgacagacacggacagacggacgcgcagaccttcggaaggcactgcgtaggcagcctccccggagcccacgaggctccccagcaccgttcactggtgggaggctgagccggtggaaaagacaccgggaagagactcagaggcgaccataatgtcgttacgtgtacacactctgcccaccctgcttggagccgtcgtcagaccgggctgcagggagctgctgtgtttgctgatgatcacagtgactgtgggccctggtgcctctggggtgtgccccaccgcttgcatctgtgccactgacatcgtcagctgcaccaacaaaaacctgtccaaggtgcctgggaaccttttcagactgattaagagactggacctgagttataacagaattgggcttctggattctgagtggattccagtatcgtttgcaaagctgaacaccctaattcttcgtcataacaacatcaccagcatttccacgggcagtttttccacaactccaaatttgaagtgtcttgacttatcgtccaataagctgaagacggtgaaaaatgctgtattccaagagttgaaggttctggaagtgcttctgctttacaacaatcacatatcctatctcgatccttcagcgtttggagggctctcccagttgcagaaactctacttaagtggaaattttctcacacagtttccgatggatttgtatgttggaaggttcaagctggcagaactgatgtttttagatgtttcttataaccgaattccttccatgccaatgcaccacataaatttagtgccaggaaaacagctgagaggcatctaccttcatggaaacccatttgtctgtgactgttccctgtactccttgctggtcttttggtatcgtaggcactttagctcagtgatggattttaagaacgattacacctgtcgcctgtggtctgactccaggcactcgcgtcaggtacttctgctccaggatagctttatgaattgctctgacagcatcatcaatggttcctttcgtgcgcttggctttattcatgaggctcaggtcggggaaagactgatggtccactgtgacagcaagacaggtaatgcaaatacggatttcatctgggtgggtccagataacagactgctagagccggataaagagatggaaaacttttacgtgtttcacaatggaagtctggttatagaaagccctcgttttgaggatgctggagtgtattcttgtatcgcaatgaataagcaacgcctgttaaatgaaactgtggacgtcacaataaatgtgagcaatttcactgtaagcagatcccatgctcatgaggcatttaacacagcttttaccactcttgctgcttgcgtggccagtatcgttttggtacttttgtacctctatctgactccatgcccctgcaagtgtaaaaccaagagacagaaaaatatgctacaccaaagcaatgcccattcatcgattctcagtcctggccccgctagtgatgcctccgctgatgaacggaaggcaggtgcaggtaaaagagtggtgtttttggaacccctgaaggatactgcagcagggcagaacgggaaagtcaggctctttcccagcgaggcagtgatagctgagggcatcctaaagtccacgagggggaaatctgactcagattcagtcaattcagtgttttctgacacaccttttgtggcgtccacttaatttgtgcctatatttgtatgatgtcataatttaatctgttcatatttaactttgtgtgtggtctgcaaaataaacagcaggacagaaattgtgttgttttgttctttgaaatacaaccaaattctcttaaaatgattggtaggaaatgaggtaaagtacttcagttcctcaatgtgccatagaaagatggggttgttttccaaagtttaagttctagatcacaatatcttagcttttagcactattggtaatttcagagtaggcccaaaggtgatatgactcccattgtccctttatttaggatattgaaagaaaaaataaactttatgtattagtgtcctttaaaaatagactttgctaacttactagtaccagagttattttaaagaaaaacactagtgtccaatttcatttttaaaagatgtagaaagaagaatcaagcatcaattaattataaagcctaaagcaaagttagatttgggggttattcagccaaaattaccgttttagaccagaatgaatagactacactgataaaatgtactggataatgccacatcctatatggtgttatagaaatagtgcaaggaaagtacatttgtttgcctgtcttttcattttgtacattcttcccattctgtattcttgtacaaaagatctcattgaaaatttaaagtcatcataatttgttgccataaatatgtaagtgtcaataccaaaatgtctgagtaacttcttaaatccctgttctagcaaactaatattggttcatgtgcttgtgtatatgtaaatcttaaattatgtgaactattaaatagaccctactgtactgtgctttggacatttgaattaatgtaaatatatgtaatctgtgacttgatattttgttttatttggctatttaaaaacataaatctaaaatgtcttatgttatcagattatgctattttgtataaagcaccactgatagcaaatctctctccaaaattcttaaagttgatttttttaaagggggaggggaaggctttaatgtgttctagatcaatttataccttccgtatgacgttttactctgatatcattgtgcactttagccagatccagaaaacactcaaatttattttgcaacaagtgagagcccaggagacctccttattatcctgtctctgctttgaggcaatcaagtaccctctctgaacctaggttccctcatctgtaaaacaaaggtttcagaccagatggtgtttaaggtttctccccatactggaatgaatgatttcttggtggtattagcatcatcacagacctatacttgctttctgaaactctaccacatactgaaggaatacaggaatgggattaagatgactagcatagcagtgtacagcttgaagagatgttccacatcatcactccagctccttctcttttctcagggacaaatgaggcccagagagaatacgacctgtgtaaggtcaaacagtggcagggaaagaaggagagctggggtttagcattctccctggtgaagattggaggtccaaagaaatgactcctttttaagggatgggcataaaaaagtgatcaaaacattgcaaaggagaatcaaagattgattgtcctggggctaagaaagaagataatttttaaagaatgggagtgggcaacagtgaaaaatattgcagataagtagataaggatagaagatcaaccactgactggtagta

SEQ ID NO: 255818 - DNA, 2233 bp, Artificial Sequence
  derived and/or modified sequence
ggggcgccccgcgcgcgggcacacggcggccagagcgccgaggcggtaccttcagcctgcaatgagaggaacccgggagagcccccgggagccagcgaagagcttggctgctgcgtccagggctgctgctgccgccgcggctgcttgaaactcctcaaagttgagagccggctagagggtgccgcccgccgggagccggagggaaaggaagtcggaaggtgcaagagtgacagacacggacagacggacgcgcagaccttcggaaggcactgcgtaggcagcctccccggagcccacgaggctccccagcaccgttcactggtgggaggctgagccggtggaaaagacaccgggaagagactcagaggcgaccataatgtcgttacgtgtacacactctgcccaccctgcttggagccgtcgtcagaccgggctgcagggagctgctgtgtttgctgatgatcacagtgactgtgggccctggtgcctctggggtgtgccccaccgcttgcatctgtgccactgacatcgtcagctgcaccaacaaaaacctgtccaaggtgcctgggaaccttttcagactgattaagagactggacctgagttataacagaattgggcttctggattctgagtggattccagtatcgtttgcaaagctgaacaccctaattcttcgtcataacaacatcaccagcatttccacgggcagtttttccacaactccaaatttgaagtgtcttgacttatcgtccaataagctgaagacggtgaaaaatgctgtattccaagagttgaaggttctggaagtgcttctgctttacaacaatcacatatcctatctcgatccttcagcgtttggagggctctcccagttgcagaaactctacttaagtggaaattttctcacacagtttccgatggatttgtatgttggaaggttcaagctggcagaactgatgtttttagatgtttcttataaccgaattccttccatgccaatgcaccacataaatttagtgccaggaaaacagctgagaggcatctaccttcatggaaacccatttgtctgtgactgttccctgtactccttgctggtcttttggtatcgtaggcactttagctcagtgatggattttaagaacgattacacctgtcgcctgtggtctgactccaggcactcgcgtcaggtacttctgctccaggatagctttatgaattgctctgacagcatcatcaatggttcctttcgtgcgcttggctttattcatgaggctcaggtcggggaaagactgatggtccactgtgacagcaagacaggtaatgcaaatacggatttcatctgggtgggtccagataacagactgctagagccggataaagagatggaaaacttttacgtgtttcacaatggaagtctggttatagaaagccctcgttttgaggatgctggagtgtattcttgtatcgcaatgaataagcaacgcctgttaaatgaaactgtggacgtcacaataaatgtgagcaatttcactgtaagcagatcccatgctcatgaggcatttaacacagcttttaccactcttgctgcttgcgtggccagtatcgttttggtacttttgtacctctatctgactccatgcccctgcaagtgtaaaaccaagagacagaaaaatatgctacaccaaagcaatgcccattcatcgattctcagtcctggccccgctagtgatgcctccgctgatgaacggaaggcaggtgcaggtaaaagagtggtgtttttggaacccctgaaggatactgcagcagggcagaacgggaaagtcaggctctttcccagcgaggcagtgatagctgagggcatcctaaagtccacgagggggaaatctgactcagattcagtcaattcagtgttttctgacacaccttttgtggcgtccacttaatttgtgcctatatcctatatggtgttatagaaatagtgcaaggaaagtacatttgtttgcctgtcttttcattttgtacattcttcccattctgtattcttgtacaaaagatctcattgaaaatttaaagtcatcataatttgttgccataaatatgtaagtgtcaataccaaaatgtctgagtaacttcttaaatccctgttctagcaaactaatattggttcatgtgcttgtgtatatgtaaatcttaaattatgtgaactattaaatagaccctactgtactgtg

SEQ ID NO: 255819 - DNA, 3058 bp, Artificial Sequence
  derived and/or modified sequence
cgagctgctgcccgcaggaggcaggacgcgcaggggtgggaccggcgccccagcccgtctcccggccccgggcgcgcgggaaccccgggtcctgcagcctcccgagtgcggagaggcggggccgcccgctgccgcccggctgcctgcgccccctcccgcggccccggctctgggagcggggcgccccgcgcgcgggcacacggcggccagagcgccgaggcggtaccttcagcctgcaatgagaggaacccgggagagcccccgggagccagcgaagagcttggctgctgcgtccagggctgctgctgccgccgcggctgcttgaaactcctcaaagttgagagccggctagagggtgccgcccgccgggagccggagggaaaggaagtcggaaggtgcaagagtgacagacacggacagacggacgcgcagaccttcggaaggcactgcgtaggcagcctccccggagcccacgaggctccccagcaccgactaacccaggaaagaggaaaaaatacatttaacagtgaagaggcaacacagagctccctattgtgaaataaaacccatttcaaaagttattggaaagaaagttcactggtgggaggctgagccggtggaaaagacaccgggaagagactcagaggcgaccataatgtcgttacgtgtacacactctgcccaccctgcttggagccgtcgtcagaccgggctgcagggagctgctgtgtttgctgatgatcacagtgactgtgggccctggtgcctctggggtgtgccccaccgcttgcatctgtgccactgacatcgtcagctgcaccaacaaaaacctgtccaaggtgcctgggaaccttttcagactgattaagagactggacctgagttataacagaattgggcttctggattctgagtggattccagtatcgtttgcaaagctgaacaccctaattcttcgtcataacaacatcaccagcatttccacgggcagtttttccacaactccaaatttgaagtgtcttgacttatcgtccaataagctgaagacggtgaaaaatgctgtattccaagagttgaaggttctggaagtgcttctgctttacaacaatcacatatcctatctcgatccttcagcgtttggagggctctcccagttgcagaaactctacttaagtggaaattttctcacacagtttccgatggatttgtatgttggaaggttcaagctggcagaactgatgtttttagatgtttcttataaccgaattccttccatgccaatgcaccacataaatttagtgccaggaaaacagctgagaggcatctaccttcatggaaacccatttgtctgtgactgttccctgtactccttgctggtcttttggtatcgtaggcactttagctcagtgatggattttaagaacgattacacctgtcgcctgtggtctgactccaggcactcgcgtcaggtacttctgctccaggatagctttatgaattgctctgacagcatcatcaatggttcctttcgtgcgcttggctttattcatgaggctcaggtcggggaaagactgatggtccactgtgacagcaagacaggtaatgcaaatacggatttcatctgggtgggtccagataacagactgctagagccggataaagagatggaaaacttttacgtgtttcacaatggaagtctggttatagaaagccctcgttttgaggatgctggagtgtattcttgtatcgcaatgaataagcaacgcctgttaaatgaaactgtggacgtcacaataaatgtgagcaatttcactgtaagcagatcccatgctcatgaggcatttaacacagcttttaccactcttgctgcttgcgtggccagtatcgttttggtacttttgtacctctatctgactccatgcccctgcaagtgtaaaaccaagagacagaaaaatatgctacaccaaagcaatgcccattcatcgattctcagtcctggccccgctagtgatgcctccgctgatgaacggaaggcaggtgcaggtaaaagagtggtgtttttggaacccctgaaggatactgcagcagggcagaacgggaaagtcaggctctttcccagcgaggcagtgatagctgagggcatcctaaagtccacgagggggaaatctgactcagattcagtcaattcagtgttttctgacacaccttttgtggcgtccacttaatttgtgcctatatttgtatgatgtcataatttaatctgttcatatttaactttgtgtgtggtctgcaaaataaacagcaggacagaaattgtgttgttttgttctttgaaatacaaccaaattctcttaaaatgattggtaggaaatgaggtaaagtacttcagttcctcaatgtgccatagaaagatggggttgttttccaaagtttaagttctagatcacaatatcttagcttttagcactattggtaatttcagagtaggcccaaaggtgatatgactcccattgtccctttatttaggatattgaaagaaaaaataaactttatgtattagtgtcctttaaaaatagactttgctaacttactagtaccagagttattttaaagaaaaacactagtgtccaatttcatttttaaaagatgtagaaagaagaatcaagcatcaattaattataaagcctaaagcaaagttagatttgggggttattcagccaaaattaccgttttagaccagaatgaatagactacactgataaaatgtactggataatgccacatcctatatggtgttatagaaatagtgcaaggaaagtacatttgtttgcctgtcttttcattttgtacattcttcccattctgtattcttgtacaaaagatctcattgaaaatttaaagtcatcataatttgttgccataaatatgtaagtgtcaataccaaaatgtctgagtaacttcttaaatccctgttctagcaaactaatattggttcatgtgcttgtgtatatgtaaatcttaaattatgtgaactattaaatagaccctactgtactgtg

SEQ ID NO: 255820 - DNA, 2856 bp, Artificial Sequence
  derived and/or modified sequence
cgccgcggctgcttgaaactcctcaaagttgagagccggctagagggtgccgcccgccgggagccggagggaaaggaagtcggaaggtgcaagagtgacagacacggacagacggacgcgcagaccttcggaaggcactgcgtaggcagcctccccggagcccacgaggctccccagcaccgactaacccaggaaagaggaaaaaatacatttaacagtgaagaggcaacacagagctccctattgtgaaataaaacccatttcaaaagttattggaaagaaagtaaggttcactggtgggaggctgagccggtggaaaagacaccgggaagagactcagaggcgaccataatgtcgttacgtgtacacactctgcccaccctgcttggagccgtcgtcagaccgggctgcagggagctgctgtgtttgctgatgatcacagtgactgtgggccctggtgcctctggggtgtgccccaccgcttgcatctgtgccactgacatcgtcagctgcaccaacaaaaacctgtccaaggtgcctgggaaccttttcagactgattaagagactggacctgagttataacagaattgggcttctggattctgagtggattccagtatcgtttgcaaagctgaacaccctaattcttcgtcataacaacatcaccagcatttccacgggcagtttttccacaactccaaatttgaagtgtcttgacttatcgtccaataagctgaagacggtgaaaaatgctgtattccaagagttgaaggttctggaagtgcttctgctttacaacaatcacatatcctatctcgatccttcagcgtttggagggctctcccagttgcagaaactctacttaagtggaaattttctcacacagtttccgatggatttgtatgttggaaggttcaagctggcagaactgatgtttttagatgtttcttataaccgaattccttccatgccaatgcaccacataaatttagtgccaggaaaacagctgagaggcatctaccttcatggaaacccatttgtctgtgactgttccctgtactccttgctggtcttttggtatcgtaggcactttagctcagtgatggattttaagaacgattacacctgtcgcctgtggtctgactccaggcactcgcgtcaggtacttctgctccaggatagctttatgaattgctctgacagcatcatcaatggttcctttcgtgcgcttggctttattcatgaggctcaggtcggggaaagactgatggtccactgtgacagcaagacaggtaatgcaaatacggatttcatctgggtgggtccagataacagactgctagagccggataaagagatggaaaacttttacgtgtttcacaatggaagtctggttatagaaagccctcgttttgaggatgctggagtgtattcttgtatcgcaatgaataagcaacgcctgttaaatgaaactgtggacgtcacaataaatgtgagcaatttcactgtaagcagatcccatgctcatgaggcatttaacacagcttttaccactcttgctgcttgcgtggccagtatcgttttggtacttttgtacctctatctgactccatgcccctgcaagtgtaaaaccaagagacagaaaaatatgctacaccaaagcaatgcccattcatcgattctcagtcctggccccgctagtgatgcctccgctgatgaacggaaggcaggtgcaggtaaaagagtggtgtttttggaacccctgaaggatactgcagcagggcagaacgggaaagtcaggctctttcccagcgaggcagtgatagctgagggcatcctaaagtccacgagggggaaatctgactcagattcagtcaattcagtgttttctgacacaccttttgtggcgtccacttaatttgtgcctatatttgtatgatgtcataatttaatctgttcatatttaactttgtgtgtggtctgcaaaataaacagcaggacagaaattgtgttgttttgttctttgaaatacaaccaaattctcttaaaatgattggtaggaaatgaggtaaagtacttcagttcctcaatgtgccatagaaagatggggttgttttccaaagtttaagttctagatcacaatatcttagcttttagcactattggtaatttcagagtaggcccaaaggtgatatgactcccattgtccctttatttaggatattgaaagaaaaaataaactttatgtattagtgtcctttaaaaatagactttgctaacttactagtaccagagttattttaaagaaaaacactagtgtccaatttcatttttaaaagatgtagaaagaagaatcaagcatcaattaattataaagcctaaagcaaagttagatttgggggttattcagccaaaattaccgttttagaccagaatgaatagactacactgataaaatgtactggataatgccacatcctatatggtgttatagaaatagtgcaaggaaagtacatttgtttgcctgtcttttcattttgtacattcttcccattctgtattcttgtacaaaagatctcattgaaaatttaaagtcatcataatttgttgccataaatatgtaagtgtcaataccaaaatgtctgagtaacttcttaaatccctgttctagcaaactaatattggttcatgtgcttgtgtatatgtaaatcttaaattatgtgaactattaaatagaccctactgtactgtgctttggacatttgaattaatgtaaatatatgtaatctgtgacttgatattttgttttatttggctatttaaaaacataaatctaaaatgtcttatgttatca

SEQ ID NO: 255821 - DNA, 1569 bp, Artificial Sequence
  derived and/or modified sequence
atgagcctgcgggtgcacaccctgcccaccctgctgggcgctgtggtgcggcccggctgccgggagctgctgtgcctgctgatgatcaccgtgacagtgggccctggggccagcggcgtgtgccccacagcctgcatctgtgccacagacatcgtgtcctgcaccaacaagaacctgagcaaggtgcccggcaacctcttccgcctcatcaagaggctggacctgagctacaaccgcatcggcctgctggacagcgagtggatccctgtgtcctttgccaagctgaacaccctcatcctgcggcacaacaacatcaccagcatcagcacaggcagcttcagcaccacccccaacctgaagtgcctggacctgagcagcaacaagctgaagacagtgaagaatgctgtgttccaggagctgaaggtgctggaggtgctgctgctgtacaacaaccacatctcctacctggaccccagcgcctttggaggcctgagccagctgcagaagctgtacctgagcggcaacttcctgacccagttccccatggacctgtatgtgggccgcttcaagctggccgagctgatgttcctggatgtgtcctacaaccgcatccccagcatgcccatgcaccacatcaacctggtgcctgggaagcagctgcggggcatctacctgcacggcaacccctttgtgtgtgactgcagcctgtacagcctgctggtgttctggtacagaagacacttcagctctgtgatggacttcaagaatgactacacctgccgcctgtggagcgacagccgccacagccggcaggtgctgctgctgcaggacagcttcatgaactgcagcgacagcatcatcaatggcagcttccgggccctgggcttcatccacgaggcccaggtgggggagcggctgatggtgcactgtgacagcaagacaggaaatgccaacacagacttcatctgggtgggccctgacaaccggctgctggagccagacaaggagatggagaacttctacgtgttccacaacggcagcctggtgattgagagccccaggtttgaagatgctggggtgtacagctgcatcgccatgaacaagcagaggctgctgaatgaaacagtggatgtgaccatcaacgtgagcaacttcaccgtgagccgcagccacgcccacgaggccttcaacacagccttcaccaccctggccgcctgtgtggccagcatcgtgctggtgctgctgtacctgtacctgaccccctgcccctgcaagtgcaagaccaagaggcagaagaacatgctgcaccagagcaatgcccacagcagcatcctgagccctggccctgccagtgatgccagcgcagatgagaggaaggccggggccggcaagagggtggtgttcctggagcccctgaaggacacagctgctggccagaatggcaaggtgcggctcttccccagcgaggccgtgattgctgagggcatcctgaagagcacccggggcaagagtgacagcgacagcgtgaacagcgtcttcagtgacaccccatttgtggccagcacctag

SEQ ID NO: 255822 - DNA, 1569 bp, Artificial Sequence
  derived and/or modified sequence
atgagcctgcgggtgcacaccctgcccaccctgctgggcgccgtggtgaggccaggttgtagggagctcctgtgtctcctgatgattaccgtgacagtagggcccggcgccagcggtgtgtgtccgactgcctgtatttgcgcaactgacattgtttcgtgcaccaataagaacctgtccaaagtgcccggaaacctattcaggctcatcaagcgtttggatctgagttacaatcgcatcggcctcctggacagtgaatggattccagtctcgtttgcaaaactgaatacattgatccttcgtcataataatattacttcaatctctaccggttccttttccacgacacccaacctgaaatgcctggacctttcaagcaacaagctaaaaacagtcaagaatgccgtattccaagaactcaaagttctggaggtcctcctcctgtataataaccatatttcgtacctcgatccatcggcatttgggggtttgagccagcttcagaaattgtatctgtctggtaacttcctcacacagttccctatggatctgtatgtggggaggttcaaactcgccgagctaatgttcctcgacgtgagttacaatagaattccttcaatgcctatgcaccacatcaatctggtgcccggcaaacagctgcgaggaatctacctgcacggaaacccattcgtttgtgactgcagcttgtatagtctcctcgtgttctggtacaggcggcacttctccagtgtgatggacttcaagaatgattatacttgcagactctggtcggacagcagacacagtcgacaggtgcttctcctgcaagactcctttatgaactgctccgactcgataatcaatggcagcttccgcgctcttggctttatccatgaagcccaggttggcgaaaggctgatggtccactgcgattccaagactggaaacgctaacaccgatttcatctgggtgggcccggataaccgcctgttagagccagataaagaaatggaaaacttctacgttttccacaacggttccctggtgattgaatcccctcgattcgaggatgcaggcgtgtactcctgtattgccatgaataagcaaaggctgctgaacgaaaccgttgacgtgaccatcaacgtctcaaacttcactgtgagccggtctcacgcacatgaagcctttaataccgccttcacaacattagcagcatgcgttgcatcaatcgttcttgtactcctctatttatacttaaccccctgtccatgcaaatgcaagactaagcgacagaaaaatatgcttcaccagtcaaacgcccactccagtatactcagcccaggtccagcttctgacgcctctgcagacgagcggaaagctggcgccggtaagagagttgtgtttctggaacctttaaaggacaccgcggctggccagaacgggaaggtcagactctttccttctgaagcggtaattgccgaaggaatactgaagagcactcggggcaagtctgactctgactctgtgaactctgtgttcagcgacacacctttcgtggccagcacgtag

SEQ ID NO: 255823 - DNA, 1569 bp, Artificial Sequence
  derived and/or modified sequence
atgagcctgcgggtgcacaccctgcccaccctgctgggcgccgtggtgcgtccaggttgccgcgaattactgtgccttctaatgattacagtgaccgtcgggccaggagcgtcaggcgtgtgcccaacggcttgtatatgcgccaccgacattgttagctgtactaataagaatttaagtaaggtgcccgggaatttgttcaggctgattaaacggttggatctctcatacaaccgcataggactgctcgacagcgagtggatccccgtgtccttcgcaaagcttaacaccctgatccttcgccataacaacatcacaagcatctccactggctccttttcgacaacacctaacctgaagtgtctggacttgagcagcaataaactgaagacagtgaaaaatgcagtgttccaagaattgaaggtgcttgaagtcctgctcttatacaacaatcacattagctacctggacccatcagcgtttggagggctaagccaattgcagaagctttacctgtcagggaactttttgacccagttcccaatggacctgtatgtgggcaggtttaaattggccgagctcatgttcctcgacgttagctataaccgaatacccagtatgcccatgcatcacatcaatttagtcccgggcaagcagctgaggggcatctacttgcatggcaacccatttgtgtgcgactgcagtctgtatagcctgctggtgttttggtatcggaggcacttttcaagcgtgatggacttcaagaacgattatacctgtagactgtggtcagatagcagacactcccggcaagtcctgctcctgcaggattcctttatgaactgctcagacagcatcatcaatggatcttttagggcattaggcttcatccatgaggcccaggtcggcgagcgccttatggtgcattgtgatagcaagaccggtaatgctaatacagatttcatctgggtgggacccgacaatcggctacttgaacctgacaaagagatggagaatttctatgtctttcacaatgggtcattagttatcgagtccccacgatttgaggatgctggagtctattcttgtatagctatgaataagcagagactattgaatgagaccgtcgacgtaaccatcaatgtcagcaatttcaccgtgagccggtcgcatgctcacgaagcttttaatacagcatttaccacattggcagcatgtgtcgcaagcatcgtactggtactgctatatttgtatttaacgccatgtccgtgtaaatgtaagacaaaacgacagaagaatatgctgcaccaaagcaatgcacattcctcaatcctgtctcccgggccggcctctgatgcttccgcagacgaacgaaaggcgggggcgggcaaaagggttgtttttctcgagccactaaaggatacagctgcagggcagaacggtaaagttcggctgttcccctctgaggccgtcatcgccgagggaatccttaaatcaacaagaggtaagtctgactctgattcagtcaattcagtcttcagcgacacgcccttcgtggccagcacatag

SEQ ID NO: 255824 - DNA, 1569 bp, Artificial Sequence
  derived and/or modified sequence
atgagcctgcgggtgcacaccctgcccaccctgctgggcgccgtggtgagacccggttgtcgagagctgttatgcttgctgatgatcactgtaaccgtagggccaggcgccagcggtgtgtgtccgaccgcctgtatttgtgctaccgatatcgtgagctgtaccaataagaatctctcaaaagtcccaggcaatctattccgactgatcaagcggttagatctgtcctataatcggatcggactcctagactccgagtggattcctgtgtcctttgcaaaactgaacacccttattcttagacacaataacattacttccatttctaccgggtctttttctacgacaccgaaccttaaatgcctggacctgtccagcaataaattaaagacggtgaaaaacgcagtgtttcaggaactgaaggtgctggaggtactgcttctgtataacaatcacatttcttacttggatccttcagccttcggcggcctgtcccagctgcagaagctttacctctccgggaattttttaactcagtttcccatggacttatacgtgggcagatttaagctggctgaattgatgtttcttgacgtgagttacaatcggatcccaagtatgcctatgcaccacatcaatctggttcctggaaagcagttgcgcggcatttatttacatgggaatccctttgtctgtgattgttccctctattctttgcttgttttctggtaccggagacacttttcctccgtgatggacttcaaaaatgactacacctgcagactgtggtctgactcaaggcacagcagacaggtcctcctcctgcaggatagctttatgaactgtagtgactctatcatcaatggctcattccgcgccttaggatttattcatgaagcccaggtgggggagcggctgatggtgcattgcgattctaaaaccggaaatgccaatacggacttcatttgggtgggccccgataacaggttgcttgagcccgataaagagatggaaaacttctacgtgtttcacaacggctcattggtgatcgaaagccctaggtttgaagacgcaggtgtttatagctgcattgccatgaataagcagaggctgcttaacgagacagtcgatgtgaccatcaatgtcagcaatttcactgtgagcagatcacatgcgcacgaggccttcaacaccgctttcactacccttgcggcttgcgttgccagtatcgtcttggtgttactttacctctatctgactccctgtccttgtaaatgcaaaactaaaaggcagaaaaacatgcttcaccagagcaatgcacattcctctatcctgtcccccggacccgcatctgatgcctccgcagacgaacggaaggctggcgccggaaaacgcgtggtgtttctggaaccactcaaagatacggcagccggacagaatggaaaggttagattgtttcccagtgaggcagtcatcgccgaaggcatccttaagtcaacgaggggtaagtcggatagcgactccgtgaacagcgtgttctcagacaccccgtttgtggccagtacctag

SEQ ID NO: 255825 - DNA, 1569 bp, Artificial Sequence
  derived and/or modified sequence
atgagcctgcgggtgcacaccctgcccaccctgctgggcgccgtggtaagacctggatgtcgggagctgctttgtctgttgatgattacggtcactgtaggaccaggcgcttcgggcgtttgtcccactgcttgtatatgcgctactgatattgtttcatgcacgaacaagaatctgtccaaagttcctgggaatctgtttcggttaatcaagcgactggacctgtcctacaaccggatcgggcttctggactctgaatggatcccggtgagctttgctaagcttaacacgctgatccttagacataataatatcaccagcatctcgaccggttctttctccactaccccgaatctgaaatgccttgacctctccagtaacaaactcaagacagtgaagaatgcggtgttccaggaactgaaagtcctggaagtactactgctgtacaacaaccacatctcttacttggacccctctgcctttggggggctgagtcagttgcaaaagctctatctgagcggcaatttccttacacaatttccaatggatctctacgtgggccggttcaagctcgctgaactcatgttcctcgacgtgagttataataggataccctccatgccaatgcaccatattaatcttgtccccgggaagcaactacgcggaatttacctgcacggtaacccattcgtttgcgactgttccttgtatagcctattggttttttggtataggcggcactttagctccgtcatggatttcaagaatgattacacctgtcgactttggagcgattctcgacacagtaggcaggtcctcttgcttcaggatagcttcatgaattgcagcgattccattattaacggttcattcagagctttagggtttattcacgaggctcaggtgggagagagactgatggtccattgtgattccaagacaggcaacgcgaacacagatttcatatgggtgggtcccgataaccgattgctggaacccgataaggagatggaaaatttctacgtattccacaatgggtctctagtcatagagtcccctagatttgaagacgctggtgtgtactcatgtattgcaatgaacaagcaacgcttacttaacgagaccgtggacgtgaccataaacgtgtctaatttcacggtaagccggtcacacgcacatgaagcctttaatactgcttttacaaccctcgccgcctgcgtagcaagcattgtactggtcttgctgtacctatatctgacaccatgtccttgcaagtgtaaaacaaaacgacagaaaaacatgctgcaccagtccaacgcacactcaagcatcctgtcaccagggcccgcctcagatgcctcagccgatgagcggaaagctggagccggcaagcgagtggtttttctggaaccgctgaaggataccgccgccggacaaaacggaaaggtccgattgttcccatcagaggctgtgatcgctgagggaatcctaaagagcacaaggggaaagtcggatagtgattcggtgaactcggtgttttctgatacgccattcgtggctagtacttag

SEQ ID NO: 255826 - DNA, 1569 bp, Artificial Sequence
  derived and/or modified sequence
atgagcctccgcgttcacacgctcccaacattgctcggggctgtggtgagacctggctgccgggaacttttatgtctgttgatgatcactgtgacggttggaccaggcgcatcaggagtctgtcccaccgcctgtatttgcgccaccgatatcgtgagttgtaccaataaaaatctttccaaggtgcctggcaatctgttccggcttattaagagactcgacctttcgtataatcgtataggccttctagattccgagtggattcctgtctcgtttgctaaactgaacaccctcatcctacgccacaataacataacttcaatttccactggctccttctcaacaacccctaaccttaaatgccttgacctaagctccaacaaactcaaaaccgtgaagaatgcggtgtttcaggagctgaaagtccttgaagtgctgctgctgtataacaatcacatcagctacctcgacccttccgcctttgggggtctgtctcaattgcagaagctgtatctatcagggaatttcctaactcagtttcccatggacttatacgtgggcagatttaaactggccgaactgatgtttttagatgtatcttacaatcggatacctagtatgccaatgcaccatatcaaccttgtgcctgggaagcagctgagaggaatctacttacatggaaaccccttcgtttgcgattgctctctctactcgctcctggtcttctggtaccgcagacactttagctcagtcatggactttaaaaatgattacacctgtcgtctgtggagcgatagccgtcattcccgtcaggtgctgcttctgcaggactcctttatgaattgtagcgactcgattatcaatggctccttccgggctttgggcttcatacatgaagcacaggtgggtgagcgccttatggttcattgcgactccaaaactggaaacgcgaacaccgactttatttgggtgggtccagacaatcggctgctggagcccgacaaagagatggagaatttttacgtgttccataacggtagtctcgtcatcgaaagtccccgtttcgaagacgccggtgtttatagctgcatcgccatgaataagcagagattgctcaacgagaccgtggatgtcaccatcaatgtgtctaacttcacagtgagtcgctctcacgcccatgaagcattcaacaccgccttcacaacgctagccgcttgcgtagccagtattgttcttgtgctgctgtatctttacctgaccccctgcccttgtaaatgcaagacgaaaaggcagaagaacatgctgcaccagagcaacgcccacagttctatcctgtctcccggaccagccagcgacgcttccgccgacgaacgtaaggccggagctggcaaacgcgttgttttcctggaaccactaaaagacacggcggctgggcagaacggcaaggttcggttgtttcctagcgaagccgtcatcgccgagggcatccttaagtccactcggggaaagtctgactccgattccgtgaattccgtgttctcggacacccccttcgttgccagtacttag

SEQ ID NO: 255827 - DNA, 1569 bp, Artificial Sequence
  derived and/or modified sequence
atgtctctgcgcgtgcacaccctgccaacactcctgggcgcagtggttcggcctggttgccgggaactgctgtgcctcctgatgattaccgtgacagtgggcccaggggcaagcggcgtatgcccgacagcttgcatttgcgcgaccgacattgtctcctgcacgaacaaaaacctgagcaaagtacctgggaacctgttcaggctcataaagcggctggatttatcttacaataggatcggactccttgatagtgagtggatcccagtgagcttcgctaagcttaacacattgatcttaaggcataacaatataacaagcatttccactggctcatttagtaccacgccgaatcttaagtgtctggacctgagcagcaacaagctcaaaactgtcaagaacgccgtttttcaggagctgaaagtgctcgaggtgctgctcctatataacaatcacatcagctacttagacccatctgcatttggcggattatcgcagctccaaaaactctacctctctggtaatttccttacacaattcccaatggacttgtacgtcggtaggttcaaactcgcagagcttatgtttcttgacgtatcctacaaccggatcccctccatgcccatgcatcacattaatctcgtgcccggaaagcaactgaggggaatttatctgcacggcaaccccttcgtttgcgactgctcgctgtattcactgctggttttttggtaccgtagacacttctcaagtgtgatggatttcaagaatgattacacatgcaggctttggtcagatagccgacattcaagacaggtgctcttgctgcaggacagctttatgaattgttccgattctattatcaacgggagctttcgcgctctcgggttcattcacgaggcccaagtaggggaacggcttatggtgcattgtgattctaagactggaaacgcgaacactgacttcatctgggtgggacccgataaccggctgcttgagccagataaagagatggaaaacttctatgtctttcataacggcagtttggttatcgagagcccccgatttgaagacgctggtgtgtattcttgcatcgcaatgaataaacagcgcttgcttaacgagactgtggatgtgactattaatgtgtcaaattttacagtcagccgctctcacgcccacgaagccttcaacaccgcatttacgacccttgcggcttgtgtcgcgagtatagtgctggtgcttctgtacctgtacctgactccctgcccctgtaaatgcaagaccaagcgacagaaaaacatgctgcatcagagtaacgctcactcctctatcctgtctcccggaccagcatcagacgcaagtgccgacgaacggaaagcgggtgcaggcaagcgagtggtgttcttagagcccttgaaggacacggctgcgggacaaaatggcaaagtacgacttttcccaagtgaggcagttatcgccgaaggaatactaaagagtactcgtggcaagtcggattccgatagcgtgaactctgtcttcagcgacacaccattcgtggccagtacatag

SEQ ID NO: 255828 - DNA, 1569 bp, Artificial Sequence
  derived and/or modified sequence
atgagtctcagggtacatactctccctacccttctcggcgctgtcgtgcgccctggctgtagagaactgctctgccttctcatgattaccgtgactgtgggccctggcgcatcaggtgtgtgtccaacagcttgcatttgtgccaccgatatagtgagctgtaccaataaaaacttaagcaaggtacctggcaacctcttccgcttaatcaaacgattagaccttagctataaccggatcggcctgttggacagcgaatggattccagtctctttcgccaagctgaacactctgatactgcgacataacaacatcacctccatatctaccgggagcttttcaaccacacctaaccttaagtgtctggacctttcctctaataaactgaagaccgtcaagaacgcagtgttccaggagctgaaagtgttggaggtgttgctgctgtataataatcacattagctatctggatcccagtgcatttggaggcctgtctcagctgcagaaactgtacctttctggtaacttcctcacacagtttccgatggacctttatgtgggccgatttaaactggccgaactgatgttcctggatgtgtcctataaccgcataccttctatgcctatgcatcatataaacctcgttcccggaaaacaactgcggggaatctatctgcacggcaatcccttcgtgtgtgactgctccctctatagcctgctggtgttttggtatcggagacacttctcttcagtcatggacttcaagaatgattacacttgtagactctggtcagactcgcgccatagtcgtcaggtgctacttctgcaggattcatttatgaactgcagcgactcaattattaacggcagctttcgtgcactcgggtttatacacgaggcgcaagttggggagaggctgatggtccactgcgacagtaaaacaggaaatgctaacaccgattttatttgggtgggccctgacaaccgattgcttgagcctgacaaagaaatggaaaatttctacgtgtttcataacgggtctctggtcattgagagccctcgttttgaagacgctggcgtgtactcatgcatcgctatgaataaacagaggctcctcaacgagaccgtagacgtcacaatcaacgtcagcaactttaccgtcagtcggtctcacgcgcatgaggccttcaatactgcttttaccacactggctgcctgtgtggcttcaatagtgctggttttactctacctctacctcaccccgtgtccttgcaaatgtaagaccaaaaggcaaaagaatatgttacatcagtcaaatgcccactccagcatcctgtcccccggtcccgcatcagacgccagcgccgacgagcgaaaggctggcgctggcaagagagtggtcttccttgaacctctgaaggatactgctgccggacaaaacgggaaagtgaggctattcccgagtgaggccgtgatcgccgaaggtatcctcaagtccacccggggaaaaagcgactccgatagcgtgaattctgttttttccgacaccccatttgtcgccagtacctag

SEQ ID NO: 255829 - DNA, 1569 bp, Artificial Sequence
  derived and/or modified sequence
atgagcctgcgcgtacataccctgcctaccctcctgggagcagttgtgaggcccggttgcagggaactgctctgcttattgatgatcaccgtcaccgtgggcccaggagcatctggcgtctgccccacagcatgcatttgtgccacagatatcgtgtcatgtacaaacaaaaacttaagcaaggtgcctgggaacctgttcagactgataaagagacttgacttatcctacaacagaatcggtctgctggactctgagtggatcccggttagtttcgctaaactcaatactcttatattgagacacaataacatcacgtctatcagtaccgggtcattctcaaccacgcccaatcttaaatgtcttgacctgtcaagcaataaattgaaaactgtaaaaaacgctgtatttcaagaattgaaggtcttggaagtcctacttctgtacaataaccacatttcttacctcgaccctagcgcctttgggggactatctcaactgcagaaattatatctcagtgggaacttcttgacgcagttcccaatggacctctatgttggacggttcaaactagctgagctaatgttcctggacgtcagctataatagaatcccaagtatgcccatgcaccacatcaatctggtccctgggaagcaactacgtggcatctacctgcacgggaacccatttgtatgtgactgctccctctactcattgttggttttttggtacagaaggcactttagtagtgttatggactttaagaacgattacacatgccgcctctggtctgattcacgccattcacgtcaggttttactcctgcaagacagcttcatgaattgttctgactccataatcaacggtagcttccgtgccttggggtttatccacgaggcacaggttggtgagagactcatggttcactgcgatagtaaaacaggaaacgccaacacggactttatctgggtggggcctgataatcgccttttggaacctgataaagagatggagaatttttatgtctttcataacggtagtctggtcatcgagtcccctcggttcgaggatgccggtgtgtacagttgtatcgctatgaataagcagcggctcctgaatgaaacagtggatgttacgatcaatgtgtccaattttacagttagcaggtcacatgcacacgaggcatttaacactgcatttacaaccctcgctgcctgcgttgcctcgatcgtgctagtcctcctctacctgtacttaaccccctgcccgtgtaaatgcaagaccaagcggcaaaaaaatatgctacatcagagcaatgcgcattcctcgatcctttcaccaggcccagcctccgatgcaagcgccgacgagcggaaggcgggagctggcaagcgagttgtctttctagaaccactgaaagataccgcagcaggacagaatggcaaggttcgccttttcccaagtgaagccgttattgctgaaggcatcctgaagtccacaaggggcaagagcgattctgactctgtaaactctgtgttcagtgacacaccctttgtcgctagcacatag

SEQ ID NO: 255830 - protein, 1248 aa, Artificial Sequence
  derived and/or modified sequence
MDAKARNCLLQHREALEKDIKTSYIMDHMISDGFLTISEEEKVRNEPTQQQRAAMLIKMILKKDNDSYVSFYNALLHEGYKDLAALLHDGIPVVSSSSGKDSVSGITSYVRTVLCEGGVPQRPVVFVTRKKLVNAIQQKLSKLKGEPGWVTIHGMAGCGKSVLAAEAVRDHSLLEGCFPGGVHWVSVGKQDKSGLLMKLQNLCTRLDQDESFSQRLPLNIEEAKDRLRILMLRKHPRSLLILDDVWDSWVLKAFDSQCQILLTTRDKSVTDSVMGPKYVVPVESSLGKEKGLEILSLFVNMKKADLPEQAHSIIKECKGSPLVVSLIGALLRDFPNRWEYYLKQLQNKQFKRIRKSSSYDYEALDEAMSISVEMLREDIKDYYTDLSILQKDVKVPTKVLCILWDMETEEVEDILQEFVNKSLLFCDRNGKSFRYYLHDLQVDFLTEKNCSQLQDLHKKIITQFQRYHQPHTLSPDQEDCMYWYNFLAYHMASAKMHKELCALMFSLDWIKAKTELVGPAHLIHEFVEYRHILDEKDCAVSENFQEFLSLNGHLLGRQPFPNIVQLGLCEPETSEVYQQAKLQAKQEVDNGMLYLEWINKKNITNLSRLVVRPHTDAVYHACFSEDGQRIASCGADKTLQVFKAETGEKLLEIKAHEDEVLCCAFSTDDRFIATCSVDKKVKIWNSMTGELVHTYDEHSEQVNCCHFTNSSHHLLLATGSSDCFLKLWDLNQKECRNTMFGHTNSVNHCRFSPDDKLLASCSADGTLKLWDATSANERKSINVKQFFLNLEDPQEDMEVIVKCCSWSADGARIMVAAKNKIFLFDIHTSGLLGEIHTGHHSTIQYCDFSPQNHLAVVALSQYCVELWNTDSRSKVADCRGHLSWVHGVMFSPDGSSFLTSSDDQTIRLWETKKVCKNSAVMLKQEVDVVFQENEVMVLAVDHIRRLQLINGRTGQIDYLTEAQVSCCCLSPHLQYIAFGDENGAIEILELVNNRIFQSRFQHKKTVWHIQFTADEKTLISSSDDAEIQVWNWQLDKCIFLRGHQETVKDFRLLKNSRLLSWSFDGTVKVWNIITGNKEKDFVCHQGTVLSCDISHDATKFSSTSADKTAKIWSFDLLLPLHELRGHNGCVRCSAFSVDSTLLATGDDNGEIRIWNVSNGELLHLCAPLSEEGAATHGGWVTDLCFSPDGKMLISAGGYIKWWNVVTGESSQTFYTNGTNLKKIHVSPDFKTYVTVDNLGILYILQTLE

SEQ ID NO: 255831 - DNA, 3747 bp, Artificial Sequence
  derived and/or modified sequence
atggacgcaaaggcccgcaactgcctgctccaacatagagaagcattggagaaagatatcaaaacaagttacatcatggaccacatgattagcgacggtttcctgaccatcagcgaagaagagaaagtccgaaacgagccaactcaacagcaacgggccgctatgctcattaagatgatactgaaaaaagacaacgactcttacgtgagtttttataacgcgctccttcatgaaggatacaaggacctggccgcgctgttacatgatggcatccccgtcgtgtcttcctcgtcgggtaaggattcagttagcggcatcacatcctacgtcagaaccgtactgtgcgagggcggcgtgccgcagcgtcccgttgtatttgtgacccgcaagaagctagtgaacgctatccagcagaagctctccaagctgaaaggcgaacctggctgggttacaatccatggcatggcgggctgcggtaagtcagtgctggccgccgaggccgtccgtgatcattccttgttggaggggtgttttcccggcggggttcattgggtgtcagtgggcaagcaagacaagtccgggctgttaatgaaactgcagaatctctgcacccgtctggatcaggacgagagcttcagccagagactacctctgaatatcgaagaggccaaggaccggctgaggatcttgatgctgagaaaacacccccggtccctcctgatcctcgatgacgtgtgggacagctgggtcttaaaagcctttgattcccaatgccaaattctgctcaccactagagacaaatcggtcaccgactcagtgatggggcctaagtatgttgttcccgtcgagtccagtcttggtaaagaaaaaggcctggagattctgagcctctttgtgaatatgaaaaaagctgatctccccgaacaggctcactcgataatcaaggaatgcaaaggctcaccactggtggtgtccctgattggcgcacttctccgggactttcccaaccggtgggagtattatttaaagcaacttcagaataagcaatttaaacggatacgcaagtcatcctcctacgattatgaagcattagacgaggctatgagcatctctgtggaaatgctgagggaggacatcaaagattactacactgatctctccattctacagaaggacgtaaaggtaccaactaaagtgttatgcattctatgggatatggagacggaagaggtagaagacatcttacaagagttcgtcaacaaaagcttgctattctgtgataggaacggaaaatcttttcggtattatttacatgatctgcaagtggactttctgactgagaagaattgctcccaactgcaggacctccataagaaaatcatcactcagttccagcgctatcaccagccacacacgctgtctccagaccaggaagactgtatgtattggtacaacttcctggcctatcacatggccagcgcaaagatgcacaaagaattgtgcgccctgatgtttagccttgactggatcaaggctaagactgaattggtcggtccagcccacctgatacatgagttcgtcgaatacagacatatactggatgagaaggactgcgctgtttccgagaatttccaggagtttcttagcctaaatgggcacttgcttgggagacagccattccctaatatcgttcagttaggactgtgcgagcctgaaacatccgaagtgtaccagcaggccaagctgcaggcaaagcaggaagtggataatggaatgctctacctggaatggattaataaaaagaatatcaccaatctctcgagactcgtagttcgccctcacacagacgcagtttaccacgcttgcttctccgaggacggccaacggatcgcttcatgcggggcagataaaacattacaggtttttaaggctgagaccggagaaaaattactggagattaaagctcatgaagacgaggtattatgttgtgcatttagcactgacgatcggttcatcgccacctgttctgtggataagaaagttaagatctggaattccatgactggcgagctggttcacacctacgacgagcattctgagcaggtcaactgttgtcatttcaccaattcttcccatcatctcctcctggctacaggctcttctgactgtttcttaaaactgtgggatctgaaccagaaggaatgcagaaatacaatgtttggacataccaatagcgtgaaccattgcagattcagtcctgatgacaagctgctggccagttgttcagctgatggaaccttaaaactttgggacgcaacctccgcgaatgagaggaaatctattaacgttaagcagtttttcctgaacctagaagacccccaggaagacatggaagtcatcgtgaaatgctgcagctggtccgctgacggagctcggataatggtggcagctaaaaataagatcttcttattcgatattcatacatctggtctgctgggagaaatccacacgggtcaccacagcacaattcaatactgcgacttctcaccccagaaccatctggccgttgtcgctttaagccagtactgtgtggaactgtggaatactgactcaaggtctaaagtagcagactgtcgtggccacctgtcttgggtacacggtgtgatgttttcacccgacggctcttcgtttcttacctccagtgacgatcagacaatccgcctgtgggaaacgaaaaaggtgtgcaagaattccgctgtgatgttgaaacaggaggtggacgtcgtgttccaggaaaatgaggtgatggtactcgccgtcgatcatattcgtaggctgcaacttataaacggacgaacaggccagatcgactacttaacagaggcccaggtctcttgctgctgcctgagtcctcatttgcaatatattgccttcggtgatgaaaacggggccatcgaaattcttgaactggtgaacaaccgtatctttcagagtagatttcaacataagaaaaccgtctggcacatacagttcacggccgatgaaaaaaccctgatcagctcatcagacgatgctgagatccaagtgtggaattggcagctggacaagtgtatatttctccgtggccaccaggagaccgtcaaggattttcgcctgcttaaaaattcgagactgctgtcttggtcattcgatggcaccgtaaaggtgtggaacataatcacaggtaataaagagaaagacttcgtttgccatcagggaactgtgctgtcatgcgacatctcgcatgacgcaacaaagtttagcagtacctcggccgataagaccgcaaagatctggagctttgatctcttgcttcctctccatgagttgaggggacacaacgggtgcgttcggtgcagcgctttcagcgtggatagtaccctcctggccacaggggatgacaacggcgaaatacgcatctggaacgtgtctaacggtgagctgcttcacttgtgcgcccctctttccgaagaaggcgccgctacccatgggggctgggtaacggatctttgtttttccccagatggcaaaatgctgatcagcgctggaggatacatcaagtggtggaacgtggtgactggagaatcaagtcaaacattctacaccaatgggacaaatcttaaaaagatccacgtaagcccagacttcaaaacctacgtgaccgtggacaatctcggcatactgtacatccttcagactctggagtag

SEQ ID NO: 255832 - DNA, 3747 bp, Artificial Sequence
  derived and/or modified sequence
atggatgccaaggccaggaactgcctgctgcagcaccgggaggccctggagaaggacatcaagaccagctacatcatggaccacatgatcagtgatggcttcctgaccatcagcgaggaggagaaggtgagaaatgagcccacccagcagcagagagctgccatgctgatcaagatgatcctgaagaaggacaatgacagctatgtgtccttctacaatgccctgctgcacgagggctacaaggacctggccgccctgctgcatgatggcatccctgtggtgagcagcagcagcggcaaggacagcgtgtctggcatcaccagctatgtgaggacagtgctgtgtgagggcggcgtgccccagaggcctgtggtgtttgtgaccaggaagaagctggtgaatgccatccagcagaagctgagcaagctgaagggggagcccggctgggtgaccatccacggcatggccggctgtgggaagtctgtgctggccgctgaggccgtgcgggaccacagcctgctggagggctgcttccctggaggagtgcactgggtgtctgtgggcaagcaggacaagagcggcctgctgatgaagctgcagaacctgtgcacccggctggaccaggatgagagcttcagccagaggctgcccctgaacatcgaggaggccaaggaccggctgcgcatcctgatgctgaggaagcaccccaggagcctgctgatcctggatgatgtgtgggacagctgggtgctgaaggcctttgacagccagtgccagatcctgctgaccacccgggacaagtctgtgacagacagcgtgatgggccccaagtatgtggtgcctgtggagagcagcctgggcaaggagaagggcctggagatcctgagcctgtttgtgaacatgaagaaggctgacctgcctgagcaggcccacagcatcatcaaggagtgcaagggcagccccctggtggtgtccctgattggagccctgctgcgggacttccccaaccgctgggagtactacctgaagcagctgcagaacaagcagttcaagaggatcaggaagagcagcagctatgactatgaggccctggatgaggccatgagcatctctgtggagatgctgcgggaggacatcaaggactactacacagacctgagcatcctgcagaaggatgtgaaggtgcccaccaaggtgctgtgcatcctgtgggacatggagacagaggaggtggaggacatcctgcaggagtttgtgaacaagagcctgctcttctgtgacagaaatggcaagagcttccgctactacctgcatgacctgcaggtggacttcctgacagagaagaactgcagccagctgcaggacctgcacaagaagatcatcacccagttccagcgctaccaccagccccacaccctgagcccagaccaggaggactgcatgtactggtacaacttcctggcctaccacatggccagcgccaagatgcacaaggagctgtgtgccctgatgttcagcctggactggatcaaggccaagacagagctggtgggccctgcccacctgatccacgagtttgtggagtaccgccacatcctggatgagaaggactgtgctgtgtctgagaacttccaggagttcctgagcctgaatggccacctgctgggccggcagcccttccccaacatcgtgcagctgggcctgtgtgagcctgagaccagcgaggtgtaccagcaggccaagctgcaggccaagcaggaggtggacaatggcatgctgtacctggagtggatcaacaagaagaacatcaccaacctgagccggctggtggtgcggccccacacagatgctgtgtaccacgcctgcttctctgaagatggccagagaattgccagctgtggggctgacaagaccctgcaggtgttcaaggccgagaccggggagaagctgctggagatcaaggcccatgaagatgaggtgctgtgctgtgccttcagcacagatgaccgcttcatcgccacctgcagcgtggacaagaaggtgaagatctggaacagcatgaccggggagctggtgcacacctatgatgagcacagcgagcaggtgaactgctgccacttcaccaacagcagccaccacctgctgctggccaccggcagcagtgactgcttcctgaagctgtgggacctgaaccagaaggagtgcaggaacaccatgtttggccacaccaacagcgtgaaccactgccgcttctccccagatgacaagctgctggccagctgcagcgcagatggcaccctgaagctgtgggatgccaccagcgccaatgaaaggaagagcatcaacgtgaagcagttcttcctgaacctggaggacccccaggaggacatggaggtgattgtgaagtgctgctcctggagcgcagatggagcccgcatcatggtggccgccaagaacaagatcttcctgtttgacatccacaccagcggcctgctgggggagatccacacaggccaccacagcaccatccagtactgtgacttcagcccccagaaccacctggccgtggtggccctgagccagtactgtgtggagctgtggaacacagacagccgcagcaaggtggccgactgccggggccacctgtcctgggtgcacggcgtgatgttctccccagatggcagcagcttcctgaccagcagtgatgaccagaccatccggctgtgggagaccaagaaggtgtgcaagaacagcgctgtgatgctgaagcaggaggtggatgtggtgttccaggagaatgaggtgatggtgctggccgtggaccacatccggcggctgcagctgatcaatggccgcacaggccagattgactacctgacagaggcccaggtgtcctgctgctgcctgagcccccacctgcagtacatcgcctttggagatgaaaatggagccatcgagatcctggagctggtgaacaaccgcatcttccagagccgcttccagcacaagaagacagtgtggcacatccagttcaccgcagatgagaagaccctcatcagcagcagtgatgatgctgagatccaggtgtggaactggcagctggacaagtgcatcttcctgcggggccaccaggagaccgtgaaggacttccggctgctgaagaacagccggctgctgtcctggagctttgatggcaccgtgaaggtgtggaacatcatcaccggcaacaaggagaaggactttgtgtgccaccagggcaccgtgctgagctgtgacatcagccatgatgccaccaagttcagcagcaccagcgctgacaagacagccaagatctggagctttgacctgctgctgcccctgcacgagctgcggggccacaacggctgtgtgcgctgcagcgccttctctgtggacagcaccctgctggccactggagatgacaacggggagatccgcatctggaatgtgtccaatggagagctgctgcacctgtgtgcccccctgtctgaggagggcgccgccacccacggcggctgggtgacagacctgtgcttctccccagatggcaagatgctgatctctgctgggggctacatcaagtggtggaatgtggtgactggagagagcagccagaccttctacaccaacggcaccaacctgaagaagatccacgtgtccccagacttcaagacctacgtgacagtggacaacctgggcatcctgtacatcctgcagaccctggagtag

SEQ ID NO: 255833 - DNA, 3747 bp, Artificial Sequence
  derived and/or modified sequence
atggacgccaaggcccggaactgcctgctgcagcaccgggaggccctagaaaaggatattaagacctcctacatcatggatcacatgatttccgatggctttctgacaatctcagaggaggaaaaggtgcgcaacgagcccacccaacaacagagagcagcgatgttgattaagatgatcctaaagaaagacaacgatagctacgtgagtttctacaatgccttattacacgaaggatataaggacctagccgcgcttttgcatgacggaatcccagtggtgtccagcagtagcggcaaggattcagtgtctggcataacgtcctacgtgcgaacagtcctatgcgaggggggggtcccccagcgcccagtcgtttttgtcactcgaaaaaagttagtgaacgctattcaacagaaattaagcaagttgaagggcgaaccaggctgggtcacgatacatggtatggccgggtgtggcaaaagtgtcctagcagccgaggccgttcgggaccactcccttctcgagggatgcttccccgggggtgtccattgggtttcagtgggcaagcaggacaagtccgggctgctgatgaaactgcagaacttatgcactaggctggatcaggacgagtcatttagtcaaaggctgcccttaaacatagaggaggccaaagaccgcctgcgcattctgatgctgcggaagcacccccgctccctgctcattctcgatgacgtgtgggacagctgggtgctcaaggcattcgactcacaatgtcagatactgctaactactcgtgataagtcggttaccgattcagtgatgggacctaagtacgtggtgccagttgaatcgagtctgggaaaggaaaagggactggagattctatcattatttgtgaatatgaagaaagcggatctgccggagcaggctcatagcatcatcaaggagtgtaagggatcaccgctggttgtgtccctgatcggtgcactcctgcgggattttccaaacaggtgggaatactacctgaaacagctccagaacaaacagttcaaaaggattcgaaagagctcttcctacgattacgaggccctggatgaagcaatgagcatatccgttgaaatgctgagggaggatatcaaagattactacacggatctgagcatcctacaaaaagatgtcaaagtgcccacaaaagtgctgtgcatactgtgggatatggaaaccgaggaggtggaagacattctgcaagaattcgtgaataagtccctgctgttctgcgaccgcaatggaaagtcctttaggtattacctccacgatctacaggttgatttcttgaccgagaagaattgcagccagttacaggacctgcacaaaaagattatcactcagttccagagataccaccagccacacactctgtctccagatcaagaggactgtatgtactggtacaatttcctcgcataccatatggcttccgcaaaaatgcacaaggagctctgtgccctgatgttttccctggactggattaaggccaagaccgaactggttggcccggctcatctcatacatgaatttgtcgagtacaggcacattcttgacgaaaaggactgcgccgtcagcgagaactttcaggaattcctaagcctcaacggccacctgctaggccggcagcctttccccaatatcgtgcagctgggactctgcgaaccagaaactagcgaagtgtatcaacaagctaaattgcaggccaagcaggaagtggataacggcatgctgtacctggaatggataaacaagaagaacattacaaatcttagtagattggtggtgcgtccccacaccgatgccgtctatcatgcctgcttcagtgaggacggccagagaatcgcctcttgtggggctgacaagacactgcaagtgttcaaggccgagactggagaaaagctccttgagatcaaggcccacgaagatgaagtgctgtgctgcgcattcagtaccgacgatagatttattgcaacatgcagcgttgacaagaaggtgaagatctggaatagcatgaccggcgaactagtgcatacgtatgacgaacattcagagcaggtaaactgctgccacttcacgaacagctcccaccatttgctcctcgcaactgggtcttcagactgtttcctgaagctgtgggacctgaaccagaaagaatgtcggaacaccatgttcggccataccaactcagttaatcattgtagattctcgcccgacgataagctgctggcatcttgctctgcagacggcaccttgaagctctgggatgctacctctgccaatgaacggaagtcaatcaatgttaaacagtttttcctgaaccttgaggacccacaggaggacatggaggtgattgtgaaatgctgcagttggagtgcagacggcgctagaatcatggttgcagccaagaacaaaatatttctcttcgacatccacacctccggcctcctgggcgaaattcacactggccaccacagtaccattcagtattgtgacttctcaccgcaaaatcacttggcagtggtcgcactctcacagtattgcgtggaattgtggaatacggatagccgatccaaggtggctgattgccgtggccacctaagctgggtgcacggagttatgtttagcccagatgggagctcatttcttacaagttcggacgatcagaccataagactatgggaaacaaagaaagtatgcaaaaatagcgccgttatgctgaagcaagaagtggatgtggtgtttcaggaaaacgaggtcatggtactcgcggtcgaccatattcggcgcctccagctcattaatgggagaacaggacagatagactatctaaccgaggcccaggtcagctgctgttgtttgtctccccacctgcagtacatcgccttcggggacgaaaacggggccattgaaattttggagctggtcaataatagaattttccagagcagattccagcacaaaaagaccgtatggcatatccaatttactgcagacgagaagaccctcatctcctctagtgatgatgctgagatccaggtgtggaactggcagctcgataagtgcatcttcctgcggggacaccaggaaacagtcaaggacttcagactgctgaaaaactccaggttgttgtcctggagctttgatggtaccgtgaaagtgtggaatatcatcacgggaaacaaggaaaaggactttgtgtgtcaccagggaactgtgttatcatgtgacatctcccatgatgccactaagttcagttccacgtctgccgacaaaacagccaagatctggagcttcgacctcttgttaccgctgcacgagcttcgcggtcataacgggtgcgtcaggtgttccgccttctctgtcgatagtactcttctcgccacaggggatgataatggtgaaatccggatctggaacgtatcaaatggagaacttttacatctatgtgcccccctttccgaggagggtgccgccacccacggcggttgggttactgacttgtgcttcagccccgacggaaaaatgctgatttcggctggaggctatatcaagtggtggaacgttgtaactggcgaatcatcccagaccttttacactaacggcacaaacctgaaaaagatccatgtttctcccgactttaaaacctacgttaccgtcgacaacctgggtattttatacatcttgcagactcttgaatag

SEQ ID NO: 255834 - DNA, 3747 bp, Artificial Sequence
  derived and/or modified sequence
atggacgcaaaagcacgaaattgtctgctgcagcaccgcgaggcgctcgagaaggatatcaagacttcatatattatggaccatatgataagcgacggcttcctgaccatttctgaagaggaaaaagtgaggaatgagccaacacagcagcagcgggctgcaatgctgataaagatgattctgaaaaaggacaacgactcctatgtttctttctacaacgccttgcttcacgaggggtacaaagatttagcggctctcctccacgatggaatacctgtggtcagctctagttctgggaaagacagcgtcagcggaatcacctcatacgttaggactgtactctgtgagggcggagtaccccagagacctgttgttttcgtgacaagaaaaaagctggtgaacgcaatacagcaaaagctctcaaaactgaaaggagagccgggttgggtgaccatccacgggatggcaggatgcgggaagtccgttctggctgctgaagcagtgcgtgatcatagtctgctggaagggtgcttccccggtggcgtccactgggtgagtgtgggcaagcaagataagtcagggttgctgatgaagctccaaaacctgtgtactcggctcgatcaggacgaatcctttagccagcgccttccgctcaacatcgaagaagctaaagacaggttgcggatcctgatgctgcggaagcacccaaggtctctgctgatcctcgacgacgtatgggatagctgggtgctgaaagcttttgactctcagtgccagatcctgctgaccactagggacaagtccgtgaccgactctgtcatgggacccaaatatgtcgtcccggtggagtcatcactgggtaaggagaagggcctcgagattttatcactctttgtcaacatgaaaaaggccgatctcccggaacaagcacattcaatcataaaagagtgcaaaggctcaccgctggttgtgagcttgattggtgctcttctgagagatttcccaaatcgctgggaatactatctgaagcagctgcagaataaacagttcaaacgaatccgcaagtccagtagttacgattacgaggccctggacgaggccatgtccatttcagtggagatgttgagggaggacatcaaggactattacacagatctgtccatcctgcagaaggacgtcaaagtccctactaaagtcctgtgcatcctgtgggatatggagaccgaagaagttgaagacatactgcaggagttcgtaaataagtccctgctcttctgcgaccggaatggaaagagtttccgctactacctacatgacttgcaagttgattttctcaccgaaaagaactgtagccaacttcaggatctgcacaagaagatcatcacacagtttcaaaggtatcaccaacctcacacgttgagcccggaccaggaggattgtatgtattggtataatttcttggcctatcacatggcaagcgccaagatgcacaaggaactgtgtgccctcatgttttcactggattggattaaggctaagactgaattagtgggcccagcacatctcatacatgagtttgtggaatacaggcacattctggacgaaaaagattgcgccgtgagtgaaaactttcaggagtttctaagtttgaacgggcatctacttggtaggcagcctttcccgaatattgtccagctgggcctgtgcgagccagaaactagtgaggtctatcagcaggccaaactccaggccaaacaagaggtggacaacggcatgctctacctggaatggattaataagaaaaatataaccaatctgagtcgcctggtggttagaccacataccgatgccgtgtatcacgcatgtttctccgaggacgggcagagaatcgcaagctgtggggcagataagacactgcaggtgtttaaagcagagactggggaaaaattactggagatcaaggcccacgaagatgaggtcctttgctgcgcgttctcgacggacgaccggtttatcgcaacttgctcagtcgataaaaaagtgaagatttggaactcaatgaccggcgagttggtgcacacatacgatgaacacagcgagcaagtcaattgctgccactttactaacagcagccaccaccttctgttggccactggttcctccgactgtttcctgaagttgtgggacctgaaccaaaaagagtgccgaaacacaatgttcgggcatactaactccgtaaatcattgtcggttctcaccggacgataagctactggcatcctgttccgcggacggcacactcaagctttgggatgccacttctgcaaacgaacggaagtctatcaatgtgaagcagtttttcctcaatttggaagatccacaggaggacatggaagtcatcgtgaagtgttgctcctggagtgccgatggggcacggatcatggtcgccgcaaagaataagattttcctgttcgacatccataccagtggcttgctgggggagatccatacaggccaccatagcaccatccagtactgcgacttttctccgcagaatcatctggctgtggtggcacttagccagtattgtgtggagctctggaacaccgacagccgctctaaggtggctgattgccgaggccatttgagctgggtgcacggggtgatgttctcacccgacggctcgagttttttgacttccagcgatgaccagacaatacgcctctgggaaactaagaaagtgtgcaaaaattcagctgtcatgctaaaacaggaggtggatgttgtgttccaggagaacgaagtgatggtcctggccgtagaccacatcaggcgactgcagttgataaatggtagaaccggtcagatagactacctgacagaggctcaggtaagttgttgttgtctcagtccccacctccagtacattgccttcggggacgaaaacggcgctatcgaaatactagaactggtgaataacaggattttccaatccaggttccagcacaagaaaactgtgtggcatatccaattcactgccgacgagaagactttgatttcatcttcagacgacgccgaaatacaagtctggaactggcagctggataagtgcatttttttgcggggtcaccaggagactgtgaaagacttcaggcttttaaagaactcgagactgctttcatggagctttgacggaaccgtcaaggtatggaatataatcactgggaacaaagagaaggactttgtatgccaccaaggcaccgtattaagctgcgacataagtcacgacgccaccaagttttcgtctacatctgccgacaaaacagcaaagatctggtcctttgatctgctcctgccactgcacgagctgagaggccataatgggtgcgtgagatgtagcgccttctcagtcgactccacactgctggccactggtgatgataatggcgagattcgtatatggaacgtgtcgaatggtgaactgctgcacctttgtgccccactgagcgaggaaggcgcagcgacacacgggggttgggtcacagacctctgtttcagccctgatgggaagatgttaatctcagccggaggatatataaaatggtggaatgttgtgacaggcgaatccagccaaacgttttacactaacggcacgaacctaaagaagattcacgtgagccctgatttcaagacgtacgtcacagttgacaacctgggcatactttacatcctgcagacgctggagtag

SEQ ID NO: 255835 - DNA, 5444 bp, Artificial Sequence
  derived and/or modified sequence
acttctacgcgcgcgggcatgagccgtggcaggagtgcgcggcggcagcggtggccgccccttggggcttggggtgtgtttatttgcataagcgggcgcgcgccgtccgggctgggtggatccggcgggatttgactgctccgctgtccagaggcggagaagaagaggtagcgagtggacgtgactgctctatcccgggcaaaagggatagaaccagaggtggggagtctgggcagtcggcgacccgcgaagacttgaggtgccgcagcggcatccggagtagcgccgggctccctccggggtgcagccgccgtcgggggaagggcgccacaggccgggaagacctcctccctttgtgtccagtagtggggtccaccggagggcggcccgtgggccgggcctcaccgcggcgctccgggactgtggggtcaggctgcgttgggtggacgcccacctcgccaaccttcggaggtccctgggggtcttcgtgcgccccggggctgcagagatccaggggaggcgcctgtgaggcccggacctgccccggggcgaagggtatgtggcgagacagagccctgcacccctaattcccggtggaaaactcctgttgccgtttccctccaccggcctggagtctcccagtcttgtcccggcagtgccgccctccccactaagacctaggcgcaaaggcttggctcatggttgacagctcagagagagaaagatctgagggaagatggatgcaaaagctcgaaattgtttgcttcaacatagagaagctctggaaaaggacatcaagacatcctacatcatggatcacatgattagtgatggatttttaacaatatcagaagaggaaaaagtaagaaatgagcccactcaacagcaaagagcagctatgctgattaaaatgatacttaaaaaagataatgattcctacgtatcattctacaatgctctactacatgaaggatataaagatcttgctgcccttctccatgatggcattcctgttgtctcttcttccagtggtaaagattcagttagtggaataacttcgtatgtaaggacagtcctgtgtgaaggtggagtaccacagaggccagttgtttttgtcacaaggaagaagctggtgaatgcaattcagcagaagctctccaaattgaaaggtgaaccaggatgggtcaccatacatggaatggcaggctgtgggaagtctgtattagctgcagaagctgttagagatcattcccttttagaaggttgtttcccagggggagtgcattgggtttcagttgggaaacaagacaaatctgggcttctgatgaaactgcagaatctttgcacacggttggatcaggatgagagtttttcccagaggcttccacttaatattgaagaggctaaagaccgtctccgcattctgatgcttcgcaaacacccaaggtctctcttgatcttggatgatgtttgggactcttgggtgttgaaagcttttgacagtcagtgtcagattcttcttacaaccagagacaagagtgttacagattcagtaatgggtcctaaatatgtagtccctgtggagagttccttaggaaaggaaaaaggacttgaaattttatccctttttgttaatatgaagaaggcagatttgccagaacaagctcatagtattataaaagaatgtaaaggctctccccttgtagtatctttaattggtgcacttttacgtgattttcccaatcgctgggagtactacctcaaacagcttcagaataagcagtttaagagaataaggaaatcttcgtcttatgattatgaggctctagatgaagccatgtctataagtgttgaaatgctcagagaagacatcaaagattattacacagatctttccatccttcagaaggacgttaaggtgcctacaaaggtgttatgtattctctgggacatggaaactgaagaagttgaagacatactgcaggagtttgtaaataagtctcttttattctgtgatcggaatggaaagtcgtttcgttattatttacatgatcttcaagtagattttcttacagagaagaattgcagccagcttcaggatctacataagaagataatcactcagtttcagagatatcaccagccgcatactctttcaccagatcaggaagactgtatgtattggtacaactttctggcctatcacatggccagtgccaagatgcacaaggaactttgtgctttaatgttttccctggattggattaaagcaaaaacagaacttgtaggccctgctcatctgattcatgaatttgtggaatacagacatatactagatgaaaaggattgtgcagtcagtgagaattttcaggagtttttatctttaaatggacaccttcttggacgacagccatttcctaatattgtacaactgggtctctgtgagccggaaacttcagaagtttatcagcaagctaagctgcaggccaagcaggaggtcgataatggaatgctttacctggaatggataaacaaaaaaaacatcacgaatctttcccgcttagttgtccgcccccacacagatgctgtttaccatgcctgcttttctgaggatggtcagagaatagcttcttgtggagctgataaaaccttacaggtgttcaaagctgaaacaggagagaaacttctagaaatcaaggctcatgaggatgaagtgctttgttgtgcattctctacagatgacagatttatagcaacctgctcagtggataaaaaagtgaagatttggaattctatgactggggaactagtacacacctatgatgagcactcagagcaagtcaattgctgccatttcaccaacagtagtcatcatcttctcttagccactgggtcaagtgactgcttcctcaaactttgggatttgaatcaaaaagaatgtcgaaataccatgtttggtcatacaaattcagtcaatcactgcagattttcaccagatgataagcttttggctagttgttcagctgatggaaccttaaagctttgggatgcgacatcagcaaatgagaggaaaagcattaatgtgaaacagttcttcctaaatttggaggaccctcaagaggatatggaagtgatagtgaagtgttgttcgtggtctgctgatggtgcaaggataatggtggcagcaaaaaataaaatctttctttttgacattcatactagtggcctattgggagaaatccacacgggccatcacagcaccatccagtactgtgacttctccccacaaaaccatttggcagtggttgctttgtcccagtactgtgtagagttgtggaatacagactcacgttcaaaggtggctgattgcagaggacatttaagttgggttcatggtgtgatgttttctcctgatggatcatcatttttgacatcttctgatgaccagacaatcaggctctgggagacaaagaaagtatgtaagaactctgctgtaatgttaaagcaagaagtagatgttgtgtttcaagaaaatgaagtgatggtccttgcagttgaccatataagacgtctgcaactcattaatggaagaacaggtcagattgattatctgactgaagctcaagttagctgctgttgcttaagtccacatcttcagtacattgcatttggagatgaaaatggagccattgagattttagaacttgtaaacaatagaatcttccagtccaggtttcagcacaagaaaactgtatggcacatccagttcacagccgatgagaagactcttatttcaagttctgatgatgctgaaattcaggtatggaattggcaattggacaaatgtatctttctacgaggccatcaggaaacagtgaaagactttagactcttgaaaaattcaagactgctttcttggtcatttgatggaacagtgaaggtatggaatattattactggaaataaagaaaaagactttgtctgtcaccagggtacagtactttcttgtgacatttctcacgatgctaccaagttttcatctacctctgctgacaagactgcaaagatctggagttttgatctccttttgccacttcatgaattgaggggccacaacggctgtgtgcgctgctctgccttctctgtggacagtaccctgctggcaacgggagatgacaatggagaaatcaggatatggaatgtctcaaacggtgagcttcttcatttgtgtgctccgctttcagaagaaggagctgctacccatggaggctgggtgactgacctttgcttttctccagatggcaaaatgcttatctctgctggaggatatattaagtggtggaacgttgtcactggggaatcctcacagaccttctacacaaatggaaccaatcttaagaaaatacacgtgtcccctgacttcaaaacatatgtgactgtggataatcttggtattttatatattttacagactttagaataaaatagttaagcattaatgtagttgaactttttaaatttttgaattggaaaaaaattctaatgaaaccctgatatcaactttttataaagctcttaattgttgtgcagtattgcattcattacaaaagtgtttgtggttggatgaataatattaatgtagctttttcccaaatgaacatacctttaatcttgtttttcatgatcatcattaacagtttgtccttaggatgcaaatgaaaatgtgaatacataccttgttgtactgttggtaaaattctgtcttgatgcattcaaaatggttgacataattaatgagaagaatttggaagaaattggtattttaatactgtctgtatttattactgttatgcaggctgtgcctcagggtagcagtggcctgctttttgaaccacacttaccccaagggggttttgttctcctaaatacaatcttagaggttttttgcactctttaaatttgctttaaaaatattgtgtctgtgtgcatagtctgcagcatttcctttaattgactcaataagtgagtcttggatttagcaggcccccccaccttttttttttgtttttggagacagagtcttgctttgttgccaggctggagtgcagtggcgcgatctcggctcaccacaatcgctgcctcctgggttcaagcaattctcctgcctcagcctcccgagtagctgggactacaggtgtgcgcacatgccaggctaatttttgtatttttagtagagacggggtttcaccatgttggccgggatggtctcgatctcttgacctcatgatctacccgccttggcctcccaaagtgctgagattacaggcgtgagccaccgtgcctggccaggccccttctcttttaatggagacagggtcttgcactatcacccaggctggagtgcagtggcataatcatacctcattgcagcctcagactcctgg

SEQ ID NO: 255836 - DNA, 3747 bp, Artificial Sequence
  derived and/or modified sequence
atggacgccaaggccagaaactgcctgctgcagcacagagaggccctggagaaggacatcaagaccagctacatcatggaccacatgatcagcgacggcttcctgaccatcagcgaggaggagaaggtgagaaacgagcccacccagcagcagagagccgccatgctgatcaagatgatcctgaagaaggacaacgacagctacgtgagcttctacaacgccctgctgcacgagggctacaaggacctggccgccctgctgcacgacggcatccccgtggtgagcagcagcagcggcaaggacagcgtgagcggcatcaccagctacgtgagaaccgtgctgtgcgagggcggcgtgccccagagacccgtggtgttcgtgaccagaaagaagctggtgaacgccatccagcagaagctgagcaagctgaagggcgagcccggctgggtgaccatccacggcatggccggctgcggcaagagcgtgctggccgccgaggccgtgagagaccacagcctgctggagggctgcttccccggcggcgtgcactgggtgagcgtgggcaagcaggacaagagcggcctgctgatgaagctgcagaacctgtgcaccagactggaccaggacgagagcttcagccagagactgcccctgaacatcgaggaggccaaggacagactgagaatcctgatgctgagaaagcaccccagaagcctgctgatcctggacgacgtgtgggacagctgggtgctgaaggccttcgacagccagtgccagatcctgctgaccaccagagacaagagcgtgaccgacagcgtgatgggccccaagtacgtggtgcccgtggagagcagcctgggcaaggagaagggcctggagatcctgagcctgttcgtgaacatgaagaaggccgacctgcccgagcaggcccacagcatcatcaaggagtgcaagggcagccccctggtggtgagcctgatcggcgccctgctgagagacttccccaacagatgggagtactacctgaagcagctgcagaacaagcagttcaagagaatcagaaagagcagcagctacgactacgaggccctggacgaggccatgagcatcagcgtggagatgctgagagaggacatcaaggactactacaccgacctgagcatcctgcagaaggacgtgaaggtgcccaccaaggtgctgtgcatcctgtgggacatggagaccgaggaggtggaggacatcctgcaggagttcgtgaacaagagcctgctgttctgcgacagaaacggcaagagcttcagatactacctgcacgacctgcaggtggacttcctgaccgagaagaactgcagccagctgcaggacctgcacaagaagatcatcacccagttccagagataccaccagccccacaccctgagccccgaccaggaggactgcatgtactggtacaacttcctggcctaccacatggccagcgccaagatgcacaaggagctgtgcgccctgatgttcagcctggactggatcaaggccaagaccgagctggtgggccccgcccacctgatccacgagttcgtggagtacagacacatcctggacgagaaggactgcgccgtgagcgagaacttccaggagttcctgagcctgaacggccacctgctgggcagacagcccttccccaacatcgtgcagctgggcctgtgcgagcccgagaccagcgaggtgtaccagcaggccaagctgcaggccaagcaggaggtggacaacggcatgctgtacctggagtggatcaacaagaagaacatcaccaacctgagcagactggtggtgagaccccacaccgacgccgtgtaccacgcctgcttcagcgaggacggccagagaatcgccagctgcggcgccgacaagaccctgcaggtgttcaaggccgagaccggcgagaagctgctggagatcaaggcccacgaggacgaggtgctgtgctgcgccttcagcaccgacgacagattcatcgccacctgcagcgtggacaagaaggtgaagatctggaacagcatgaccggcgagctggtgcacacctacgacgagcacagcgagcaggtgaactgctgccacttcaccaacagcagccaccacctgctgctggccaccggcagcagcgactgcttcctgaagctgtgggacctgaaccagaaggagtgcagaaacaccatgttcggccacaccaacagcgtgaaccactgcagattcagccccgacgacaagctgctggccagctgcagcgccgacggcaccctgaagctgtgggacgccaccagcgccaacgagagaaagagcatcaacgtgaagcagttcttcctgaacctggaggacccccaggaggacatggaggtgatcgtgaagtgctgcagctggagcgccgacggcgccagaatcatggtggccgccaagaacaagatcttcctgttcgacatccacaccagcggcctgctgggcgagatccacaccggccaccacagcaccatccagtactgcgacttcagcccccagaaccacctggccgtggtggccctgagccagtactgcgtggagctgtggaacaccgacagcagaagcaaggtggccgactgcagaggccacctgagctgggtgcacggcgtgatgttcagccccgacggcagcagcttcctgaccagcagcgacgaccagaccatcagactgtgggagaccaagaaggtgtgcaagaacagcgccgtgatgctgaagcaggaggtggacgtggtgttccaggagaacgaggtgatggtgctggccgtggaccacatcagaagactgcagctgatcaacggcagaaccggccagatcgactacctgaccgaggcccaggtgagctgctgctgcctgagcccccacctgcagtacatcgccttcggcgacgagaacggcgccatcgagatcctggagctggtgaacaacagaatcttccagagcagattccagcacaagaagaccgtgtggcacatccagttcaccgccgacgagaagaccctgatcagcagcagcgacgacgccgagatccaggtgtggaactggcagctggacaagtgcatcttcctgagaggccaccaggagaccgtgaaggacttcagactgctgaagaacagcagactgctgagctggagcttcgacggcaccgtgaaggtgtggaacatcatcaccggcaacaaggagaaggacttcgtgtgccaccagggcaccgtgctgagctgcgacatcagccacgacgccaccaagttcagcagcaccagcgccgacaagaccgccaagatctggagcttcgacctgctgctgcccctgcacgagctgagaggccacaacggctgcgtgagatgcagcgccttcagcgtggacagcaccctgctggccaccggcgacgacaacggcgagatcagaatctggaacgtgagcaacggcgagctgctgcacctgtgcgcccccctgagcgaggagggcgccgccacccacggcggctgggtgaccgacctgtgcttcagccccgacggcaagatgctgatcagcgccggcggctacatcaagtggtggaacgtggtgaccggcgagagcagccagaccttctacaccaacggcaccaacctgaagaagatccacgtgagccccgacttcaagacctacgtgaccgtggacaacctgggcatcctgtacatcctgcagaccctggagtag

SEQ ID NO: 255837 - protein, 1163 aa, Artificial Sequence
  derived and/or modified sequence
MDAKARNCLLQHREALEKDIKTSYIMDHMISDGFLTISEEEKVRNEPTQQQRAAMLIKMILKKDNDSYVSFYNALLHEGYKDLAALLHDGIPVVSSSSGKDSVSGITSYVRTVLCEGGVPQRPVVFVTRKKLVNAIQQKLSKLKGEPGWVTIHGMAGCGKSVLAAEAVRDHSLLEGCFPGGVHWVSVGKQDKSGLLMKLQNLCTRLDQDESFSQRLPLNIEEAKDRLRILMLRKHPRSLLILDDVWDSWVLKAFDSQCQILLTTRDKSVTDSVMGPKYVVPVESSLGKEKGLEILSLFVNMKKADLPEQAHSIIKECKGSPLVVSLIGALLRDFPNRWEYYLKQLQNKQFKRIRKSSSYDYEALDEAMSISVEMLREDIKDYYTDLSILQKDVKVPTKVLCILWDMETEEVEDILQEFVNKSLLFCDRNGKSFRYYLHDLQVDFLTEKNCSQLQDLHKKIITQFQRYHQPHTLSPDQEDCMYWYNFLAYHMASAKMHKELCALMFSLDWIKAKTELVGPAHLIHEFVEYRHILDEKDCAVSENFQEFLSLNGHLLGRQPFPNIVQLGLCEPETSEVYQQAKLQAKQEVDNGMLYLEWINKKNITNLSRLVVRPHTDAVYHACFSEDGQRIASCGADKTLQVFKAETGEKLLEIKAHEDEVLCCAFSTDDRFIATCSVDKKVKIWNSMTGELVHTYDEHSEQVNCCHFTNSSHHLLLATGSSDCFLKLWDLNQKECRNTMFGHTNSVNHCRFSPDDKLLASCSADGTLKLWDATSANERKSINVKQFFLNLEDPQEDMEVIVKCCSWSADGARIMVAAKNKIFLWNTDSRSKVADCRGHLSWVHGVMFSPDGSSFLTSSDDQTIRLWETKKVCKNSAVMLKQEVDVVFQENEVMVLAVDHIRRLQLINGRTGQIDYLTEAQVSCCCLSPHLQYIAFGDENGAIEILELVNNRIFQSRFQHKKTVWHIQFTADEKTLISSSDDAEIQVWNWQLDKCIFLRGHQETVKDFRLLKNSRLLSWSFDGTVKVWNIITGNKEKDFVCHQGTVLSCDISHDATKFSSTSADKTAKIWNVSNGELLHLCAPLSEEGAATHGGWVTDLCFSPDGKMLISAGGYIKWWNVVTGESSQTFYTNGTNLKKIHVSPDFKTYVTVDNLGILYILQTLE

SEQ ID NO: 255838 - protein, 1205 aa, Artificial Sequence
  derived and/or modified sequence
MDAKARNCLLQHREALEKDIKTSYIMDHMISDGFLTISEEEKVRNEPTQQQRAAMLIKMILKKDNDSYVSFYNALLHEGYKDLAALLHDGIPVVSSSSGKDSVSGITSYVRTVLCEGGVPQRPVVFVTRKKLVNAIQQKLSKLKGEPGWVTIHGMAGCGKSVLAAEAVRDHSLLEGCFPGGVHWVSVGKQDKSGLLMKLQNLCTRLDQDESFSQRLPLNIEEAKDRLRILMLRKHPRSLLILDDVWDSWVLKAFDSQCQILLTTRDKSVTDSVMGPKYVVPVESSLGKEKGLEILSLFVNMKKADLPEQAHSIIKECKGSPLVVSLIGALLRDFPNRWEYYLKQLQNKQFKRIRKSSSYDYEALDEAMSISVEMLREDIKDYYTDLSILQKDVKVPTKVLCILWDMETEEVEDILQEFVNKSLLFCDRNGKSFRYYLHDLQVDFLTEKNCSQLQDLHKKIITQFQRYHQPHTLSPDQEDCMYWYNFLAYHMASAKMHKELCALMFSLDWIKAKTELVGPAHLIHEFVEYRHILDEKDCAVSENFQEFLSLNGHLLGRQPFPNIVQLGLCEPETSEVYQQAKLQAKQEVDNGMLYLEWINKKNITNLSRLVVRPHTDAVYHACFSEDGQRIASCGADKTLQVFKAETGEKLLEIKAHEDEVLCCAFSTDDRFIATCSVDKKVKIWNSMTGELVHTYDEHSEQVNCCHFTNSSHHLLLATGSSDCFLKLWDLNQKECRNTMFGHTNSVNHCRFSPDDKLLASCSADGTLKLWDATSANERKSINVKQFFLNLEDPQEDMEVIVKCCSWSADGARIMVAAKNKIFLWNTDSRSKVADCRGHLSWVHGVMFSPDGSSFLTSSDDQTIRLWETKKVCKNSAVMLKQEVDVVFQENEVMVLAVDHIRRLQLINGRTGQIDYLTEAQVSCCCLSPHLQYIAFGDENGAIEILELVNNRIFQSRFQHKKTVWHIQFTADEKTLISSSDDAEIQVWNWQLDKCIFLRGHQETVKDFRLLKNSRLLSWSFDGTVKVWNIITGNKEKDFVCHQGTVLSCDISHDATKFSSTSADKTAKIWSFDLLLPLHELRGHNGCVRCSAFSVDSTLLATGDDNGEIRIWNVSNGELLHLCAPLSEEGAATHGGWVTDLCFSPDGKMLISAGGYIKWWNVVTGESSQTFYTNGTNLKKIHVSPDFKTYVTVDNLGILYILQTLE

SEQ ID NO: 255839 - DNA, 3492 bp, Artificial Sequence
  derived and/or modified sequence
atggatgccaaggcccggaactgcttgctgcagcaccgcgaagccctggagaaggatattaaaacctcatacataatggatcatatgatttccgatggttttttgacgatcagtgaggaagaaaaggtgcgcaacgagccgacccagcaacagcgcgccgccatgctgatcaagatgatcttgaagaaagacaatgattcatacgtgtccttctataacgctttgctacacgagggatacaaggacctggcagcactgctgcatgatggaatccctgtggtctcctcttcctccggaaaagacagcgtgagtggcatcacttcatatgtgagaactgttctctgcgaaggaggcgtcccgcagagacccgtggtgttcgtgaccaggaagaaattagtcaacgccattcagcaaaagctttcgaaactcaaaggcgaaccagggtgggtcaccatccatgggatggctggatgcggaaaaagcgtcctcgccgccgaagcagtacgagaccactccctgcttgagggctgtttccctggaggagtgcattgggtatcggtagggaagcaggataagtctggcttgctgatgaagttacagaatctgtgtactagactggaccaagacgagagcttctctcagcgactgcctctgaatatcgaggaagccaaagatcggcttcgcatcttaatgctacgcaagcatccaagaagccttctgatactcgatgacgtctgggattcatgggtgttgaaggcatttgactcccagtgccagattctcctcaccacgagagacaagagcgtgactgatagtgtgatggggcctaagtacgtcgtgccggtcgaaagttcccttggcaaagagaagggcctcgaaattcttagtctgttcgtcaacatgaaaaaagcagacctgcccgagcaggcccactcaatcatcaaagaatgcaaggggagcccccttgtggtgagcctgatcggtgccctgttgagggacttccccaacaggtgggaatactacctgaagcagttgcagaataaacagttcaagcgcatcaggaaaagctcatcgtacgactacgaggctctggacgaagcgatgtcaatcagcgttgaaatgcttcgggaggacatcaaggattactacactgatttgtctatactgcagaaagacgtaaaggtgcctacgaaggtgctttgtatactgtgggacatggaaaccgaggaagtcgaggatattctccaagaatttgtgaataagagccttttattttgtgatagaaacggcaaatcctttagatactacctacacgatctgcaagtggatttcctcacggaaaaaaactgcagccagcttcaagacctgcataaaaaaataatcacccagttccagagataccaccagccacacacgctgtcacccgaccaagaagactgcatgtactggtataattttttggcctatcatatggcatcagcaaagatgcacaaagaattgtgtgcactaatgtttagtttggactggattaaagcgaaaactgagctggtcggtccagcacatctgatacacgagttcgttgaatatcgtcatatcttggacgaaaaggactgcgctgttagcgagaattttcaggaatttctatccctaaatggtcatctgttgggccgtcagccctttccaaacattgtgcaacttggcttgtgtgagcctgaaaccagtgaggtctaccaacaggcaaaactgcaggcaaagcaagaggttgacaatgggatgctgtatctggaatggatcaacaagaaaaacatcacaaatctcagtaggctggtcgttcggccccacacggatgcagtctatcatgcatgcttctctgaagacggccagcggatagcaagttgtggcgctgacaaaacactgcaggtatttaaggcagaaacgggagaaaagctactagagattaaagctcacgaagatgaagtcctctgctgcgccttttcaacggacgatagatttatcgccacttgctcagtggataaaaaggtcaaaatctggaatagcatgaccggcgagctggtacacacatatgatgaacattcggagcaagttaactgttgccactttacgaattcctctcaccacctgttactggctactggtagctctgattgcttcctaaaactgtgggatctgaaccagaaggagtgccgtaacaccatgttcggtcataccaatagcgtaaatcattgtcgctttagcccggacgacaagcttctggcttcctgttccgcggatggtaccctaaagttgtgggacgccacttctgctaacgaacggaagtccattaacgtgaagcagtttttcctgaatttggaagacccccaggaagacatggaggttatcgtgaagtgctgctcttggtctgcagacggcgccagaataatggtggccgctaaaaataagatctttctttggaacacggactctaggtccaaagtcgcggattgccgggggcatcttagctgggtgcacggcgtcatgttctcacccgacggttcgagcttcttgaccagtagtgacgaccaaacaattcgcctttgggaaacaaaaaaggtgtgtaagaatagtgcagtcatgctgaagcaggaagtagatgtggtgtttcaggagaacgaagtcatggtgttggccgtagaccatatccggcgtttgcagctgataaatggccggacggggcagatcgattatttgactgaggctcaggtatcttgctgttgtctgtctccacaccttcaatatatcgcttttggcgacgagaatggcgctatcgagatcctcgagctggtaaataatagaatcttccagagtaggttccagcacaagaaaacagtttggcatattcagtttaccgctgacgaaaagactctcatttcctcttctgacgatgctgagatccaagtgtggaattggcaactggataaatgcatcttcctccgcggacatcaggagactgttaaagattttcggttacttaagaacagcagacttttgagttggtcatttgacgggactgtcaaggtttggaacatcattaccgggaacaaggagaaagacttcgtgtgtcaccagggcactgtactttcatgtgatatttcccacgatgccactaaattctcatcaacgagcgctgacaagaccgccaagatttggaatgtgtctaacggggagctcctgcacctttgcgctcctctttcagaagaaggggcggcaactcatggaggatgggtgaccgatctgtgcttctctcctgatggcaaaatgctaattagcgctggcggatacatcaagtggtggaatgtagtaactggtgaaagtagccaaactttctataccaatgggaccaacctaaagaaaatacacgtgtctcccgatttcaaaacatatgtaactgtggacaatctcgggatactttacattctgcagacgctcgagtag

SEQ ID NO: 255840 - DNA, 3618 bp, Artificial Sequence
  derived and/or modified sequence
atggacgccaaagcaagaaattgcttgttacagcatagagaggcgctggaaaaagatattaaaaccagttacattatggatcatatgattagtgacggctttctgacaattagcgaggaagaaaaggtccgcaatgagccaacacaacagcagcgggcagcaatgctcattaagatgatccttaagaaagataacgacagctatgtgtccttttacaatgccctgctgcacgaaggttataaagacctagcagctcttctacatgacggaatccccgtggtgtcatcaagttcgggaaaggatagtgtcagcggcatcacctcttacgttcggacagttctttgcgaagggggtgtccctcaaagacccgtggtcttcgtgacccggaagaaactggtaaatgcaatccagcaaaagttaagcaaactgaaaggtgagcccgggtgggtaacgatccatggcatggcaggatgtggaaagagtgtgctcgcagcagaggccgtgagggatcacagtctgcttgagggatgcttcccaggaggcgtgcattgggtgtcagtaggtaagcaggataaatctggcctgctgatgaaacttcaaaacctctgtacaagactggatcaggacgagtctttcagccagcggctaccactcaatattgaagaggctaaggatagactgcgcattctcatgctccgtaaacatccacggagtctccttatactggacgatgtgtgggactcatgggttctgaaggcctttgactcacagtgtcagatactcctgacgacgcgggacaaatctgttactgactcagtaatgggcccgaaatacgtggtacccgtggagagctcactagggaaagagaaaggtctggagatcctctcactatttgtgaatatgaaaaaggctgatctgcccgagcaggctcattctatcattaaagaatgtaaaggaagcccactggtggtctcacttataggcgctctcctccgagactttcccaaccggtgggaatactacctgaagcaactgcagaataagcagtttaagagaatcaggaagagttcttcgtacgattacgaagctctggacgaagcaatgtcgatctctgtcgagatgctccgtgaagacatcaaagactattatacagatcttagcattctccaaaaggacgtcaaagtccccacaaaggttctctgtattctgtgggatatggaaaccgaggaagtcgaggatattcttcaggaatttgtcaataagagtctgttgttctgtgatcggaacggtaagagctttcgatattatctacacgatttacaggtcgatttcctgaccgagaaaaactgctcacaattgcaggatttgcacaagaaaatcattacacagtttcagagatatcaccagccgcacacactgtcacctgaccaggaggattgcatgtactggtataacttcctcgcataccacatggccagcgcgaaaatgcacaaggaactgtgcgccctgatgttttcactagattggattaaggccaaaacagaactggtgggcccagcgcatctgatccatgaatttgtcgaataccggcatattcttgatgaaaaggattgtgctgtctctgaaaattttcaggagttcctgtccttgaacggccacttactcggcaggcagccttttccaaacatcgttcaactgggcttatgtgagcctgagacttccgaggtgtaccagcaggccaagttacaggccaagcaggaggttgacaatggaatgctgtacctggagtggattaataaaaaaaacattactaatctgagccggctcgtggtccgtccacatacggacgccgtttaccacgcctgttttagcgaggatgggcagagaatcgctagctgcggcgcggataagactctgcaagtctttaaggccgagaccggcgagaaactgcttgagatcaaagcccatgaggacgaggtgctttgttgtgctttcagcactgacgatagattcattgctacatgtagtgttgataaaaaggttaagatctggaattccatgaccggggagctggtgcacacgtacgacgagcatagcgagcaggtcaactgctgccactttactaattcaagtcatcacctgcttctcgctacaggcagctccgattgttttcttaagctgtgggatctgaatcagaaggaatgcagaaatacaatgttcggtcacacaaactcagtgaatcactgtcgattcagtccagacgataaactgctggcctcttgctccgccgacgggactctcaagttatgggatgccacttctgccaacgagagaaagtccataaacgtcaagcaatttttcctcaatctagaagatccacaggaggacatggaggtgatagtaaaatgctgctcatggtctgcagacggagctcgtatcatggtggcagcaaaaaacaagatatttttgtggaacaccgacagccggtccaaagtggccgattgtcgggggcatttatcatgggttcacggcgtgatgttttctcccgacgggtctagctttttgacaagctccgacgaccagaccattcgtctgtgggagacaaagaaagtttgcaaaaactctgctgtgatgctcaaacaggaagtagacgtcgtgtttcaagagaacgaagtcatggtactggccgtggatcacattcgccggctccaactcatcaacgggcgaacaggccaaatcgattacctgaccgaggctcaggtctcctgttgttgcctttcaccacacctccagtacatagcgtttggcgacgagaatggagccatagagatcctcgaattggtcaataacagaatctttcagtcacgctttcaacataagaagacagtgtggcacattcagttcactgctgacgaaaaaacactgatttccagttccgatgatgccgaaattcaggtctggaactggcagctagacaaatgtatttttctgcgggggcaccaggagacggttaaagacttccgcttattaaaaaattcgagactactaagctggtcattcgatgggaccgtaaaggtgtggaacattatcactggaaacaaggagaaagatttcgtctgccaccagggcactgtcttgtcttgtgacatcagccatgatgctaccaagttctccagcacatcggccgacaaaacagctaagatctggtcatttgacttactcctgcccttgcatgagctgcgaggccataatggatgcgtaaggtgcagcgccttttccgttgatagtactctgctggcaactggtgatgataacggagagattaggatttggaatgtcagtaacggcgaactgctgcacctatgtgctcctctgtctgaggaaggtgcagccacgcacggcggatgggtgacggacctgtgctttagtcctgacggtaaaatgctgatatcagcaggaggatatattaagtggtggaatgtcgtaaccggcgaaagctcacagactttctatacgaacgggaccaaccttaagaagatccacgtatccccagacttcaagacctatgtgacagtggacaatctggggatactgtacattctgcagactctggagtag

SEQ ID NO: 255841 - DNA, 3618 bp, Artificial Sequence
  derived and/or modified sequence
atggatgcaaaggccagaaattgccttcttcaacacagggaagctttagagaaggacattaaaactagctacattatggaccatatgatctctgatggattcctcacaatatcagaagaggagaaggtaagaaacgagccaactcagcagcagcgggctgctatgctcatcaagatgattctgaagaaagacaacgactcctacgtgtcgttttacaatgccctgctgcatgagggctacaaagacctggccgcccttctgcatgacggcatcccagttgtatctagcagctctgggaaagatagcgtttcagggattacatcctacgtgcggaccgtcctatgtgaaggcggggtacctcagagacccgtggtctttgtcacccgcaaaaaactggtgaatgccatacagcaaaaacttagtaagcttaaaggcgagccgggatgggtgacaatccacgggatggcaggttgtgggaagtctgtgctggccgccgaagccgtccgtgaccattcattgctggaaggatgttttcctgggggtgtacactgggtctctgttgggaagcaggacaagagtggcttactgatgaagcttcagaacctgtgcacccgactcgaccaggacgaaagcttcagccagaggctgccccttaatatcgaagaggccaaggacagattgcggattctcatgcttagaaaacacccaagatccctccttatcctggacgacgtgtgggatagttgggtgctgaaggcatttgactctcaatgccaaatcctactaaccacaagggacaaatcagttacagatagtgtcatggggccgaaatatgtggtgcctgttgaatccagcttaggaaaagagaaaggtcttgaaatcctgtctttgttcgtgaatatgaagaaagccgacctgcctgaacaggcacacagcattattaaggaatgcaaagggagcccgctggtagtaagtctcatcggcgcactcttgcgagacttccctaataggtgggaatactacctgaagcaattgcagaataaacagttcaagaggataagaaagtctagctcctacgattacgaggcactggacgaagcaatgtcaataagcgtggagatgcttcgcgaggatataaaagattactacacggacctgtctattttgcagaaggacgtcaaagtgccaacaaaggttctgtgcattctttgggacatggagacagaggaggtggaagatatactccaagagttcgtaaataagtccctccttttttgtgacagaaacgggaagtctttcagatattacctccacgacctgcaggtggacttcttaacggaaaagaattgttcgcagttgcaggatctgcataagaaaatcattactcagtttcaaagataccatcaacctcataccttaagccccgatcaggaagattgcatgtattggtacaacttccttgcctatcacatggcttctgctaagatgcacaaagaactatgtgctctaatgttttccctcgactggattaaggctaagacagaactggtggggcctgcgcacttaatccacgagtttgtcgagtatagacacatacttgatgagaaagattgcgctgtgagcgagaattttcaggaattcctctctttgaacgggcacctgctgggccgacaaccttttccgaacatcgttcagttaggactttgcgagccagagacttctgaggtttaccagcaggccaaactacaggctaaacaggaggttgacaatggcatgctttatctggaatggattaacaagaagaacatcaccaacctgtcacgccttgtggtcaggccacacacggatgcagtctaccacgcctgtttctccgaagacggccaaagaatcgcaagctgtggggccgataagactttgcaggtttttaaggctgaaacaggtgaaaagttgctagagattaaagcacacgaggatgaggtgttatgctgcgcgttctctaccgatgatcgatttattgcaacgtgctctgtcgacaagaaggtgaaaatttggaactcaatgaccggggagttagtccacacctatgatgagcactccgaacaggttaactgctgccacttcaccaatagctcccaccatttactcttggctactggatcttctgactgtttcctgaaactctgggatctgaatcagaaagagtgccgcaacactatgttcgggcacacaaactctgttaaccactgtcgattctctccagacgataaacttctggcttcctgctctgccgacgggactctgaagttatgggatgccacctcagcaaatgagcgtaagtcaataaatgtgaagcagttttttctcaacctggaagatcctcaggaagacatggaggtgatagttaaatgttgttcgtggtctgctgatggggccagaatcatggtagccgccaaaaacaagatattcctgtggaatacagattctaggagcaaggtggcagactgtagagggcatctctcttgggtgcacggggtgatgtttagccccgatggatccagcttcctgacgagcagtgatgaccaaacaatacgcctctgggagaccaagaaagtgtgtaagaactctgctgtaatgctcaagcaggaagtcgatgtcgtctttcaggaaaatgaggttatggtgttagccgtcgaccacattcgccgcttacagctcataaatggacggacaggccagatcgactacctgactgaggcccaagtttcgtgttgttgtttgagcccacacctacagtacattgccttcggagacgaaaacggcgctatagaaattctcgagctggtaaataaccgaatcttccagtccaggtttcagcacaaaaagactgtctggcatattcagtttaccgctgacgagaaaaccctcatatcatcctcagatgatgcagagattcaagtttggaactggcagctggacaagtgtatcttcctgcgcgggcaccaggagactgtgaaggattttaggctcctcaagaactccaggctgctctcttggtcatttgatgggacggtcaaggtgtggaacatcattacgggcaacaaggagaaggacttcgtgtgccatcagggcactgtgctttcatgcgatatcagccatgacgctactaagttcagctcaacaagcgccgacaaaacagccaaaatctggtcatttgatctgctcctgccgttgcatgagctaagaggccacaatggttgcgtaaggtgtagtgcattcagtgtagacagcacactacttgctacaggggatgataatggagagatccggatctggaatgtgtccaacggtgaactgctgcacttgtgcgcccctctgagcgaggagggagccgccacccacggcgggtgggtcaccgatctttgtttttccccggacggcaagatgctgataagcgcaggcggttacatcaaatggtggaacgtggtcactggggaaagctcccaaacgttctatacaaacggcacaaacctcaagaaaatacatgtgtcgcctgactttaagacctacgtgacggttgacaatttggggatactgtacattctgcagaccctggagtag

SEQ ID NO: 255842 - DNA, 3492 bp, Artificial Sequence
  derived and/or modified sequence
atggacgccaaggcccgcaattgcctcctgcagcatcgggaggccctggaaaaggacatcaagacatcatatataatggaccatatgatctctgacggctttttaaccatctcagaggaggaaaaagtgcgaaatgaacctacacaacagcagagagccgctatgcttatcaaaatgatattgaagaaggacaatgactcttacgtctctttttataacgcactgctccatgaaggttataaggacctggcagctctactccacgacggaatcccagtcgtgtcgtcttcatcaggtaaggattctgtgtctggtatcacttcgtatgtgcgcaccgtgttgtgcgaagggggggtcccgcagaggccagtggtgtttgtgacccgcaaaaagttggtgaatgccatccagcaaaagctgagcaagctgaaaggcgaacccggctgggtgaccattcacggtatggccgggtgcgggaagagcgttttagctgccgaggccgtaagggaccacagtcttctcgagggatgcttccccggaggagtacactgggtgtctgtgggcaagcaagacaagtccggccttctgatgaagctgcaaaatctgtgtacaaggttggatcaggacgaatccttcagccagcggctacctctgaatattgaggaagctaaggaccggctgagaatcctgatgcttcgaaagcatccccgctccctcttgatcctggacgatgtgtgggacagctgggttctgaaggccttcgactcccagtgccagatactgctgacgacccgtgataagtcagtgacggactccgtcatgggacctaagtatgtagtccccgtagaaagctcactgggaaaggaaaaaggtcttgaaattctgtctttgtttgtgaacatgaagaaagctgacttacctgagcaggcccacagtatcattaaagaatgcaaggggtcccctttggtcgtgtccctgatcggtgctcttctccgagactttcccaaccgctgggagtattacctgaagcagctgcagaacaagcaatttaaaaggatcaggaaaagcagtagctatgattatgaggcccttgatgaggccatgtccattagtgttgagatgctgcgcgaggatataaaggactactatacggatctctctatactccagaaggacgtaaaagtccccaccaaagtgttgtgcatcctgtgggacatggagacggaggaggtcgaggatattctccaggaatttgtcaataaaagtcttcttttttgtgatcggaatggcaagtccttcagatattacttgcacgacctccaggtggatttcctcacagagaaaaactgttcccagctgcaggacttacataagaaaataattactcaattccagcgataccatcaaccgcacacactctctcccgaccaggaagattgtatgtactggtacaattttttggcctaccatatggcttccgcgaagatgcacaaggagctgtgtgctcttatgtttagcctggattggatcaaagctaaaactgagctggtgggccctgctcacctcatccacgagtttgtcgagtacagacacattctggacgaaaaggactgcgccgttagcgagaacttccaggaatttctctctcttaatgggcatttactgggaagacagccattccccaatattgtgcaactcggactctgcgagcctgaaacttccgaagtgtatcaacaggccaaattacaggcgaagcaggaggtcgataacgggatgctgtacctggaatggataaacaagaagaatatcactaatctgagtcgactggtggtccgcccacacaccgatgctgtgtatcacgcttgcttttctgaggatggacagagaatagcttcctgcggtgcggacaaaaccctgcaggttttcaaagcagaaacaggagaaaaactgcttgagatcaaggcacatgaggacgaagtgctgtgttgtgcattttctactgatgatcgttttattgctacatgcagcgtagataagaaagtaaagatctggaacagcatgacgggagagctcgtacacacctatgacgaacactccgagcaagtcaattgttgtcactttacaaactcctctcatcatttgctgctggcaaccgggtcgagcgactgcttcctgaaactgtgggacctgaatcagaaagagtgtcgtaataccatgtttggacacaccaacagcgtaaaccattgtcgcttctcacccgacgacaagcttcttgcaagctgttccgccgatggtaccctaaagctgtgggatgctactagtgctaacgaaagaaagagtatcaatgtcaagcagttcttcctcaacctagaagatcctcaggaagacatggaagtaatcgtaaaatgctgcagctggtccgctgatggcgccaggattatggtagctgccaagaacaagattttcctgtggaatactgactccagaagcaaggtggctgactgtaggggacacctcagttgggttcatggcgtaatgttctctccagacggttcctcatttctgacatcttcagacgaccagacgatacggctatgggagacaaagaaggtatgcaaaaatagtgcagtaatgctgaagcaggaagtggatgtcgtgttccaggagaacgaggtcatggtcctggctgtcgaccacatccgtcggcttcaactgatcaacggacgaacaggacaaatcgactatctaactgaggcgcaggtttcctgctgttgcttatccccccatctgcagtatattgcctttggtgacgagaacggagctattgagatactcgaactcgtcaacaatcgtatcttccagtcccggtttcagcacaaaaagacagtgtggcacatccagttcacagcagacgaaaagactctgataagctctagcgatgatgctgagattcaagtgtggaactggcaactggataagtgcatttttctgagaggacatcaagaaacagtgaaggactttagacttctgaagaactccaggctgctgagctggtctttcgacggaaccgtcaaagtgtggaatatcattaccggcaataaggagaaagatttcgtgtgtcaccaggggactgtgctaagttgcgacatctcccacgatgcaaccaagttctcttcaacatcagccgacaagacagctaagatctggaatgtttccaacggtgaactgcttcacctttgtgcaccccttagcgaggaaggcgctgccacccacgggggatgggtgaccgacctgtgcttctcgccagatggtaagatgctgatctccgcagggggctacattaaatggtggaacgtcgtgaccggcgagagtagccagacattctacaccaacggaactaacctcaagaagatccatgtcagtcccgattttaagacgtatgtgacagtggacaatttgggtatcctgtacatcctgcagacgcttgagtag

SEQ ID NO: 255843 - DNA, 3492 bp, Artificial Sequence
  derived and/or modified sequence
atggatgccaaggccaggaactgcctgctgcagcaccgggaggccctggagaaggacatcaagaccagctacatcatggaccacatgatcagtgatggcttcctgaccatcagcgaggaggagaaggtgagaaatgagcccacccagcagcagagagctgccatgctgatcaagatgatcctgaagaaggacaatgacagctatgtgtccttctacaatgccctgctgcacgagggctacaaggacctggccgccctgctgcatgatggcatccctgtggtgagcagcagcagcggcaaggacagcgtgtctggcatcaccagctatgtgaggacagtgctgtgtgagggcggcgtgccccagaggcctgtggtgtttgtgaccaggaagaagctggtgaatgccatccagcagaagctgagcaagctgaagggggagcccggctgggtgaccatccacggcatggccggctgtgggaagtctgtgctggccgctgaggccgtgcgggaccacagcctgctggagggctgcttccctggaggagtgcactgggtgtctgtgggcaagcaggacaagagcggcctgctgatgaagctgcagaacctgtgcacccggctggaccaggatgagagcttcagccagaggctgcccctgaacatcgaggaggccaaggaccggctgcgcatcctgatgctgaggaagcaccccaggagcctgctgatcctggatgatgtgtgggacagctgggtgctgaaggcctttgacagccagtgccagatcctgctgaccacccgggacaagtctgtgacagacagcgtgatgggccccaagtatgtggtgcctgtggagagcagcctgggcaaggagaagggcctggagatcctgagcctgtttgtgaacatgaagaaggctgacctgcctgagcaggcccacagcatcatcaaggagtgcaagggcagccccctggtggtgtccctgattggagccctgctgcgggacttccccaaccgctgggagtactacctgaagcagctgcagaacaagcagttcaagaggatcaggaagagcagcagctatgactatgaggccctggatgaggccatgagcatctctgtggagatgctgcgggaggacatcaaggactactacacagacctgagcatcctgcagaaggatgtgaaggtgcccaccaaggtgctgtgcatcctgtgggacatggagacagaggaggtggaggacatcctgcaggagtttgtgaacaagagcctgctcttctgtgacagaaatggcaagagcttccgctactacctgcatgacctgcaggtggacttcctgacagagaagaactgcagccagctgcaggacctgcacaagaagatcatcacccagttccagcgctaccaccagccccacaccctgagcccagaccaggaggactgcatgtactggtacaacttcctggcctaccacatggccagcgccaagatgcacaaggagctgtgtgccctgatgttcagcctggactggatcaaggccaagacagagctggtgggccctgcccacctgatccacgagtttgtggagtaccgccacatcctggatgagaaggactgtgctgtgtctgagaacttccaggagttcctgagcctgaatggccacctgctgggccggcagcccttccccaacatcgtgcagctgggcctgtgtgagcctgagaccagcgaggtgtaccagcaggccaagctgcaggccaagcaggaggtggacaatggcatgctgtacctggagtggatcaacaagaagaacatcaccaacctgagccggctggtggtgcggccccacacagatgctgtgtaccacgcctgcttctctgaagatggccagagaattgccagctgtggggctgacaagaccctgcaggtgttcaaggccgagaccggggagaagctgctggagatcaaggcccatgaagatgaggtgctgtgctgtgccttcagcacagatgaccgcttcatcgccacctgcagcgtggacaagaaggtgaagatctggaacagcatgaccggggagctggtgcacacctatgatgagcacagcgagcaggtgaactgctgccacttcaccaacagcagccaccacctgctgctggccaccggcagcagtgactgcttcctgaagctgtgggacctgaaccagaaggagtgcaggaacaccatgtttggccacaccaacagcgtgaaccactgccgcttctccccagatgacaagctgctggccagctgcagcgcagatggcaccctgaagctgtgggatgccaccagcgccaatgaaaggaagagcatcaacgtgaagcagttcttcctgaacctggaggacccccaggaggacatggaggtgattgtgaagtgctgctcctggagcgcagatggagcccgcatcatggtggccgccaagaacaagatcttcctgtggaacacagacagccgcagcaaggtggccgactgccggggccacctgtcctgggtgcatggagtgatgttctccccagatggcagcagcttcctgaccagcagtgatgaccagaccatccggctgtgggagaccaagaaggtgtgcaagaacagcgctgtgatgctgaagcaggaggtggatgtggtgttccaggagaatgaggtgatggtgctggccgtggaccacatccggcggctgcagctgatcaatggaagaacaggccagattgactacctgacagaggcccaggtgtcctgctgctgcctgagcccccacctgcagtacatcgcctttggagatgaaaatggagccatcgagatcctggagctggtgaacaaccgcatcttccagagccgcttccagcacaagaagacagtgtggcacatccagttcaccgcagatgagaagaccctcatcagcagcagtgatgatgctgagatccaggtgtggaactggcagctggacaagtgcatcttcctgcggggccaccaggagaccgtgaaggacttccggctgctgaagaacagccggctgctgtcctggagctttgatggcaccgtgaaggtgtggaacatcatcactggaaacaaggagaaggactttgtgtgccaccagggcaccgtgctgagctgtgacatcagccatgatgccaccaagttcagcagcaccagcgctgacaagacagccaagatctggaatgtgtccaatggagagctgctgcacctgtgtgcccccctgtctgaggagggcgccgccacccatggaggctgggtgacagacctgtgcttctccccagatggcaagatgctgatctctgctgggggctacatcaagtggtggaatgtggtgactggagagagcagccagaccttctacaccaacggcaccaacctgaagaagatccacgtgtccccagacttcaagacctacgtgacagtggacaacctgggcatcctgtacatcctgcagaccctggagtag

SEQ ID NO: 255844 - DNA, 3618 bp, Artificial Sequence
  derived and/or modified sequence
atggatgccaaggccaggaactgcctgctgcagcaccgggaggccctggagaaggacatcaagaccagctacatcatggaccacatgatcagtgatggcttcctgaccatcagcgaggaggagaaggtgagaaatgagcccacccagcagcagagagctgccatgctgatcaagatgatcctgaagaaggacaatgacagctatgtgtccttctacaatgccctgctgcacgagggctacaaggacctggccgccctgctgcatgatggcatccctgtggtgagcagcagcagcggcaaggacagcgtgtctggcatcaccagctatgtgaggacagtgctgtgtgagggcggcgtgccccagaggcctgtggtgtttgtgaccaggaagaagctggtgaatgccatccagcagaagctgagcaagctgaagggggagcccggctgggtgaccatccacggcatggccggctgtgggaagtctgtgctggccgctgaggccgtgcgggaccacagcctgctggagggctgcttccctggaggagtgcactgggtgtctgtgggcaagcaggacaagagcggcctgctgatgaagctgcagaacctgtgcacccggctggaccaggatgagagcttcagccagaggctgcccctgaacatcgaggaggccaaggaccggctgcgcatcctgatgctgaggaagcaccccaggagcctgctgatcctggatgatgtgtgggacagctgggtgctgaaggcctttgacagccagtgccagatcctgctgaccacccgggacaagtctgtgacagacagcgtgatgggccccaagtatgtggtgcctgtggagagcagcctgggcaaggagaagggcctggagatcctgagcctgtttgtgaacatgaagaaggctgacctgcctgagcaggcccacagcatcatcaaggagtgcaagggcagccccctggtggtgtccctgattggagccctgctgcgggacttccccaaccgctgggagtactacctgaagcagctgcagaacaagcagttcaagaggatcaggaagagcagcagctatgactatgaggccctggatgaggccatgagcatctctgtggagatgctgcgggaggacatcaaggactactacacagacctgagcatcctgcagaaggatgtgaaggtgcccaccaaggtgctgtgcatcctgtgggacatggagacagaggaggtggaggacatcctgcaggagtttgtgaacaagagcctgctcttctgtgacagaaatggcaagagcttccgctactacctgcatgacctgcaggtggacttcctgacagagaagaactgcagccagctgcaggacctgcacaagaagatcatcacccagttccagcgctaccaccagccccacaccctgagcccagaccaggaggactgcatgtactggtacaacttcctggcctaccacatggccagcgccaagatgcacaaggagctgtgtgccctgatgttcagcctggactggatcaaggccaagacagagctggtgggccctgcccacctgatccacgagtttgtggagtaccgccacatcctggatgagaaggactgtgctgtgtctgagaacttccaggagttcctgagcctgaatggccacctgctgggccggcagcccttccccaacatcgtgcagctgggcctgtgtgagcctgagaccagcgaggtgtaccagcaggccaagctgcaggccaagcaggaggtggacaatggcatgctgtacctggagtggatcaacaagaagaacatcaccaacctgagccggctggtggtgcggccccacacagatgctgtgtaccacgcctgcttctctgaagatggccagagaattgccagctgtggggctgacaagaccctgcaggtgttcaaggccgagaccggggagaagctgctggagatcaaggcccatgaagatgaggtgctgtgctgtgccttcagcacagatgaccgcttcatcgccacctgcagcgtggacaagaaggtgaagatctggaacagcatgaccggggagctggtgcacacctatgatgagcacagcgagcaggtgaactgctgccacttcaccaacagcagccaccacctgctgctggccaccggcagcagtgactgcttcctgaagctgtgggacctgaaccagaaggagtgcaggaacaccatgtttggccacaccaacagcgtgaaccactgccgcttctccccagatgacaagctgctggccagctgcagcgcagatggcaccctgaagctgtgggatgccaccagcgccaatgaaaggaagagcatcaacgtgaagcagttcttcctgaacctggaggacccccaggaggacatggaggtgattgtgaagtgctgctcctggagcgcagatggagcccgcatcatggtggccgccaagaacaagatcttcctgtggaacacagacagccgcagcaaggtggccgactgccggggccacctgtcctgggtgcatggagtgatgttctccccagatggcagcagcttcctgaccagcagtgatgaccagaccatccggctgtgggagaccaagaaggtgtgcaagaacagcgctgtgatgctgaagcaggaggtggatgtggtgttccaggagaatgaggtgatggtgctggccgtggaccacatccggcggctgcagctgatcaatggaagaacaggccagattgactacctgacagaggcccaggtgtcctgctgctgcctgagcccccacctgcagtacatcgcctttggagatgaaaatggagccatcgagatcctggagctggtgaacaaccgcatcttccagagccgcttccagcacaagaagacagtgtggcacatccagttcaccgcagatgagaagaccctcatcagcagcagtgatgatgctgagatccaggtgtggaactggcagctggacaagtgcatcttcctgcggggccaccaggagaccgtgaaggacttccggctgctgaagaacagccggctgctgtcctggagctttgatggcaccgtgaaggtgtggaacatcatcactggaaacaaggagaaggactttgtgtgccaccagggcaccgtgctgagctgtgacatcagccatgatgccaccaagttcagcagcaccagcgctgacaagacagccaagatctggagctttgacctgctgctgcccctgcacgagctgcggggccacaacggctgtgtgcgctgcagcgccttctctgtggacagcaccctgctggccactggagatgacaatggagagatccgcatctggaatgtgtccaatggagagctgctgcacctgtgtgcccccctgtctgaggagggcgccgccacccatggaggctgggtgacagacctgtgcttctccccagatggcaagatgctgatctctgctgggggctacatcaagtggtggaatgtggtgactggagagagcagccagaccttctacaccaacggcaccaacctgaagaagatccacgtgtccccagacttcaagacctacgtgacagtggacaacctgggcatcctgtacatcctgcagaccctggagtag

SEQ ID NO: 255845 - DNA, 3492 bp, Artificial Sequence
  derived and/or modified sequence
atggacgccaaggcccggaactgcctgctgcagcaccgggaggcccttgagaaggatatcaagacttcttatattatggaccatatgatcagcgacggctttctcacaatatctgaggaagagaaggtccgcaacgaacctacccagcaacagcgagccgctatgttgattaagatgattctgaagaaggacaacgattcctacgtgagcttctacaatgccttacttcacgagggatacaaagatctagctgctctgctacatgatggcatccccgtagtgagctctagctccgggaaggacagcgtctctggcataacttcttatgttcgaactgtcctttgcgagggtggggtacctcaacgcccagttgtctttgtaacacgcaagaagctcgtgaatgctatccagcagaagctgtccaagctgaagggagagcctggctgggttaccattcacgggatggctggctgtggtaagtcagtcctcgctgccgaagccgtgcgggaccactctttacttgagggctgtttcccgggaggcgttcactgggtgtctgtgggaaagcaggataagtccgggcttcttatgaagctgcagaacctgtgtactcgcctagatcaggacgaatccttctcacagcggctgcccctgaacattgaagaagctaaagaccggctcaggatcttgatgctgcgcaaacacccccggagtctgttgattcttgacgatgtgtgggatagctgggtgctaaaggcctttgactcccaatgtcagatcttgctaacaacacgcgacaagtctgtcactgatagcgtgatgggccctaaatacgtggtgcctgtggagagctcccttgggaaggagaaaggattggaaatactgtcccttttcgtgaatatgaaaaaggccgatctgcctgagcaagcacatagcatcataaaggagtgcaagggctctccacttgtagtgagcctaatcggagccctccttagagattttcccaatagatgggaatactacctgaaacagctgcaaaacaagcagttcaaaaggattcggaagagcagctcctatgattatgaggcactggatgaggcgatgagtatctccgtggagatgctccgagaggacatcaaggactactacacagatctttccatcctccagaaggacgtgaaggtcccaaccaaggttctctgtattctgtgggacatggagacggaagaagtggaggacattcttcaggagtttgtgaataaatcattacttttttgtgaccggaatggcaaatctttccgctactaccttcatgacctccaagtggattttctgactgaaaagaactgctcacagctgcaagatctacataagaagatcatcactcagttccaacgataccaccagccacatacgctgtccccggaccaggaggactgtatgtattggtataactttctcgcttaccacatggcgagcgccaagatgcacaaagagttgtgtgctttaatgttctccctcgactggattaaggctaagaccgaactagttggcccagcacatttgattcacgagttcgtggagtaccgtcacatcctcgatgagaaagactgtgccgtgtccgaaaatttccaggagtttctcagcttgaacgggcacctccttggaagacaacccttccccaacatcgtccagctgggcctgtgtgaaccagagacctccgaagtgtaccagcaagccaagcttcaagcgaagcaggaagtggacaatgggatgctttatttagagtggattaacaaaaagaacatcacaaatctctccagactagtggtgcgaccgcacaccgacgctgtgtaccatgcatgcttttcagaagatggccagcgtattgccagctgcggcgctgataagacactgcaagtgttcaaagccgagactggtgagaaactcttagagattaaggcccacgaagatgaggtgctgtgttgcgccttctctacagatgatcgatttatcgcgacatgttctgtggataagaaggtgaagatctggaactcaatgaccggtgagctggttcacacgtacgatgaacactccgaacaggtgaattgctgccactttactaattcaagccaccaccttctgctggccaccggctcgagtgactgcttccttaaattatgggacctcaatcagaaggagtgtaggaataccatgttcggtcacactaactccgttaaccattgcaggttcagcccagatgacaagcttctggcgtcttgttctgcggacggcacgctgaaactgtgggatgcaacatcagcaaatgagcgcaaaagcataaatgttaagcaattttttttaaacttggaagatccccaggaggatatggaagtgatcgtcaagtgttgcagctggagcgcagatggcgccagaattatggtggcagctaaaaacaaaatttttctgtggaacactgactccaggtcaaaagtcgctgactgcaggggccacctttcctgggtgcacggggtaatgttctctcctgacggatccagttttctgacatcctcagacgatcagactatccggttatgggaaaccaaaaaagtgtgtaagaatagcgcagttatgttgaagcaggaggtggacgtagttttccaggaaaacgaggtgatggtgctggctgtggatcacatccgcaggctgcagcttataaacgggaggaccggccagatcgattatctaacagaggcgcaagtatcctgttgttgtttatcaccacacctgcagtacatcgcgtttggtgacgagaatggagctatcgaaatattggagctggttaacaaccgcatctttcagagccgattccagcataaaaaaactgtctggcacattcagtttaccgccgacgagaaaacactgatatcttctagtgatgacgccgagatccaggtgtggaactggcagctcgataagtgtatctttctgaggggacatcaggaaactgtgaaggattttagattgctgaaaaacagtcgcctgctgagttggagtttcgatggcaccgtgaaggtgtggaacattattacgggcaataaggagaaggattttgtttgccatcagggcaccgtactcagctgcgacataagccatgatgccaccaaattctcttcgacttcggcagataagaccgctaagatctggaacgtgtccaacggagaacttcttcacctgtgcgctccacttagcgaagaaggtgccgcgacacacggggggtgggtgactgatctgtgttttagccctgatggcaagatgctgattagcgcaggtggctacattaagtggtggaacgtcgtcacaggggagagctctcagactttttacacaaatgggacaaatctgaagaagatccatgtttcccctgactttaagacttatgtgactgtggataatctggggattttgtatatccttcagacactggagtag

SEQ ID NO: 255846 - DNA, 3618 bp, Artificial Sequence
  derived and/or modified sequence
atggacgccaaggcccggaactgcctgctgcagcaccgggaggccctcgaaaaagacatcaagacgagctatattatggatcatatgatttcagacgggtttctgactatctcagaagaggagaaggttagaaacgagcccacccagcaacagcgcgcagccatgctgatcaagatgattcttaagaaggacaatgactcttatgttagcttttataacgcacttctgcacgaaggctacaaagaccttgcagccctgttgcacgatggtattcccgttgtttcaagctccagtggcaaagattccgtttctggaatcaccagctatgtgagaaccgttctctgtgaggggggtgtcccacaacgccctgttgtctttgttactaggaaaaagctcgtgaatgccatccagcagaagctgtctaaactgaagggtgagccaggatgggtgactatccacggcatggcaggctgtggcaagagtgttctcgccgctgaggctgtcagagatcactcactcctagaaggctgctttcccggaggtgttcactgggtgtcagtgggaaaacaggacaagtcggggctgcttatgaagcttcagaacctctgcacccggctggaccaggatgagtcattttctcagagattgccactgaacatcgaagaggcgaaggatcgcctgcggatcctcatgctccggaagcatcctcgatcgctgctgatcttagatgatgtgtgggacagttgggtgttaaaggcctttgattctcaatgtcagattctccttacaacaagagacaagtctgtcaccgactccgtgatgggaccaaaatatgtggtccccgtggaatcctcactggggaaggagaagggcttggagatcctgagcttattcgtgaatatgaaaaaggccgatctgcctgagcaggcgcattcaattattaaggagtgcaaagggagccccctggtcgtatcactgattggcgcccttctgagagacttccctaatagatgggagtattatcttaaacagcttcagaataagcaatttaaacgtatccggaagtctagctcatacgactatgaagcattagacgaggccatgagcatttccgtggagatgctacgagaggatataaaagactactatacagacttgagcatcctgcagaaggacgtgaaggtgcctaccaaggttctctgtattctgtgggacatggaaaccgaggaggtcgaagatatcctgcaggaattcgtgaataagtctctcctcttttgtgatcgcaacggaaagtcttttagatactatctgcacgatttacaagtcgacttcctgacagagaagaactgctcacagttgcaagacctgcacaaaaagatcatcacacagttccaacgctatcatcagcctcacactttaagtccagatcaggaggattgcatgtactggtacaatttcctagcataccatatggctagtgccaaaatgcataaagagctgtgcgcattaatgtttagcttagattggataaaggccaaaaccgagctggtaggacccgctcatttgattcatgaattcgtcgagtacagacatatcctggacgaaaaagattgtgcggtgagtgaaaactttcaggaattcctgagcctcaatggccatctccttgggagacagccttttccaaatatcgttcagctgggtctctgcgagcccgagacctcagaggtatatcagcaggcgaagctacaggcaaagcaggaggtcgacaatggaatgctgtatttggaatggattaacaagaaaaatatcactaatctgtcacgtctggtagtcagaccccacaccgatgccgtttaccacgcatgctttagcgaggacggtcagaggatcgccagctgtggggccgataagacactgcaagtattcaaagctgaaactggcgagaagctactcgaaattaaggcacacgaggacgaagtcttgtgctgcgccttttccactgatgataggttcatagctacctgctccgtagacaaaaaggtcaaaatctggaattcaatgaccggagaactcgtgcacacatacgacgaacacagtgaacaggtgaactgttgccactttaccaattcgagccaccacctgctgctggcaaccggaagctcagactgctttttgaagttatgggatctgaaccagaaagaatgccgcaacacaatgttcggacacactaatagcgtgaaccattgccggttttcaccagatgataagcttctggccagctgctctgctgacggcactctaaagctgtgggatgccacttctgccaacgaaagaaagtcgataaacgtcaaacaattctttctgaatttggaggacccccaggaggatatggaggtgatcgttaagtgctgttcttggtccgcagacggcgcaaggataatggtcgcagcaaagaataagatcttcctatggaatactgatagccggtcaaaagtggctgactgccgggggcatctgagttgggtgcatggtgtcatgttctcccccgatggatctagcttcttgaccagctcagacgatcaaacaatcaggctgtgggagactaagaaagtgtgcaaaaattccgctgtgatgctcaaacaagaagtggacgtagttttccaagaaaacgaagtcatggtccttgccgttgatcacatacgccgccttcagcttataaacgggaggaccggccagatcgattatttaacggaggcgcaggttagctgttgttgtttgtctccccatctgcagtacatcgcttttggcgatgagaatggcgctatcgaaatcctggaacttgtgaataacaggatctttcagagtcgcttccaacacaagaaaacagtttggcatatccagttcacggccgacgagaaaacactgatatcatccagcgacgacgccgaaatccaggtctggaactggcagctcgacaagtgtatttttttgcggggacatcaagaaactgtcaaagattttaggctcctgaagaatagcagattgctgtcttggtcattcgatggaaccgtaaaagtatggaacatcatcaccggaaataaggaaaaggactttgtatgtcatcaaggcacggtcctttcttgcgatatatctcatgatgccactaagttctcttctacgtcagccgacaaaaccgcaaagatctggtcattcgacctgctcctcccgcttcacgaactcagagggcataacggctgtgtacggtgttccgcgttttccgttgatagtaccctgttagccaccggtgatgacaatggcgagattagaatctggaacgtgtcaaatggcgaactgctccatctttgtgcccctctctctgaagagggcgccgctactcatggaggatgggtaacagacctgtgtttttcccctgatgggaagatgcttatctccgctggagggtacatcaaatggtggaatgtggtcactggcgaaagttcgcagacgttttatacaaacggaacgaatctgaagaagattcatgtgtctcctgactttaaaacctacgtgacagtagataatcttggcattttgtatatcttgcagaccctggagtag

SEQ ID NO: 255847 - DNA, 3618 bp, Artificial Sequence
  derived and/or modified sequence
atggacgccaaggcccggaactgcctgctgcagcaccgggaggccctggagaaagatatcaaaacctcatacatcatggatcacatgataagtgacggatttttgaccatctcagaggaggagaaggtacgtaacgaaccaacacaacagcagcgggccgcaatgctgataaagatgattctcaagaaggataatgatagctacgttagcttttacaacgccttgctacacgaaggctataaagacctggcagccttactgcacgacgggattcctgtcgtgtctagttcatccggaaaggactcagtaagcggaataacatcatacgtgcggactgtgttgtgcgaggggggtgtacctcagagacctgtggttttcgtgacccggaaaaaactcgtgaacgccatccagcaaaaactttctaagctcaaaggcgaaccgggctgggttaccatccacggcatggccggttgcggcaagtccgtgctggctgctgaagcagttagagaccactcactgttggaaggatgttttcctgggggtgtgcactgggtttccgtggggaagcaggacaaaagtgggctcttgatgaagctgcaaaacctgtgcaccagactggaccaggacgaaagcttctcccagcggctgccacttaacattgaggaggccaaggaccgactgcgcatattaatgctgcggaaacacccgagatcgcttcttattctcgacgatgtgtgggacagctgggtcctcaaggcctttgacagtcagtgccagatcctattaactacccgcgacaaatccgtgacagattccgtcatgggccccaagtatgtggtccccgtggaaagcagcctggggaaggagaaaggactggagatactatcgctgttcgttaacatgaagaaagcggacctgcccgagcaggcacacagtatcattaaagagtgtaaaggatcccctctagttgtgtcactgatcggggcactcttacgtgattttcccaatagatgggagtactatcttaaacaattgcagaataagcaattcaagcgcattaggaaatcctcaagctacgattatgaggctctcgatgaggccatgtctatcagtgttgagatgttgcgcgaggacataaaggactattataccgatctgtccattcttcagaaggacgttaaagtacccaccaaagtgctgtgtattctgtgggatatggagactgaggaggtagaagatatactccaggagttcgtgaataagtccttgctgttctgcgaccgcaatggcaagagtttccggtactacctccatgacctgcaggtggatttcctcactgaaaagaactgtagccagctgcaggatttacacaagaagatcatcacacagtttcagagataccatcagcctcatactttgagcccggaccaagaggattgtatgtattggtacaacttcctggcatatcatatggcttctgctaagatgcataaggagctctgcgcactgatgttctcgttagactggattaaagctaaaacagaattagttggccctgcccatcttatccatgagtttgtggagtacagacacatcctggatgagaaagactgcgcagtgtccgaaaactttcaggaatttctttctctcaatggtcatttactcggcaggcaaccttttcccaacatcgtgcagttaggcttatgcgaaccagagaccagcgaagtctaccaacaggccaagctgcaagcgaaacaggaggtagacaacggtatgctgtatctggagtggattaacaagaagaacataaccaacttgtcccgcctcgtagtaagaccacacacggatgccgtgtatcacgcgtgcttttccgaggacggccagagaattgcctcctgtggagccgacaagacactgcaagtgtttaaagctgagacaggggaaaaactgctcgaaattaaagcccacgaggacgaagtcctctgttgcgccttctccacagacgaccgctttatcgcgacttgctcagtggataagaaagtgaagatctggaactcaatgactggggagttagttcatacatatgacgaacactccgagcaggtcaattgctgccattttactaacagttctcatcacctgctgctggccactggttcaagcgattgcttcctaaagttgtgggacctgaatcagaaggaatgccggaataccatgttcggacacactaactcagttaaccattgtcggttttctcccgatgataagttgcttgcctcttgcagcgccgacggtaccctcaagctgtgggatgccacttccgccaatgaacgcaagtccattaacgtcaagcagtttttcctaaatttagaggatcctcaagaggatatggaggtgattgtcaaatgctgtagctggagtgccgatggtgcaaggattatggtcgctgccaaaaacaagatctttctgtggaacacagattcacgatccaaggtggcagactgccgaggccatttgtcttgggtccacggcgtgatgttttcacctgacggatcctccttcctcacctccagcgacgatcagacaattcgcctctgggagactaagaaggtgtgcaagaacagtgccgtgatgctgaagcaggaagtggatgtcgtcttccaagaaaacgaagtcatggtgctggccgttgatcacatccggcggctccaactgattaatggacgcacaggtcagattgactacctgacagaggcccaggtgagctgctgttgcttgtctccgcacttacaatacatagcatttggcgatgaaaacggcgctatcgagatcctggagctggtgaataataggatctttcaatctcggttccagcataaaaagaccgtctggcacatccaatttaccgccgatgaaaagacactcatatcgtccagtgacgacgccgaaatccaggtgtggaattggcaacttgacaagtgtatctttctcagaggtcaccaggaaacagtcaaagatttccggctgcttaaaaatagcaggctactctcatggagttttgatggtacggtgaaggtttggaacataatcaccggcaacaaggaaaaggactttgtttgtcatcagggaacagtcctgagctgcgacatttctcacgacgccacaaaattttcctccacttctgccgacaagactgctaagatttggtccttcgaccttctactgcccttacatgagctccgaggacacaatggctgtgtgaggtgctctgcttttagcgtggactccacattgttagctaccggtgatgataatggcgaaatccgcatctggaacgtgtctaatggcgagctgctccacctgtgcgctccactgtccgaagagggagctgccacacatggcggctgggtcacagacttatgtttttccccggatgggaagatgcttatatctgccggggggtacatcaagtggtggaatgtggtcacaggcgagtcttctcagaccttctacaccaatggaaccaacctcaagaagatccacgtttcaccagactttaaaacctacgtaaccgttgataatcttggaatcctttacattctgcagacactggagtag

SEQ ID NO: 255848 - DNA, 3492 bp, Artificial Sequence
  derived and/or modified sequence
atggacgccaaggcccggaactgcctgctgcagcaccgggaggccctggaaaaggacatcaaaacgtcatatattatggaccatatgatttctgacggcttcctcacaatcagtgaggaggaaaaggtgcggaacgagcctacacagcagcagcgggccgccatgctgatcaagatgatcttaaagaaggacaacgactcttacgtaagcttttataacgctctcttgcacgaaggctacaaagatcttgcggccctgctccatgacggaattccagtcgtcagcagctcaagcgggaaggacagcgtttctgggattacgtcttacgtcagaactgtgctgtgcgaaggaggtgtcccccaacgcccggtggtgtttgtgactcgtaagaaactggtcaacgccattcagcaaaagctgtcaaaacttaaaggggagcccggctgggtaacaatccacggcatggcaggttgcgggaaatccgttctggccgccgaggctgtgcgagatcactccttactggagggctgcttcccgggaggagtgcattgggtgtcggttgggaaacaggataagagtggcttgctcatgaaattgcagaatctgtgtacccggctggaccaggatgaatcatttagccaaaggctgccgctgaatatcgaggaggcgaaggatcgactgcggattctgatgctccgcaaacatccaagatcactccttattttggacgacgtctgggactcttgggtgctcaaagccttcgactcccaatgccagattctgctgacaacccgtgacaagtctgtcactgacagcgtgatgggccctaaatatgttgtcccggtggaaagctcacttggtaaagagaagggcttggagatccttagcctgttcgtgaatatgaaaaaagccgatttgcctgaacaggcgcatagtataatcaaagagtgtaaaggatctccgctggtggtcagtcttatcggcgccctcctgcgggatttcccgaacaggtgggaatattatcttaagcagctgcagaataagcagttcaaacggatcagaaaatcctcttcttatgattacgaggcactggatgaggcaatgtccatctctgtcgagatgttacgcgaagacattaaagattactacacagatttgagcatcttgcagaaggacgtgaaggtgcctaccaaggtgttgtgcatattgtgggatatggagaccgaagaagtcgaggatattctgcaggaattcgtgaataaaagcctcctgttttgcgatcgtaacggtaaaagttttagatactatttacacgatctgcaggtagactttttaaccgaaaagaactgcagtcagctccaagacctgcataagaagattatcactcaatttcagagatatcaccagccccacaccctgagccccgatcaggaggactgtatgtactggtacaacttcctcgcctatcacatggcaagtgccaagatgcataaagaactgtgcgcactgatgttcagcctcgactggattaaagcaaagactgaactggtaggacctgcccacttgatacacgagttcgtggaatacagacacattctcgacgagaaggactgcgccgtgagtgaaaactttcaggaatttctctcgcttaatggccaccttctcggaagacagccgtttcctaatatcgtgcagctgggcttgtgcgaacccgagacgagtgaagtctaccaacaggccaaactccaggcaaaacaagaggtagataatggcatgctttacctggaatggatcaataagaagaatatcactaacctctcacgacttgtggtccggccccatacagatgctgtatatcacgcctgtttctcagaagacgggcagcgcatcgcgagctgcggcgcagacaaaacgctgcaggtgtttaaggcagagactggcgaaaaactgctggaaattaaagcccatgaggacgaagtgttatgttgtgccttcagcaccgatgatagattcattgcgacttgtagtgtggataagaaggtgaagatctggaattcaatgactggcgaactggtccatacctacgacgagcactcggagcaggtgaattgctgccacttcaccaatagcagtcatcatctgttgctggcaacggggtcctccgactgtttcctgaaactgtgggacctcaaccagaaggagtgtcgcaacacaatgttcggccatacaaatagcgtgaaccattgtcgcttttctcctgacgacaaactcctagcttcatgctcagcagacggaaccctgaaactttgggatgccacatcagcaaacgaaagaaaaagtatcaatgtgaaacagttttttttaaacttagaggaccctcaggaagacatggaggtgattgtaaagtgttgttcttggtctgccgacggcgcacggattatggtggccgccaagaataagatattcctgtggaatactgattcacgatccaaagttgccgattgccgaggacatttgtcgtgggttcacggtgttatgttttccccggacggtagctcgtttctgacctcgagcgacgaccagacgattaggctatgggaaaccaaaaaagtctgcaaaaattctgctgtcatgctgaaacaggaagtagacgtggtgttccaagaaaacgaggtcatggtgttggccgtagatcacattagacgtctccagctcataaatggccgaacagggcaaatcgattacctgacagaggcccaggtgtcttgctgttgcctgagtccacatttgcagtatatcgcttttggggatgaaaacggcgcaattgaaattctcgagttagtgaataaccgcatcttccagtctcggttccaacacaaaaaaacagtttggcacatccagttcactgctgacgagaagacattgattagtagctccgacgacgcggagattcaagtgtggaattggcagctggataaatgcatatttctaaggggccaccaggagacagtcaaagatttccgtctgttgaagaactcacgactcctgtcttggtcgttcgacggcaccgttaaggtttggaatatcataactggaaacaaggagaaggattttgtctgccaccaaggaacagtgctctcctgcgatattagtcacgacgctaccaagttttcttccaccagcgctgataaaaccgctaagatttggaatgtctccaacggcgaactgcttcacttatgtgccccgctgtctgaagagggcgccgctacacatggcggttgggttacagacctctgtttctcccccgatggaaaaatgctaatctccgcaggcggctatatcaagtggtggaatgtggtcactggagaaagttcacagaccttctacacgaacgggacgaatctgaagaaaatacacgtctccccggacttcaagacctatgtcaccgttgataacctcggcattctgtatattctgcaaaccttagaatag

SEQ ID NO: 255849 - DNA, 3492 bp, Artificial Sequence
  derived and/or modified sequence
atggacgccaaggcaaggaattgtttgctgcagcatagggaagccctggaaaaagatattaagacaagttacattatggatcacatgatatctgatgggtttttgacaatttcagaggaggagaaggtgcggaatgagccgacacagcagcagcgtgccgctatgctgatcaagatgatcctgaaaaaggacaacgatagctatgtgagcttctacaacgccttgctgcatgaagggtataaagatctggcggctctgctccatgatggcatccccgttgtgtcctctagcagcgggaaggatagtgtttctggaattaccagctacgtgaggacagtgctctgtgagggcggtgtgccgcaacgtcccgttgtttttgtcaccaggaaaaaactggtaaatgccattcagcagaagctaagtaagcttaaaggggaaccagggtgggtgacgattcacggcatggcgggttgcggcaaaagcgtcctcgcagcagaagcagtgagagaccattctttgctcgaaggatgcttcccgggaggagtccactgggtgtccgtaggcaaacaagacaaaagcggcctgctgatgaagcttcaaaatctgtgcacaagactcgatcaagatgaatcatttagccagcgactgccactcaatattgaagaggctaaggaccgcctgagaatcctgatgctgcgcaagcatccccgaagtctgctgattcttgacgacgtctgggatagctgggtactgaaagccttcgattcacagtgccaaatcctacttacaacaagggataaatctgttaccgatagcgttatgggaccgaagtacgtggtgcccgtcgagtcttcactgggtaaagagaaggggttggagatcttatctctgtttgtaaacatgaagaaggccgatttacccgagcaggcacatagtatcattaaggaatgtaaaggctcccccctggtggtctcattgattggtgccctgctccgcgatttccctaaccgttgggagtattatcttaagcagctgcaaaataagcagttcaaaagaatccggaagtcttcatcatatgactatgaggcactcgacgaggcaatgtcaatctcggtggagatgctgagagaggacatcaaggattactataccgacctatcaattctccagaaggatgtaaaagtgcccaccaaggtgctgtgcatcctgtgggacatggaaactgaagaggtggaggacattctacaggagttcgtaaataagtcactgctcttttgtgatcgtaatggaaagagctttagatattacctgcacgacttgcaggtggatttcttgactgagaaaaattgtagccagttacaagacctgcacaaaaaaatcattacacaattccagcgctatcaccagcctcatactctatctcctgatcaggaggactgcatgtactggtacaattttctggcctaccatatggcgtcggctaaaatgcataaagaactatgcgcgctgatgttctctctggactggattaaagcaaaaactgagctcgttggacctgcccacctgattcatgagtttgtcgaatacagacacatcctcgatgagaaagactgtgcagtatccgagaatttccaggaattcctctcactgaacggtcacctccttggtcgccagcccttcccaaatatagtgcaactgggtctttgcgaaccagagacatctgaggtatatcagcaagccaaactacaggctaaacaagaggtcgacaatggaatgctatacctggaatggatcaacaaaaaaaacatcaccaacctttcgagactagtagtgaggccgcacacagatgccgtgtatcacgcctgcttcagcgaggatggtcagcgaatagcctcttgtggcgctgacaaaacactgcaagttttcaaggccgagaccggcgagaagctgctagaaattaaagcacacgaggacgaagtgctttgctgtgccttcagcacggacgaccggttcattgccacttgttctgtggataagaaagtcaaaatctggaactcaatgaccggagagctcgtccacacctacgacgagcacagtgaacaggtgaactgttgccatttcacgaatagctcccaccatcttctgctagcaaccggatcctcagattgtttcctcaagttgtgggacctgaaccagaaagaatgccgaaatacaatgttcggtcacaccaactcagtgaaccattgccgcttttctccagacgataaactcttggcgagttgttctgctgatggaacattgaagctgtgggacgctaccagcgcaaacgagaggaagtcaattaacgtgaagcaatttttcctcaatttagaggacccacaggaggacatggaggttatcgttaagtgctgtagttggagcgccgacggggctcgaatcatggtggcagctaaaaacaagatattcctgtggaacactgattctcgatccaaggtggctgattgccgtggtcatctcagctgggtgcacggggtgatgttctcccccgacgggtcatcctttctgactagctcagatgatcagacaatccggctctgggagacaaaaaaagtgtgtaagaactccgcagtgatgttgaagcaggaagtggacgtggttttccaagaaaacgaagtcatggtgctggccgtcgatcatatcagacggctgcaacttatcaatggacgcacaggacaaattgattatcttacagaggcacaagtatcttgttgctgcctatcgccccacctgcagtacatagcttttggcgatgaaaacggcgcaatagaaattctggaacttgtgaataaccggatctttcagagccggttccagcacaaaaagaccgtgtggcacattcagttcactgccgatgagaagaccctaatctcatcttcagatgacgctgagatccaagtgtggaattggcaactggataaatgcatatttctcagaggacaccaggaaactgttaaggatttccgcctactgaaaaattcccggctgctcagctggagcttcgacggaacggtgaaagtgtggaacatcatcaccggcaacaaagagaaggactttgtgtgccaccagggtacagtgctgtcgtgcgacatcagtcatgacgcaactaagttcagcagtacatccgccgataagactgctaagatttggaacgtaagcaacggcgagctgctgcatctttgcgcaccactctccgaagagggtgccgcaactcacgggggttgggtgacagacctctgtttctccccagacggcaagatgctgatctctgccggaggctatataaagtggtggaacgtggtgaccggcgagagcagccagaccttctatacaaatggcacgaacttgaaaaagatccacgtcagcccggatttcaagacatacgtgacagtggacaacttggggattctatatattttgcagaccctggagtag

SEQ ID NO: 255850 - DNA, 3618 bp, Artificial Sequence
  derived and/or modified sequence
atggacgccaaggccaggaattgccttttgcagcatcgggaggcactagaaaaggatataaagacatcatacatcatggaccacatgatctccgatggcttcctcaccatttcagaggaggagaaagttcggaatgagccaactcaacagcaacgggcagcaatgctgatcaaaatgattctgaagaaagacaacgatagttatgtgagtttttataacgcacttctgcatgagggatataaggacctcgccgctcttctgcatgatggaatcccagttgtatcttcttcatcaggaaaggacagtgttagcggtatcacctcctatgtgcggacagtactatgtgagggaggcgtgccacaaagacctgtggtgtttgtgaccagaaaaaagcttgtgaacgcaatacagcagaagctcagcaaactgaagggcgagcccggttgggtgactatccatgggatggctggctgcggtaagagcgtgctcgctgcagaggcggtcagggaccactctcttttggagggatgctttcccggaggcgtacactgggtgagcgtaggtaagcaggataaatcgggattgctcatgaagctgcagaatttgtgtacacgactggaccaggacgagagcttctcacagagactccccctgaacatcgaagaagctaaagatagactcagaatcctgatgttaaggaagcacccaaggagcctgcttatcctggatgacgtttgggattcctgggtgctgaaggcattcgactcacaatgccagattctccttactacccgcgacaagagtgtgacagactctgtgatgggcccaaagtatgtggtgccagtggaatcgtctttggggaaggagaagggactggaaatcctgtctctctttgtgaatatgaagaaggccgacctcccagagcaggctcacagtataatcaaggaatgcaaggggtcccctttggtcgtgtcacttatcggcgctttactgcgcgacttccccaataggtgggaatactacctcaaacagctgcagaataaacagtttaagcgaataagaaaatcctcatcttatgactacgaggctttggacgaggccatgtccattagtgtagaaatgctccgtgaggatattaaagactattatacagatcttagcattttacaaaaggacgtgaaggtgcctaccaaagtcctgtgtatcctgtgggatatggagactgaagaggtagaggatatcctccaggaatttgtgaataagagcctgttattttgtgatcggaacggcaaaagctttcgctactatctgcacgacctgcaggtggactttctgactgagaaaaattgtagtcaactgcaagacttgcataaaaagattattacccagttccagagataccatcagccccacactctgagcccggatcaagaagattgcatgtattggtataatttccttgcctaccatatggccagcgcgaaaatgcacaaggagctgtgcgcactgatgttctcgctcgattggataaaggccaaaactgagttggtgggccctgcacacctcatccacgagtttgtggagtaccgccacattttagatgagaaagattgtgccgttagtgaaaactttcaggagtttctgagcctcaacgggcaccttctgggcaggcagccatttcccaatatcgttcagctagggctatgcgaaccagagaccagcgaagtttatcagcaggccaagctgcaggctaaacaggaagtggacaatggcatgctgtatctggagtggataaataaaaagaatattacgaatttgtcacggctggtggtcaggcctcatacagatgctgtgtaccacgcatgtttctccgaagatgggcaacgcatagcttcctgcggcgctgataaaacattgcaggtattcaaagctgagaccggcgagaagctgctggagatcaaggcacatgaggatgaggtgctgtgctgcgcattcagtaccgatgaccgattcattgcaacctgcagcgtggacaaaaaagtcaagatttggaatagcatgacgggcgaactcgtgcatacatacgacgagcatagtgagcaagtgaattgttgccacttcactaatagtagtcaccatttgttactcgctacaggcagttcagactgctttttgaagctttgggatctcaaccagaaagaatgcagaaacaccatgtttggacatacaaattccgtgaatcattgcaggttctcccctgacgataaactattggcatcttgcagcgcagacggtaccctgaaactgtgggacgcaacgtccgccaatgaaaggaaatccatcaatgtgaagcaattctttctgaacctggaggacccgcaggaggacatggaggtaatcgtcaagtgttgtagctggtccgcagacggtgctagaattatggtagccgcaaagaacaagatcttcctgtggaataccgacagccggtctaaggttgccgactgccgcggtcatttgagttgggttcacggagttatgttcagcccggacggcagctcattcctcactagctccgatgaccaaacaatacggctgtgggaaactaaaaaagtctgtaaaaactctgcggtgatgctgaagcaggaggtggacgtcgtatttcaggaaaatgaagtgatggtattggccgttgatcacatccggaggcttcagctgatcaacggacggactggtcagatagactacctgactgaagcccaagtatcttgctgctgcctatctccacacttacagtacattgcattcggtgatgaaaacggggctatcgaaattctggaattggtgaacaaccgtatcttccagtcccgctttcagcacaaaaagactgtctggcacatccagttcaccgcagacgaaaagacgctgatctcttcttctgatgacgccgagatccaagtgtggaattggcagctggacaaatgcatttttctccgtggtcaccaggagaccgtcaaggactttcgtctgcttaagaacagccgcctgttgagttggtcttttgacggtaccgtcaaggtttggaatataattacgggcaataaggaaaaggacttcgtgtgtcatcaaggtacagtgctatcatgcgacatttcccacgatgctaccaagttttcttctacatccgctgacaagaccgccaaaatatggtctttcgatctgctgctccccttgcacgaactcaggggccataatggttgcgtccgctgttccgcattcagtgttgacagcactctgctggctaccggtgatgataacggcgaaatacgaatctggaacgtaagcaacggcgaacttctccacctgtgcgcaccactatctgaggaaggggctgcaactcacgggggatgggtcaccgatctgtgcttctctccggatggcaagatgctcatatcggcaggcggatatatcaaatggtggaatgtggtgaccggggaaagctctcagacattctatacgaatggtacaaatctcaaaaagatccacgtctcccccgattttaagacctacgttacagtagacaacctcggcatcctgtatatcctgcagaccctggagtag

SEQ ID NO: 255851 - DNA, 3618 bp, Artificial Sequence
  derived and/or modified sequence
atggatgccaaggccaggaattgcctgctccagcatcgagaggccctggagaaagatatcaagacctcctacatcatggatcatatgatcagcgacggcttcctgacaatttccgaggaggaaaaagtcaggaatgagcccactcagcagcagcgcgctgccatgctaattaagatgatcctgaagaaagataacgactcttatgtatccttctataatgctctcctccacgagggctacaaagatctggctgctctgctgcatgacggcatccccgtcgtgtcttcctcatcaggtaaagactcagtgtccggtatcacttcttacgtgcggaccgtactttgcgaaggaggggtgcctcaacggccagtcgtgttcgtgacgagaaaaaaactcgtcaacgcgatccaacagaaacttagcaagctgaagggtgagcctggctgggttacaatccacgggatggctggttgcggaaaatcagtgctcgcagctgaggctgtgagagaccattccttgttggaggggtgcttcccaggtggcgttcactgggtcagcgtgggtaaacaggataagtcaggattgcttatgaaactgcagaatctgtgcactaggcttgaccaagacgagtcattcagtcaacgcctgccactgaatattgaggaagcaaaagataggcttaggattctcatgcttagaaagcaccctcgatccctcctgattttggatgacgtttgggatagttgggtgttgaaggcctttgattcgcagtgccaaattctactgactacccgtgacaagagcgttaccgacagcgtcatgggcccaaagtacgtcgtgccagttgagtcctcgctgggtaaagagaaagggctggaaatcctgtcactgttcgtgaatatgaaaaaagccgatctgcccgagcaagctcactcgatcatcaaagagtgtaagggcagccccctcgtcgtcagcctgatcggcgcactgctgcgcgatttccccaataggtgggagtattatctgaagcagttgcagaacaaacagtttaagcggatccgtaagagctcgtcctacgattatgaagccctggacgaagctatgtcgatcagcgttgagatgttgagggaagacataaaagattactataccgatttatccatccttcaaaaagatgtgaaggtccccacaaaagtcttgtgtatcctgtgggatatggagaccgaagaagttgaagatatcctgcaggagtttgttaacaagtctctcttgttctgcgacagaaatggcaagtcatttcggtattaccttcacgatctgcaggtggacttccttacggagaaaaactgcagtcaactgcaggatcttcataagaaaataatcacacagttccaacgatatcaccagccacataccctgagtcccgaccaggaggattgcatgtactggtacaacttcctggcttaccacatggcttccgccaagatgcacaaggagctctgtgcactgatgttcagtcttgactggattaaagcgaaaaccgagctggttggacctgcacatctcatccacgagtttgttgaatatagacacatccttgacgaaaaggattgcgcagtttcagaaaattttcaagaatttctgagtctgaatggccacttgttaggtcggcaaccattcccaaacatagttcagctgggactgtgcgaacccgaaactagtgaggtgtaccaacaggcaaagctgcaggctaaacaggaagtcgacaatggcatgctgtacttagagtggataaacaagaagaatatcactaacctgtccagactggtcgtcagacctcacaccgatgccgtatatcacgcctgcttttccgaagacggtcaacgcattgcctcctgcggggcagataagactcttcaggtcttcaaggccgagacgggcgagaagctcctggagattaaagcccatgaggacgaggtcctctgctgcgccttcagcaccgacgataggtttatcgccacttgtagcgtggataagaaagttaagatctggaatagcatgactggtgaactagtccatacttacgatgagcacagcgaacaagtcaattgttgtcattttaccaactcctcacaccatctgttgcttgccaccgggtcctccgattgctttctcaagctttgggacttaaatcagaaggaatgtcgcaacacaatgttcgggcacacaaactccgtcaatcactgtcggttttcaccagacgacaagctgcttgcctcctgctccgctgacggtaccctgaaactctgggacgcgactagtgccaatgagcggaaatcaattaatgtgaaacagttctttcttaatctggaggatccacaggaagacatggaagtgattgtcaagtgttgttcttggtccgctgacggcgcacgcatcatggttgctgctaagaataagattttcttgtggaacactgactccaggtcaaaagtggccgattgccggggacacctttcatgggtgcacggggtgatgtttagtccagacggctcctcattcctgacttcctcagatgatcagactatcaggctctgggagacaaagaaggtctgtaaaaacagcgctgtcatgctgaaacaggaagtggacgtggtcttccaagaaaacgaggtgatggtgctcgccgtggatcatatccgacgtttgcagctgatcaacgggaggacaggccagatagattacctcaccgaagcccaggtgtcctgttgttgcctcagcccccacctgcagtacatcgccttcggggacgagaatggggcaatcgagatcttagaactggtgaataatcgtatcttccaaagccggtttcagcacaagaaaactgtctggcacatccagtttacagctgacgaaaagacccttatcagtagcagcgatgacgctgagattcaggtgtggaactggcagctggataagtgtatatttcttcggggacatcaggagacagtgaaggactttcgcctccttaaaaatagtaggctcttaagctggagctttgatggcacggtgaaggtgtggaacatcattaccgggaataaggagaaggacttcgtgtgccatcagggcacggtcctgtcttgcgacatctcgcatgacgccaccaaatttagcagcacctccgcagacaaaacagcgaagatatggagctttgacctattactcccattgcatgagttgagaggccacaacggttgtgtgagatgctcagctttctcagtggattcaaccctgttagccaccggcgatgataatggcgagattcggatatggaacgtgagcaatggtgagttactgcacttatgcgcccctctgtctgaagagggggcagccactcatggcggatgggtcacagatctgtgcttttctccagatgggaagatgctgatcagtgccggtggctatatcaagtggtggaatgtggtgacgggagaatcctcacagactttttacacaaatggtactaacctgaaaaagatccacgtgtctcccgactttaaaacatacgtaacagtggataaccttggtatcctgtacatcttacagacactggagtag

SEQ ID NO: 255852 - DNA, 3492 bp, Artificial Sequence
  derived and/or modified sequence
atggacgctaaagcaagaaattgcctgcttcagcacagggaagctctggaaaaggatattaagacttcctacataatggaccacatgatcagtgatggatttctaaccattagcgaagaggagaaggttagaaacgagcccacccaacagcagcgggctgccatgctcatcaaaatgatactcaagaaggataacgacagctatgtttctttctacaatgctttgctccatgaaggctacaaggatctcgcagcgctgctgcatgacgggattccagtggtgtcttcttcctctggaaaggatagcgtgagcggcatcacatcttatgtgaggactgtcctgtgtgaggggggagtgccacagcgtcccgtcgtgttcgtgacacggaagaagctggtaaacgcaattcagcagaagctgagcaaactgaaaggggaacctggatgggtcaccatccacggtatggcagggtgcggtaaatcggtgctggctgccgaagcagtccgcgaccatagtctcctggagggatgctttccagggggagttcattgggtctccgttggcaaacaggataaatccggccttctgatgaagctccaaaacctctgtaccaggctggatcaggacgagagctttagccaacggcttcccctcaatatcgaagaggccaaagacaggctgcggatcttaatgttgagaaaacatcccagatctttattaatcctggacgacgtgtgggactcctgggtgctcaaagcattcgacagccagtgtcaaatactgctcactacgcgcgataagtctgttacggatagcgtaatggggcctaaatatgtagtacccgtggagtccagtctgggtaaggagaagggacttgaaatcctctctctttttgtcaacatgaaaaaagcagacctgcctgagcaggcacattcaatcatcaaggagtgtaaggggagtccactggtggtcagcctcattggcgctctcctcagggacttccccaaccgatgggaatactacctcaagcagttgcaaaataagcaattcaaaaggattcgtaaatcttctagttatgattacgaagccctggatgaggccatgtctatttctgttgaaatgttgcgggaggatattaaggactactatacggacctatccatactgcagaaggacgtgaaggtgcctacaaaggtcctgtgtatcctttgggacatggaaaccgaggaggtcgaagacatcctgcaggaatttgtaaacaagtctttacttttttgtgatcgtaacggaaaaagttttaggtactacttacatgacctgcaagtggactttctcactgaaaaaaactgttcacaactgcaggatctgcacaagaagatcattacacaattccagagataccaccaaccgcataccctttcccctgaccaggaggattgcatgtactggtacaatttcttggcctaccatatggctagcgccaagatgcacaaggaactttgcgccctgatgttttccctagactggatcaaggccaaaaccgagctggtcggtcccgcacacctgatccacgagttcgtcgagtacaggcatattcttgacgagaaagattgcgcagtctccgaaaacttccaggagttcctcagtttaaatggccatctcttaggaaggcagcctttcccaaacatcgtccagctgggactttgtgagccagaaacttcggaggtctaccagcaggccaagttacaggccaaacaagaagtggacaacgggatgctgtatctggagtggataaacaagaagaatatcacaaacctgagccgactcgttgtccgaccacataccgatgccgtataccatgcctgtttctccgaggatggccagagaattgcctcttgcggcgcagataagacgctccaggtgttcaaagctgaaacaggggagaagctactagagatcaaggcccacgaagacgaagttttatgctgtgccttttccacagacgatcgcttcattgcaacctgctcggtggataagaaagtgaaaatctggaattcaatgacaggtgaactggttcatacctatgacgagcacagcgaacaggttaattgctgtcactttacaaattcttcacaccatttgctgctggctactggcagttcagattgctttctaaaattatgggacctgaatcagaaggaatgccgtaacacaatgttcggtcacacaaactccgtgaatcattgcaggttcagtcctgacgacaaacttctagcctcttgctcagccgacggtactttgaaactatgggacgcaacatctgcgaacgaacggaaatccatcaacgtgaagcagttcttcctgaatctggaggacccgcaggaggatatggaggtcatagtaaaatgctgttcctggtcagccgacggcgctagaattatggtggctgcgaaaaacaaaatctttctctggaatacagactcccgctccaaagtggcagactgtaggggacatttgtcctgggtgcacggagttatgttctccccagatggaagcagtttcttgactagcagcgatgaccagactattcggttgtgggagaccaagaaggtgtgcaaaaacagtgccgtgatgctgaagcaagaggtagacgtggtgttccaggagaacgaggtgatggtgctggccgtggatcacatccgcagacttcaattgattaacggtagaaccggacaaatcgattacctgactgaggcacaagtgtcttgctgctgtctctctccacacctacagtacatcgcatttggcgatgaaaatggggctatcgagatcctggagctggtaaataatcgcatattccaatcccgctttcagcataagaaaacggtgtggcatatccagttcactgcagatgagaagaccctgatttcttcatcggacgatgccgagatccaggtctggaattggcagttggataagtgcatttttctgcgagggcaccaggaaaccgtgaaagacttcagactgctcaagaactcacgactgctctcatggagttttgatgggacagtaaaagtgtggaacattatcacaggtaacaaggaaaaagatttcgtttgtcatcagggcaccgtcctaagttgcgacatttcccatgacgcgacaaaattctcatctacatccgccgacaagacagccaagatttggaacgtgtcgaacggtgaactcctgcatttatgcgctcctctcagtgaggagggtgcggctacgcacgggggttgggtcactgatctatgtttttcccccgatggcaagatgctgatcagcgctggtggatacatcaaatggtggaatgtcgtgactggcgaaagttctcagactttttacacgaacggtacaaatctgaaaaaaattcacgtgtcccccgatttcaaaacttatgtcacagtggataatctggggattctgtacattcttcaaactcttgagtag

SEQ ID NO: 255853 - DNA, 6929 bp, Artificial Sequence
  derived and/or modified sequence
aagaagaggtagcgagtggacgtgactgctctatcccgggcaaaagggatagaaccagaggtggggagtctgggcagtcggcgacccgcgaagacttgaggtgccgcagcggcatccggagtagcgccgggctccctccggggtgcagccgccgtcgggggaagggcgccacaggccgggaagacctcctccctttgtgtccagtagtggggtccaccggagggcggcccgtgggccgggcctcaccgcggcgctccgggactgtggggtcaggctgcgttgggtggacgcccacctcgccaaccttcggaggtccctgggggtcttcgtgcgccccggggctgcagagatccaggggaggcgcctgtgaggcccggacctgccccggggcgaagggtatgtggcgagacagagccctgcacccctaattcccggtggaaaactcctgttgccgtttccctccaccggcctggagtctcccagtcttgtcccggcagtgccgccctccccactaagacctaggcgcaaaggcttggctcatggttgacagctcagagagagaaagatctgagggaagatggatgcaaaagctcgaaattgtttgcttcaacatagagaagctctggaaaaggacatcaagacatcctacatcatggatcacatgattagtgatggatttttaacaatatcagaagaggaaaaagtaagaaatgagcccactcaacagcaaagagcagctatgctgattaaaatgatacttaaaaaagataatgattcctacgtatcattctacaatgctctactacatgaaggatataaagatcttgctgcccttctccatgatggcattcctgttgtctcttcttccagtggtaaagattcagttagtggaataacttcgtatgtaaggacagtcctgtgtgaaggtggagtaccacagaggccagttgtttttgtcacaaggaagaagctggtgaatgcaattcagcagaagctctccaaattgaaaggtgaaccaggatgggtcaccatacatggaatggcaggctgtgggaagtctgtattagctgcagaagctgttagagatcattcccttttagaaggttgtttcccagggggagtgcattgggtttcagttgggaaacaagacaaatctgggcttctgatgaaactgcagaatctttgcacacggttggatcaggatgagagtttttcccagaggcttccacttaatattgaagaggctaaagaccgtctccgcattctgatgcttcgcaaacacccaaggtctctcttgatcttggatgatgtttgggactcttgggtgttgaaagcttttgacagtcagtgtcagattcttcttacaaccagagacaagagtgttacagattcagtaatgggtcctaaatatgtagtccctgtggagagttccttaggaaaggaaaaaggacttgaaattttatccctttttgttaatatgaagaaggcagatttgccagaacaagctcatagtattataaaagaatgtaaaggctctccccttgtagtatctttaattggtgcacttttacgtgattttcccaatcgctgggagtactacctcaaacagcttcagaataagcagtttaagagaataaggaaatcttcgtcttatgattatgaggctctagatgaagccatgtctataagtgttgaaatgctcagagaagacatcaaagattattacacagatctttccatccttcagaaggacgttaaggtgcctacaaaggtgttatgtattctctgggacatggaaactgaagaagttgaagacatactgcaggagtttgtaaataagtctcttttattctgtgatcggaatggaaagtcgtttcgttattatttacatgatcttcaagtagattttcttacagagaagaattgcagccagcttcaggatctacataagaagataatcactcagtttcagagatatcaccagccgcatactctttcaccagatcaggaagactgtatgtattggtacaactttctggcctatcacatggccagtgccaagatgcacaaggaactttgtgctttaatgttttccctggattggattaaagcaaaaacagaacttgtaggccctgctcatctgattcatgaatttgtggaatacagacatatactagatgaaaaggattgtgcagtcagtgagaattttcaggagtttttatctttaaatggacaccttcttggacgacagccatttcctaatattgtacaactgggtctctgtgagccggaaacttcagaagtttatcagcaagctaagctgcaggccaagcaggaggtcgataatggaatgctttacctggaatggataaacaaaaaaaacatcacgaatctttcccgcttagttgtccgcccccacacagatgctgtttaccatgcctgcttttctgaggatggtcagagaatagcttcttgtggagctgataaaaccttacaggtgttcaaagctgaaacaggagagaaacttctagaaatcaaggctcatgaggatgaagtgctttgttgtgcattctctacagatgacagatttatagcaacctgctcagtggataaaaaagtgaagatttggaattctatgactggggaactagtacacacctatgatgagcactcagagcaagtcaattgctgccatttcaccaacagtagtcatcatcttctcttagccactgggtcaagtgactgcttcctcaaactttgggatttgaatcaaaaagaatgtcgaaataccatgtttggtcatacaaattcagtcaatcactgcagattttcaccagatgataagcttttggctagttgttcagctgatggaaccttaaagctttgggatgcgacatcagcaaatgagaggaaaagcattaatgtgaaacagttcttcctaaatttggaggaccctcaagaggatatggaagtgatagtgaagtgttgttcgtggtctgctgatggtgcaaggataatggtggcagcaaaaaataaaatctttttgtggaatacagactcacgttcaaaggtggctgattgcagaggacatttaagttgggttcatggtgtgatgttttctcctgatggatcatcatttttgacatcttctgatgaccagacaatcaggctctgggagacaaagaaagtatgtaagaactctgctgtaatgttaaagcaagaagtagatgttgtgtttcaagaaaatgaagtgatggtccttgcagttgaccatataagacgtctgcaactcattaatggaagaacaggtcagattgattatctgactgaagctcaagttagctgctgttgcttaagtccacatcttcagtacattgcatttggagatgaaaatggagccattgagattttagaacttgtaaacaatagaatcttccagtccaggtttcagcacaagaaaactgtatggcacatccagttcacagccgatgagaagactcttatttcaagttctgatgatgctgaaattcaggtatggaattggcaattggacaaatgtatctttctacgaggccatcaggaaacagtgaaagactttagactcttgaaaaattcaagactgctttcttggtcatttgatggaacagtgaaggtatggaatattattactggaaataaagaaaaagactttgtctgtcaccagggtacagtactttcttgtgacatttctcacgatgctaccaagttttcatctacctctgctgacaagactgcaaagatatggaatgtctcaaacggtgagcttcttcatttgtgtgctccgctttcagaagaaggagctgctacccatggaggctgggtgactgacctttgcttttctccagatggcaaaatgcttatctctgctggaggatatattaagtggtggaacgttgtcactggggaatcctcacagaccttctacacaaatggaaccaatcttaagaaaatacacgtgtcccctgacttcaaaacatatgtgactgtggataatcttggtattttatatattttacagactttagaataaaatagttaagcattaatgtagttgaactttttaaatttttgaattggaaaaaaattctaatgaaaccctgatatcaactttttataaagctcttaattgttgtgcagtattgcattcattacaaaagtgtttgtggttggatgaataatattaatgtagctttttcccaaatgaacatacctttaatcttgtttttcatgatcatcattaacagtttgtccttaggatgcaaatgaaaatgtgaatacataccttgttgtactgttggtaaaattctgtcttgatgcattcaaaatggttgacataattaatgagaagaatttggaagaaattggtattttaatactgtctgtatttattactgttatgcaggctgtgcctcagggtagcagtggcctgctttttgaaccacacttaccccaagggggttttgttctcctaaatacaatcttagaggttttttgcactctttaaatttgctttaaaaatattgtgtctgtgtgcatagtctgcagcatttcctttaattgactcaataagtgagtcttggatttagcaggcccccccaccttttttttttgtttttggagacagagtcttgctttgttgccaggctggagtgcagtggcgcgatctcggctcaccacaatcgctgcctcctgggttcaagcaattctcctgcctcagcctcccgagtagctgggactacaggtgtgcgcacatgccaggctaatttttgtatttttagtagagacggggtttcaccatgttggccgggatggtctcgatctcttgacctcatgatctacccgccttggcctcccaaagtgctgagattacaggcgtgagccaccgtgcctggccaggccccttctcttttaatggagacagggtcttgcactatcacccaggctggagtgcagtggcataatcatacctcattgcagcctcagactcctgggttcaagcaatcctcctgcctcagcctcccaagtagctgagactacaggcacgagccaccacacccagctaatttttaagttttcttgtagagacagggtctcactatgttgtctaggctggtcttgaactcttggcctcaagtaatcctcctgcctcagcctcccaaagtgttgggattgcagatatgagccactggcctggccttcagcagttctttttgtgaagtaaaacttgtatgttggaaagagtagattttattggtctacccttttctcactgtagctgctggcagccctgtgccatatctggactctagttgtcagtatctgagttggacactattcctgctccctcttgtttcttacatatcagacttcttacttgaatgaaacctgatctttcctaatcctcacttttttcttttttaaaaagcagtttctccactgctaaatgttagtcattgaggtggggccaattttaatcataagccttaataagatttttctaagaaatgtgaaatagaacaattttcatctaattccatttacttttagatgaatggcattgtgaatgccattcttttaatgaatttcaagagaattctctggttttctgtgtaattccagatgagtcactgtaactctagaagattaaccttccagccaacctattttcctttcccttgtctctctcatcctcttttccttccttctttcctttctcttcttttatctccaaggttaatcaggaaaaatagcttttgacaggggaaaaaactcaataactagctatttttgacctcctgatcaggaactttagttgaagcgtaaatctaaagaaacattttctctgaaatatattattaagggcaatggagataaattaatagtagatgtggttcccagaaaatataatcaaaattcaaagattttttttgtttctgtaactggaactaaatcaaatgattactagtgttaatagtagataacttgtttttattgttggtgcatattagtataactgtggggtaggtcggggagagggtaagggaatagatcactcagatgtattttagataagctatttagcctttgatggaatcataaatacagtgaatacaatcctttgcattgttaaggaggttttttgtttttaaatggtgggtcaaggagctagtttacaggcttactgtgatttaagcaaatgtgaaaagtgaaaccttaattttatcaaaagaaatttctgtaaatggtatgtctccttagaatacccaaatcataattttatttgtacacactgttaggggctcatctcatgtaggcagagtataaagtattaccttttggaattaaaagccactgactgttataaagtataacaacacacatcaggttttaaaaagccttgaatggcccttgtcttaaaaagaaattaggagccaggtgcggtggcacgtgcctgtaatcccagctccttgggaggctaagacaggaggattccttgagccctggagtttgagtccagcctgggtgacatagcaagaccctgtcttaaaagaaaaatgggaagaaagacaaggtaacatgaagaaagaagagatacctagtatgatggagctgcaaatttcatggcagttcatgcagtcggtcaagaggaggattttgttttgtagtttgcagatgagcatttctaaagcattttcccttgctgtatttttttgtattataaattacattggacttcatatatataatttttttttacattatatgtctcttgtatgttttgaaactcttgtatttatgatatagcttatatgatttttttgccttggtatacattttaaaatatgaatttaaaaaatttttgtaaaaataaaattcacaaaattgttttg

SEQ ID NO: 255854 - DNA, 7055 bp, Artificial Sequence
  derived and/or modified sequence
aagaagaggtagcgagtggacgtgactgctctatcccgggcaaaagggatagaaccagaggtggggagtctgggcagtcggcgacccgcgaagacttgaggtgccgcagcggcatccggagtagcgccgggctccctccggggtgcagccgccgtcgggggaagggcgccacaggccgggaagacctcctccctttgtgtccagtagtggggtccaccggagggcggcccgtgggccgggcctcaccgcggcgctccgggactgtggggtcaggctgcgttgggtggacgcccacctcgccaaccttcggaggtccctgggggtcttcgtgcgccccggggctgcagagatccaggggaggcgcctgtgaggcccggacctgccccggggcgaagggtatgtggcgagacagagccctgcacccctaattcccggtggaaaactcctgttgccgtttccctccaccggcctggagtctcccagtcttgtcccggcagtgccgccctccccactaagacctaggcgcaaaggcttggctcatggttgacagctcagagagagaaagatctgagggaagatggatgcaaaagctcgaaattgtttgcttcaacatagagaagctctggaaaaggacatcaagacatcctacatcatggatcacatgattagtgatggatttttaacaatatcagaagaggaaaaagtaagaaatgagcccactcaacagcaaagagcagctatgctgattaaaatgatacttaaaaaagataatgattcctacgtatcattctacaatgctctactacatgaaggatataaagatcttgctgcccttctccatgatggcattcctgttgtctcttcttccagtggtaaagattcagttagtggaataacttcgtatgtaaggacagtcctgtgtgaaggtggagtaccacagaggccagttgtttttgtcacaaggaagaagctggtgaatgcaattcagcagaagctctccaaattgaaaggtgaaccaggatgggtcaccatacatggaatggcaggctgtgggaagtctgtattagctgcagaagctgttagagatcattcccttttagaaggttgtttcccagggggagtgcattgggtttcagttgggaaacaagacaaatctgggcttctgatgaaactgcagaatctttgcacacggttggatcaggatgagagtttttcccagaggcttccacttaatattgaagaggctaaagaccgtctccgcattctgatgcttcgcaaacacccaaggtctctcttgatcttggatgatgtttgggactcttgggtgttgaaagcttttgacagtcagtgtcagattcttcttacaaccagagacaagagtgttacagattcagtaatgggtcctaaatatgtagtccctgtggagagttccttaggaaaggaaaaaggacttgaaattttatccctttttgttaatatgaagaaggcagatttgccagaacaagctcatagtattataaaagaatgtaaaggctctccccttgtagtatctttaattggtgcacttttacgtgattttcccaatcgctgggagtactacctcaaacagcttcagaataagcagtttaagagaataaggaaatcttcgtcttatgattatgaggctctagatgaagccatgtctataagtgttgaaatgctcagagaagacatcaaagattattacacagatctttccatccttcagaaggacgttaaggtgcctacaaaggtgttatgtattctctgggacatggaaactgaagaagttgaagacatactgcaggagtttgtaaataagtctcttttattctgtgatcggaatggaaagtcgtttcgttattatttacatgatcttcaagtagattttcttacagagaagaattgcagccagcttcaggatctacataagaagataatcactcagtttcagagatatcaccagccgcatactctttcaccagatcaggaagactgtatgtattggtacaactttctggcctatcacatggccagtgccaagatgcacaaggaactttgtgctttaatgttttccctggattggattaaagcaaaaacagaacttgtaggccctgctcatctgattcatgaatttgtggaatacagacatatactagatgaaaaggattgtgcagtcagtgagaattttcaggagtttttatctttaaatggacaccttcttggacgacagccatttcctaatattgtacaactgggtctctgtgagccggaaacttcagaagtttatcagcaagctaagctgcaggccaagcaggaggtcgataatggaatgctttacctggaatggataaacaaaaaaaacatcacgaatctttcccgcttagttgtccgcccccacacagatgctgtttaccatgcctgcttttctgaggatggtcagagaatagcttcttgtggagctgataaaaccttacaggtgttcaaagctgaaacaggagagaaacttctagaaatcaaggctcatgaggatgaagtgctttgttgtgcattctctacagatgacagatttatagcaacctgctcagtggataaaaaagtgaagatttggaattctatgactggggaactagtacacacctatgatgagcactcagagcaagtcaattgctgccatttcaccaacagtagtcatcatcttctcttagccactgggtcaagtgactgcttcctcaaactttgggatttgaatcaaaaagaatgtcgaaataccatgtttggtcatacaaattcagtcaatcactgcagattttcaccagatgataagcttttggctagttgttcagctgatggaaccttaaagctttgggatgcgacatcagcaaatgagaggaaaagcattaatgtgaaacagttcttcctaaatttggaggaccctcaagaggatatggaagtgatagtgaagtgttgttcgtggtctgctgatggtgcaaggataatggtggcagcaaaaaataaaatctttttgtggaatacagactcacgttcaaaggtggctgattgcagaggacatttaagttgggttcatggtgtgatgttttctcctgatggatcatcatttttgacatcttctgatgaccagacaatcaggctctgggagacaaagaaagtatgtaagaactctgctgtaatgttaaagcaagaagtagatgttgtgtttcaagaaaatgaagtgatggtccttgcagttgaccatataagacgtctgcaactcattaatggaagaacaggtcagattgattatctgactgaagctcaagttagctgctgttgcttaagtccacatcttcagtacattgcatttggagatgaaaatggagccattgagattttagaacttgtaaacaatagaatcttccagtccaggtttcagcacaagaaaactgtatggcacatccagttcacagccgatgagaagactcttatttcaagttctgatgatgctgaaattcaggtatggaattggcaattggacaaatgtatctttctacgaggccatcaggaaacagtgaaagactttagactcttgaaaaattcaagactgctttcttggtcatttgatggaacagtgaaggtatggaatattattactggaaataaagaaaaagactttgtctgtcaccagggtacagtactttcttgtgacatttctcacgatgctaccaagttttcatctacctctgctgacaagactgcaaagatctggagttttgatctccttttgccacttcatgaattgaggggccacaacggctgtgtgcgctgctctgccttctctgtggacagtaccctgctggcaacgggagatgacaatggagaaatcaggatatggaatgtctcaaacggtgagcttcttcatttgtgtgctccgctttcagaagaaggagctgctacccatggaggctgggtgactgacctttgcttttctccagatggcaaaatgcttatctctgctggaggatatattaagtggtggaacgttgtcactggggaatcctcacagaccttctacacaaatggaaccaatcttaagaaaatacacgtgtcccctgacttcaaaacatatgtgactgtggataatcttggtattttatatattttacagactttagaataaaatagttaagcattaatgtagttgaactttttaaatttttgaattggaaaaaaattctaatgaaaccctgatatcaactttttataaagctcttaattgttgtgcagtattgcattcattacaaaagtgtttgtggttggatgaataatattaatgtagctttttcccaaatgaacatacctttaatcttgtttttcatgatcatcattaacagtttgtccttaggatgcaaatgaaaatgtgaatacataccttgttgtactgttggtaaaattctgtcttgatgcattcaaaatggttgacataattaatgagaagaatttggaagaaattggtattttaatactgtctgtatttattactgttatgcaggctgtgcctcagggtagcagtggcctgctttttgaaccacacttaccccaagggggttttgttctcctaaatacaatcttagaggttttttgcactctttaaatttgctttaaaaatattgtgtctgtgtgcatagtctgcagcatttcctttaattgactcaataagtgagtcttggatttagcaggcccccccaccttttttttttgtttttggagacagagtcttgctttgttgccaggctggagtgcagtggcgcgatctcggctcaccacaatcgctgcctcctgggttcaagcaattctcctgcctcagcctcccgagtagctgggactacaggtgtgcgcacatgccaggctaatttttgtatttttagtagagacggggtttcaccatgttggccgggatggtctcgatctcttgacctcatgatctacccgccttggcctcccaaagtgctgagattacaggcgtgagccaccgtgcctggccaggccccttctcttttaatggagacagggtcttgcactatcacccaggctggagtgcagtggcataatcatacctcattgcagcctcagactcctgggttcaagcaatcctcctgcctcagcctcccaagtagctgagactacaggcacgagccaccacacccagctaatttttaagttttcttgtagagacagggtctcactatgttgtctaggctggtcttgaactcttggcctcaagtaatcctcctgcctcagcctcccaaagtgttgggattgcagatatgagccactggcctggccttcagcagttctttttgtgaagtaaaacttgtatgttggaaagagtagattttattggtctacccttttctcactgtagctgctggcagccctgtgccatatctggactctagttgtcagtatctgagttggacactattcctgctccctcttgtttcttacatatcagacttcttacttgaatgaaacctgatctttcctaatcctcacttttttcttttttaaaaagcagtttctccactgctaaatgttagtcattgaggtggggccaattttaatcataagccttaataagatttttctaagaaatgtgaaatagaacaattttcatctaattccatttacttttagatgaatggcattgtgaatgccattcttttaatgaatttcaagagaattctctggttttctgtgtaattccagatgagtcactgtaactctagaagattaaccttccagccaacctattttcctttcccttgtctctctcatcctcttttccttccttctttcctttctcttcttttatctccaaggttaatcaggaaaaatagcttttgacaggggaaaaaactcaataactagctatttttgacctcctgatcaggaactttagttgaagcgtaaatctaaagaaacattttctctgaaatatattattaagggcaatggagataaattaatagtagatgtggttcccagaaaatataatcaaaattcaaagattttttttgtttctgtaactggaactaaatcaaatgattactagtgttaatagtagataacttgtttttattgttggtgcatattagtataactgtggggtaggtcggggagagggtaagggaatagatcactcagatgtattttagataagctatttagcctttgatggaatcataaatacagtgaatacaatcctttgcattgttaaggaggttttttgtttttaaatggtgggtcaaggagctagtttacaggcttactgtgatttaagcaaatgtgaaaagtgaaaccttaattttatcaaaagaaatttctgtaaatggtatgtctccttagaatacccaaatcataattttatttgtacacactgttaggggctcatctcatgtaggcagagtataaagtattaccttttggaattaaaagccactgactgttataaagtataacaacacacatcaggttttaaaaagccttgaatggcccttgtcttaaaaagaaattaggagccaggtgcggtggcacgtgcctgtaatcccagctccttgggaggctaagacaggaggattccttgagccctggagtttgagtccagcctgggtgacatagcaagaccctgtcttaaaagaaaaatgggaagaaagacaaggtaacatgaagaaagaagagatacctagtatgatggagctgcaaatttcatggcagttcatgcagtcggtcaagaggaggattttgttttgtagtttgcagatgagcatttctaaagcattttcccttgctgtatttttttgtattataaattacattggacttcatatatataatttttttttacattatatgtctcttgtatgttttgaaactcttgtatttatgatatagcttatatgatttttttgccttggtatacattttaaaatatgaatttaaaaaatttttgtaaaaataaaattcacaaaattgttttg

SEQ ID NO: 255855 - DNA, 3744 bp, Artificial Sequence
  derived and/or modified sequence
ggaagatggatgcaaaagctcgaaattgtttgcttcaacatagagaagctctggaaaaggacatcaagacatcctacatcatggatcacatgattagtgatggatttttaacaatatcagaagaggaaaaagtaagaaatgagcccactcaacagcaaagagcagctatgctgattaaaatgatacttaaaaaagataatgattcctacgtatcattctacaatgctctactacatgaaggatataaagatcttgctgcccttctccatgatggcattcctgttgtctcttcttccagtggtaaagattcagttagtggaataacttcgtatgtaaggacagtcctgtgtgaaggtggagtaccacagaggccagttgtttttgtcacaaggaagaagctggtgaatgcaattcagcagaagctctccaaattgaaaggtgaaccaggatgggtcaccatacatggaatggcaggctgtgggaagtctgtattagctgcagaagctgttagagatcattcccttttagaaggttgtttcccagggggagtgcattgggtttcagttgggaaacaagacaaatctgggcttctgatgaaactgcagaatctttgcacacggttggatcaggatgagagtttttcccagaggcttccacttaatattgaagaggctaaagaccgtctccgcattctgatgcttcgcaaacacccaaggtctctcttgatcttggatgatgtttgggactcttgggtgttgaaagcttttgacagtcagtgtcagattcttcttacaaccagagacaagagtgttacagattcagtaatgggtcctaaatatgtagtccctgtggagagttccttaggaaaggaaaaaggacttgaaattttatccctttttgttaatatgaagaaggcagatttgccagaacaagctcatagtattataaaagaatgtaaaggctctccccttgtagtatctttaattggtgcacttttacgtgattttcccaatcgctgggagtactacctcaaacagcttcagaataagcagtttaagagaataaggaaatcttcgtcttatgattatgaggctctagatgaagccatgtctataagtgttgaaatgctcagagaagacatcaaagattattacacagatctttccatccttcagaaggacgttaaggtgcctacaaaggtgttatgtattctctgggacatggaaactgaagaagttgaagacatactgcaggagtttgtaaataagtctcttttattctgtgatcggaatggaaagtcgtttcgttattatttacatgatcttcaagtagattttcttacagagaagaattgcagccagcttcaggatctacataagaagataatcactcagtttcagagatatcaccagccgcatactctttcaccagatcaggaagactgtatgtattggtacaactttctggcctatcacatggccagtgccaagatgcacaaggaactttgtgctttaatgttttccctggattggattaaagcaaaaacagaacttgtaggccctgctcatctgattcatgaatttgtggaatacagacatatactagatgaaaaggattgtgcagtcagtgagaattttcaggagtttttatctttaaatggacaccttcttggacgacagccatttcctaatattgtacaactgggtctctgtgagccggaaacttcagaagtttatcagcaagctaagctgcaggccaagcaggaggtcgataatggaatgctttacctggaatggataaacaaaaaaaacatcacgaatctttcccgcttagttgtccgcccccacacagatgctgtttaccatgcctgcttttctgaggatggtcagagaatagcttcttgtggagctgataaaaccttacaggtgttcaaagctgaaacaggagagaaacttctagaaatcaaggctcatgaggatgaagtgctttgttgtgcattctctacagatgacagatttatagcaacctgctcagtggataaaaaagtgaagatttggaattctatgactggggaactagtacacacctatgatgagcactcagagcaagtcaattgctgccatttcaccaacagtagtcatcatcttctcttagccactgggtcaagtgactgcttcctcaaactttgggatttgaatcaaaaagaatgtcgaaataccatgtttggtcatacaaattcagtcaatcactgcagattttcaccagatgataagcttttggctagttgttcagctgatggaaccttaaagctttgggatgcgacatcagcaaatgagaggaaaagcattaatgtgaaacagttcttcctaaatttggaggaccctcaagaggatatggaagtgatagtgaagtgttgttcgtggtctgctgatggtgcaaggataatggtggcagcaaaaaataaaatctttttgtggaatacagactcacgttcaaaggtggctgattgcagaggacatttaagttgggttcatggtgtgatgttttctcctgatggatcatcatttttgacatcttctgatgaccagacaatcaggctctgggagacaaagaaagtatgtaagaactctgctgtaatgttaaagcaagaagtagatgttgtgtttcaagaaaatgaagtgatggtccttgcagttgaccatataagacgtctgcaactcattaatggaagaacaggtcagattgattatctgactgaagctcaagttagctgctgttgcttaagtccacatcttcagtacattgcatttggagatgaaaatggagccattgagattttagaacttgtaaacaatagaatcttccagtccaggtttcagcacaagaaaactgtatggcacatccagttcacagccgatgagaagactcttatttcaagttctgatgatgctgaaattcaggtatggaattggcaattggacaaatgtatctttctacgaggccatcaggaaacagtgaaagactttagactcttgaaaaattcaagactgctttcttggtcatttgatggaacagtgaaggtatggaatattattactggaaataaagaaaaagactttgtctgtcaccagggtacagtactttcttgtgacatttctcacgatgctaccaagttttcatctacctctgctgacaagactgcaaagatctggagttttgatctccttttgccacttcatgaattgaggggccacaacggctgtgtgcgctgctctgccttctctgtggacagtaccctgctggcaacgggagatgacaatggagaaatcaggatatggaatgtctcaaacggtgagcttcttcatttgtgtgctccgctttcagaagaaggagctgctacccatggaggctgggtgactgacctttgcttttctccagatggcaaaatgcttatctctgctggaggatatattaagtggtggaacgttgtcactggggaatcctcacagaccttctacacaaatggaaccaatcttaagaaaatacacgtgtcccctgacttcaaaacatatgtgactgtggataatcttggtattttatatattttacagactttagaataaaatagttaagcattaatgtagttgaactttttaaatttttgaattggaaaaaaattctaatgaaaccctgatatcaactttttataaagctcttaattgttgtgcagtattgcattcatta

SEQ ID NO: 255856 - DNA, 3492 bp, Artificial Sequence
  derived and/or modified sequence
atggatgcaaaagctcgaaattgtttgcttcaacatagagaagctctggaaaaggacatcaagacatcctacatcatggatcacatgattagtgatggatttttaacaatatcagaagaggaaaaagtaagaaatgagcccactcaacagcaaagagcagctatgctgattaaaatgatacttaaaaaagataatgattcctacgtatcattctacaatgctctactacatgaaggatataaagatcttgctgcccttctccatgatggcattcctgttgtctcttcttccagtggtaaagattcagttagtggaataacttcgtatgtaaggacagtcctgtgtgaaggtggagtaccacagaggccagttgtttttgtcacaaggaagaagctggtgaatgcaattcagcagaagctctccaaattgaaaggtgaaccaggatgggtcaccatacatggaatggcaggctgtgggaagtctgtattagctgcagaagctgttagagatcattcccttttagaaggttgtttcccagggggagtgcattgggtttcagttgggaaacaagacaaatctgggcttctgatgaaactgcagaatctttgcacacggttggatcaggatgagagtttttcccagaggcttccacttaatattgaagaggctaaagaccgtctccgcattctgatgcttcgcaaacacccaaggtctctcttgatcttggatgatgtttgggactcttgggtgttgaaagcttttgacagtcagtgtcagattcttcttacaaccagagacaagagtgttacagattcagtaatgggtcctaaatatgtagtccctgtggagagttccttaggaaaggaaaaaggacttgaaattttatccctttttgttaatatgaagaaggcagatttgccagaacaagctcatagtattataaaagaatgtaaaggctctccccttgtagtatctttaattggtgcacttttacgtgattttcccaatcgctgggagtactacctcaaacagcttcagaataagcagtttaagagaataaggaaatcttcgtcttatgattatgaggctctagatgaagccatgtctataagtgttgaaatgctcagagaagacatcaaagattattacacagatctttccatccttcagaaggacgttaaggtgcctacaaaggtgttatgtattctctgggacatggaaactgaagaagttgaagacatactgcaggagtttgtaaataagtctcttttattctgtgatcggaatggaaagtcgtttcgttattatttacatgatcttcaagtagattttcttacagagaagaattgcagccagcttcaggatctacataagaagataatcactcagtttcagagatatcaccagccgcatactctttcaccagatcaggaagactgtatgtattggtacaactttctggcctatcacatggccagtgccaagatgcacaaggaactttgtgctttaatgttttccctggattggattaaagcaaaaacagaacttgtaggccctgctcatctgattcatgaatttgtggaatacagacatatactagatgaaaaggattgtgcagtcagtgagaattttcaggagtttttatctttaaatggacaccttcttggacgacagccatttcctaatattgtacaactgggtctctgtgagccggaaacttcagaagtttatcagcaagctaagctgcaggccaagcaggaggtcgataatggaatgctttacctggaatggataaacaaaaaaaacatcacgaatctttcccgcttagttgtccgcccccacacagatgctgtttaccatgcctgcttttctgaggatggtcagagaatagcttcttgtggagctgataaaaccttacaggtgttcaaagctgaaacaggagagaaacttctagaaatcaaggctcatgaggatgaagtgctttgttgtgcattctctacagatgacagatttatagcaacctgctcagtggataaaaaagtgaagatttggaattctatgactggggaactagtacacacctatgatgagcactcagagcaagtcaattgctgccatttcaccaacagtagtcatcatcttctcttagccactgggtcaagtgactgcttcctcaaactttgggatttgaatcaaaaagaatgtcgaaataccatgtttggtcatacaaattcagtcaatcactgcagattttcaccagatgataagcttttggctagttgttcagctgatggaaccttaaagctttgggatgcgacatcagcaaatgagaggaaaagcattaatgtgaaacagttcttcctaaatttggaggaccctcaagaggatatggaagtgatagtgaagtgttgttcgtggtctgctgatggtgcaaggataatggtggcagcaaaaaataaaatctttttgtggaatacagactcacgttcaaaggtggctgattgcagaggacatttaagttgggttcatggtgtgatgttttctcctgatggatcatcatttttgacatcttctgatgaccagacaatcaggctctgggagacaaagaaagtatgtaagaactctgctgtaatgttaaagcaagaagtagatgttgtgtttcaagaaaatgaagtgatggtccttgcagttgaccatataagacgtctgcaactcattaatggaagaacaggtcagattgattatctgactgaagctcaagttagctgctgttgcttaagtccacatcttcagtacattgcatttggagatgaaaatggagccattgagattttagaacttgtaaacaatagaatcttccagtccaggtttcagcacaagaaaactgtatggcacatccagttcacagccgatgagaagactcttatttcaagttctgatgatgctgaaattcaggtatggaattggcaattggacaaatgtatctttctacgaggccatcaggaaacagtgaaagactttagactcttgaaaaattcaagactgctttcttggtcatttgatggaacagtgaaggtatggaatattattactggaaataaagaaaaagactttgtctgtcaccagggtacagtactttcttgtgacatttctcacgatgctaccaagttttcatctacctctgctgacaagactgcaaagatatggaatgtctcaaacggtgagcttcttcatttgtgtgctccgctttcagaagaaggagctgctacccatggaggctgggtgactgacctttgcttttctccagatggcaaaatgcttatctctgctggaggatatattaagtggtggaacgttgtcactggggaatcctcacagaccttctacacaaatggaaccaatcttaagaaaatacacgtgtcccctgacttcaaaacatatgtgactgtggataatcttggtattttatatattttacagactttagaataa

SEQ ID NO: 255857 - DNA, 3492 bp, Artificial Sequence
  derived and/or modified sequence
atggacgccaaggccagaaactgcctgctgcagcacagagaggccctggagaaggacatcaagaccagctacatcatggaccacatgatcagcgacggcttcctgaccatcagcgaggaggagaaggtgagaaacgagcccacccagcagcagagagccgccatgctgatcaagatgatcctgaagaaggacaacgacagctacgtgagcttctacaacgccctgctgcacgagggctacaaggacctggccgccctgctgcacgacggcatccccgtggtgagcagcagcagcggcaaggacagcgtgagcggcatcaccagctacgtgagaaccgtgctgtgcgagggcggcgtgccccagagacccgtggtgttcgtgaccagaaagaagctggtgaacgccatccagcagaagctgagcaagctgaagggcgagcccggctgggtgaccatccacggcatggccggctgcggcaagagcgtgctggccgccgaggccgtgagagaccacagcctgctggagggctgcttccccggcggcgtgcactgggtgagcgtgggcaagcaggacaagagcggcctgctgatgaagctgcagaacctgtgcaccagactggaccaggacgagagcttcagccagagactgcccctgaacatcgaggaggccaaggacagactgagaatcctgatgctgagaaagcaccccagaagcctgctgatcctggacgacgtgtgggacagctgggtgctgaaggccttcgacagccagtgccagatcctgctgaccaccagagacaagagcgtgaccgacagcgtgatgggccccaagtacgtggtgcccgtggagagcagcctgggcaaggagaagggcctggagatcctgagcctgttcgtgaacatgaagaaggccgacctgcccgagcaggcccacagcatcatcaaggagtgcaagggcagccccctggtggtgagcctgatcggcgccctgctgagagacttccccaacagatgggagtactacctgaagcagctgcagaacaagcagttcaagagaatcagaaagagcagcagctacgactacgaggccctggacgaggccatgagcatcagcgtggagatgctgagagaggacatcaaggactactacaccgacctgagcatcctgcagaaggacgtgaaggtgcccaccaaggtgctgtgcatcctgtgggacatggagaccgaggaggtggaggacatcctgcaggagttcgtgaacaagagcctgctgttctgcgacagaaacggcaagagcttcagatactacctgcacgacctgcaggtggacttcctgaccgagaagaactgcagccagctgcaggacctgcacaagaagatcatcacccagttccagagataccaccagccccacaccctgagccccgaccaggaggactgcatgtactggtacaacttcctggcctaccacatggccagcgccaagatgcacaaggagctgtgcgccctgatgttcagcctggactggatcaaggccaagaccgagctggtgggccccgcccacctgatccacgagttcgtggagtacagacacatcctggacgagaaggactgcgccgtgagcgagaacttccaggagttcctgagcctgaacggccacctgctgggcagacagcccttccccaacatcgtgcagctgggcctgtgcgagcccgagaccagcgaggtgtaccagcaggccaagctgcaggccaagcaggaggtggacaacggcatgctgtacctggagtggatcaacaagaagaacatcaccaacctgagcagactggtggtgagaccccacaccgacgccgtgtaccacgcctgcttcagcgaggacggccagagaatcgccagctgcggcgccgacaagaccctgcaggtgttcaaggccgagaccggcgagaagctgctggagatcaaggcccacgaggacgaggtgctgtgctgcgccttcagcaccgacgacagattcatcgccacctgcagcgtggacaagaaggtgaagatctggaacagcatgaccggcgagctggtgcacacctacgacgagcacagcgagcaggtgaactgctgccacttcaccaacagcagccaccacctgctgctggccaccggcagcagcgactgcttcctgaagctgtgggacctgaaccagaaggagtgcagaaacaccatgttcggccacaccaacagcgtgaaccactgcagattcagccccgacgacaagctgctggccagctgcagcgccgacggcaccctgaagctgtgggacgccaccagcgccaacgagagaaagagcatcaacgtgaagcagttcttcctgaacctggaggacccccaggaggacatggaggtgatcgtgaagtgctgcagctggagcgccgacggcgccagaatcatggtggccgccaagaacaagatcttcctgtggaacaccgacagcagaagcaaggtggccgactgcagaggccacctgagctgggtgcacggcgtgatgttcagccccgacggcagcagcttcctgaccagcagcgacgaccagaccatcagactgtgggagaccaagaaggtgtgcaagaacagcgccgtgatgctgaagcaggaggtggacgtggtgttccaggagaacgaggtgatggtgctggccgtggaccacatcagaagactgcagctgatcaacggcagaaccggccagatcgactacctgaccgaggcccaggtgagctgctgctgcctgagcccccacctgcagtacatcgccttcggcgacgagaacggcgccatcgagatcctggagctggtgaacaacagaatcttccagagcagattccagcacaagaagaccgtgtggcacatccagttcaccgccgacgagaagaccctgatcagcagcagcgacgacgccgagatccaggtgtggaactggcagctggacaagtgcatcttcctgagaggccaccaggagaccgtgaaggacttcagactgctgaagaacagcagactgctgagctggagcttcgacggcaccgtgaaggtgtggaacatcatcaccggcaacaaggagaaggacttcgtgtgccaccagggcaccgtgctgagctgcgacatcagccacgacgccaccaagttcagcagcaccagcgccgacaagaccgccaagatctggaacgtgagcaacggcgagctgctgcacctgtgcgcccccctgagcgaggagggcgccgccacccacggcggctgggtgaccgacctgtgcttcagccccgacggcaagatgctgatcagcgccggcggctacatcaagtggtggaacgtggtgaccggcgagagcagccagaccttctacaccaacggcaccaacctgaagaagatccacgtgagccccgacttcaagacctacgtgaccgtggacaacctgggcatcctgtacatcctgcagaccctggagtag

SEQ ID NO: 255858 - DNA, 3618 bp, Artificial Sequence
  derived and/or modified sequence
atggacgccaaggccagaaactgcctgctgcagcacagagaggccctggagaaggacatcaagaccagctacatcatggaccacatgatcagcgacggcttcctgaccatcagcgaggaggagaaggtgagaaacgagcccacccagcagcagagagccgccatgctgatcaagatgatcctgaagaaggacaacgacagctacgtgagcttctacaacgccctgctgcacgagggctacaaggacctggccgccctgctgcacgacggcatccccgtggtgagcagcagcagcggcaaggacagcgtgagcggcatcaccagctacgtgagaaccgtgctgtgcgagggcggcgtgccccagagacccgtggtgttcgtgaccagaaagaagctggtgaacgccatccagcagaagctgagcaagctgaagggcgagcccggctgggtgaccatccacggcatggccggctgcggcaagagcgtgctggccgccgaggccgtgagagaccacagcctgctggagggctgcttccccggcggcgtgcactgggtgagcgtgggcaagcaggacaagagcggcctgctgatgaagctgcagaacctgtgcaccagactggaccaggacgagagcttcagccagagactgcccctgaacatcgaggaggccaaggacagactgagaatcctgatgctgagaaagcaccccagaagcctgctgatcctggacgacgtgtgggacagctgggtgctgaaggccttcgacagccagtgccagatcctgctgaccaccagagacaagagcgtgaccgacagcgtgatgggccccaagtacgtggtgcccgtggagagcagcctgggcaaggagaagggcctggagatcctgagcctgttcgtgaacatgaagaaggccgacctgcccgagcaggcccacagcatcatcaaggagtgcaagggcagccccctggtggtgagcctgatcggcgccctgctgagagacttccccaacagatgggagtactacctgaagcagctgcagaacaagcagttcaagagaatcagaaagagcagcagctacgactacgaggccctggacgaggccatgagcatcagcgtggagatgctgagagaggacatcaaggactactacaccgacctgagcatcctgcagaaggacgtgaaggtgcccaccaaggtgctgtgcatcctgtgggacatggagaccgaggaggtggaggacatcctgcaggagttcgtgaacaagagcctgctgttctgcgacagaaacggcaagagcttcagatactacctgcacgacctgcaggtggacttcctgaccgagaagaactgcagccagctgcaggacctgcacaagaagatcatcacccagttccagagataccaccagccccacaccctgagccccgaccaggaggactgcatgtactggtacaacttcctggcctaccacatggccagcgccaagatgcacaaggagctgtgcgccctgatgttcagcctggactggatcaaggccaagaccgagctggtgggccccgcccacctgatccacgagttcgtggagtacagacacatcctggacgagaaggactgcgccgtgagcgagaacttccaggagttcctgagcctgaacggccacctgctgggcagacagcccttccccaacatcgtgcagctgggcctgtgcgagcccgagaccagcgaggtgtaccagcaggccaagctgcaggccaagcaggaggtggacaacggcatgctgtacctggagtggatcaacaagaagaacatcaccaacctgagcagactggtggtgagaccccacaccgacgccgtgtaccacgcctgcttcagcgaggacggccagagaatcgccagctgcggcgccgacaagaccctgcaggtgttcaaggccgagaccggcgagaagctgctggagatcaaggcccacgaggacgaggtgctgtgctgcgccttcagcaccgacgacagattcatcgccacctgcagcgtggacaagaaggtgaagatctggaacagcatgaccggcgagctggtgcacacctacgacgagcacagcgagcaggtgaactgctgccacttcaccaacagcagccaccacctgctgctggccaccggcagcagcgactgcttcctgaagctgtgggacctgaaccagaaggagtgcagaaacaccatgttcggccacaccaacagcgtgaaccactgcagattcagccccgacgacaagctgctggccagctgcagcgccgacggcaccctgaagctgtgggacgccaccagcgccaacgagagaaagagcatcaacgtgaagcagttcttcctgaacctggaggacccccaggaggacatggaggtgatcgtgaagtgctgcagctggagcgccgacggcgccagaatcatggtggccgccaagaacaagatcttcctgtggaacaccgacagcagaagcaaggtggccgactgcagaggccacctgagctgggtgcacggcgtgatgttcagccccgacggcagcagcttcctgaccagcagcgacgaccagaccatcagactgtgggagaccaagaaggtgtgcaagaacagcgccgtgatgctgaagcaggaggtggacgtggtgttccaggagaacgaggtgatggtgctggccgtggaccacatcagaagactgcagctgatcaacggcagaaccggccagatcgactacctgaccgaggcccaggtgagctgctgctgcctgagcccccacctgcagtacatcgccttcggcgacgagaacggcgccatcgagatcctggagctggtgaacaacagaatcttccagagcagattccagcacaagaagaccgtgtggcacatccagttcaccgccgacgagaagaccctgatcagcagcagcgacgacgccgagatccaggtgtggaactggcagctggacaagtgcatcttcctgagaggccaccaggagaccgtgaaggacttcagactgctgaagaacagcagactgctgagctggagcttcgacggcaccgtgaaggtgtggaacatcatcaccggcaacaaggagaaggacttcgtgtgccaccagggcaccgtgctgagctgcgacatcagccacgacgccaccaagttcagcagcaccagcgccgacaagaccgccaagatctggagcttcgacctgctgctgcccctgcacgagctgagaggccacaacggctgcgtgagatgcagcgccttcagcgtggacagcaccctgctggccaccggcgacgacaacggcgagatcagaatctggaacgtgagcaacggcgagctgctgcacctgtgcgcccccctgagcgaggagggcgccgccacccacggcggctgggtgaccgacctgtgcttcagccccgacggcaagatgctgatcagcgccggcggctacatcaagtggtggaacgtggtgaccggcgagagcagccagaccttctacaccaacggcaccaacctgaagaagatccacgtgagccccgacttcaagacctacgtgaccgtggacaacctgggcatcctgtacatcctgcagaccctggagtag

SEQ ID NO: 255859 - protein, 338 aa, Artificial Sequence
  derived and/or modified sequence
MDAKARNCLLQHREALEKDIKTSYIMDHMISDGFLTISEEEKVRNEPTQQQRAAMLIKMILKKDNDSYVSFYNALLHEGYKDLAALLHDGIPVVSSSSGKDSVSGITSYVRTVLCEGGVPQRPVVFVTRKKLVNAIQQKLSKLKGEPGWVTIHGMAGCGKSVLAAEAVRDHSLLEGCFPGGVHWVSVGKQDKSGLLMKLQNLCTRLDQDESFSQRLPLNIEEAKDRLRILMLRKHPRSLLILDDVWDSWVLKAFDSQCQILLTTRDKSVTDSVMGPKYVVPVESSLGKEKGLEILSLFVNMKKADLPEQAHSIIKECKVVERCHWGILTDLLHKWNQS

SEQ ID NO: 255860 - DNA, 1017 bp, Artificial Sequence
  derived and/or modified sequence
atggatgccaaggctcgaaactgtttgttgcagcacagggaggcgctagaaaaagacataaagacatcctatataatggatcatatgatctctgacggttttctgaccatctctgaagaggaaaaagtaagaaatgagcctacccagcagcaacgggccgcaatgctgatcaaaatgatccttaaaaaagacaatgacagctatgtctccttctataacgcacttctgcatgaggggtataaggacttggccgcccttttacatgacggtataccagtggtctcctcatcatccggcaaggacagcgtgtccgggataaccagctatgtgcggacagtgctttgtgaagggggagtgccccagcggcctgtagtgttcgtgacaagaaagaaattagttaacgcaatccaacagaagctgagtaaactgaaaggggagcctggttgggtcactatccacggcatggctggttgtgggaagagtgtgctagccgccgaggccgtgcgggaccactcactcctggaaggctgttttcctggaggggtgcattgggtgtccgtggggaagcaagataagagcggactgctcatgaagctccagaatctctgcacacgattagaccaggatgaatcatttagtcaacgtctgcctttgaacattgaagaggcaaaagatcggctgcggatcctcatgctccggaagcatcctcggtccctgctgatcctggacgatgtgtgggatagttgggtcctgaaggcctttgacagtcaatgccagatactgctgacaacacgagacaaaagcgtaacagattccgtaatgggcccgaagtatgtcgtcccagttgaaagttcgctgggaaaggaaaaagggctggaaatcctgagcctcttcgtcaatatgaaaaaagcagatttacccgagcaggcacactccatcatcaaggaatgcaaagtcgtggaaaggtgtcattgggggatcttaaccgacttacttcacaaatggaatcaaagttag

SEQ ID NO: 255861 - DNA, 1017 bp, Artificial Sequence
  derived and/or modified sequence
atggacgcaaaggcgcgcaactgcctgcttcagcacagggaggcgttagagaaagacatcaaaacctcttacattatggatcatatgatctccgatggtttcctcacgattagcgaagaagaaaaagtgcggaacgagccgacacaacaacagcgcgcggccatgttgatcaaaatgatcctgaaaaaagacaacgactcttacgtgagtttctataatgctcttctgcatgagggctataaagacctcgcggccctgttgcacgatgggatccctgtcgtgtcctcctcttccgggaaggatagcgtgagcggaatcacctcttacgtgagaacggtcctgtgcgagggcggggtgccgcaaagaccagtcgtgtttgtaactaggaagaagctagtgaacgccatccagcaaaaactgtcgaagctcaagggtgaaccagggtgggtaacaatccacggaatggctggttgtggcaaatcggtgttggcagccgaagcggtcagagaccattccctcctggaaggttgttttcctggtggggtgcattgggtttcagtgggtaaacaggacaagagtgggctcctgatgaagctgcagaatctgtgcacccggcttgaccaggacgaaagttttagtcagaggctgcccctgaatatcgaagaggccaaagatcgactgcggatactgatgcttcgcaagcacccgcggtcattgcttatcttggatgatgtgtgggattcttgggttctcaaggcttttgacagtcaatgccagatcctgctgaccacacgcgacaagtctgtgacagacagtgttatgggcccaaaatatgttgtccctgtcgagagctccctgggtaaggagaaagggttagaaatcctgtctctatttgtgaacatgaagaaggccgatttgcccgaacaggcacacagtattataaaggaatgtaaagtagtggaacgatgccactggggcatcctgacagacttgctccataagtggaaccaatcttag

SEQ ID NO: 255862 - DNA, 1017 bp, Artificial Sequence
  derived and/or modified sequence
atggatgccaaggccaggaactgcctgctgcagcaccgggaggccctggagaaggacatcaagaccagctacatcatggaccacatgatcagtgatggcttcctgaccatcagcgaggaggagaaggtgagaaatgagcccacccagcagcagagagctgccatgctgatcaagatgatcctgaagaaggacaatgacagctatgtgtccttctacaatgccctgctgcacgagggctacaaggacctggccgccctgctgcatgatggcatccctgtggtgagcagcagcagcggcaaggacagcgtgtctggcatcaccagctatgtgaggacagtgctgtgtgagggcggcgtgccccagaggcctgtggtgtttgtgaccaggaagaagctggtgaatgccatccagcagaagctgagcaagctgaagggggagcccggctgggtgaccatccacggcatggccggctgtgggaagtctgtgctggccgctgaggccgtgcgggaccacagcctgctggagggctgcttccctggaggagtgcactgggtgtctgtgggcaagcaggacaagagcggcctgctgatgaagctgcagaacctgtgcacccggctggaccaggatgagagcttcagccagaggctgcccctgaacatcgaggaggccaaggaccggctgcgcatcctgatgctgaggaagcaccccaggagcctgctgatcctggatgatgtgtgggacagctgggtgctgaaggcctttgacagccagtgccagatcctgctgaccacccgggacaagtctgtgacagacagcgtgatgggccccaagtatgtggtgcctgtggagagcagcctgggcaaggagaagggcctggagatcctgagcctgtttgtgaacatgaagaaggctgacctgcctgagcaggcccacagcatcatcaaggagtgcaaggtggtggagcgctgccactggggcatcctgacagacctgctgcacaagtggaaccagagctag

SEQ ID NO: 255863 - DNA, 1017 bp, Artificial Sequence
  derived and/or modified sequence
atggacgccaaggcccggaactgcctgctgcagcaccgggaggccctggaaaaagacataaagacatcctacatcatggatcacatgatcagcgacggctttctgacaatctcggaggaggagaaggtgcggaatgagcctacccaacagcagagagctgccatgctgatcaaaatgatcctaaaaaaagacaacgatagctacgtttcattttataatgcactgctgcacgaagggtacaaagatctagccgccctccttcatgacggcattcccgtggtttcgagttcatccggtaaggatagcgtcagcggaataactagttacgtaaggacagtcctctgtgaggggggtgtccctcagaggcctgttgtgtttgtgaccaggaagaaactggtgaatgctatccagcaaaagctcagcaagttgaagggcgagcctggatgggtgacaattcacgggatggccggttgtggcaagagcgttttggccgccgaggccgtcagagatcactctctcctggaagggtgtttccctggcggagtgcattgggtcagcgtcgggaaacaggataagtcagggttgctcatgaagctgcagaatctttgcactcggctggatcaggacgagagtttcagccagaggctgcccctcaatatcgaggaagctaaagatcgactgcggattttgatgctgcggaaacaccccaggagtctgcttattctcgacgacgtttgggactcctgggtactgaaggcctttgacagccaatgtcagattctgctgacaactagagacaagtccgttacagactccgtcatgggaccgaagtacgtggtacccgtggagagcagcctggggaaggaaaaaggcctggaaattttatcactgtttgtcaacatgaagaaggcggatctcccggaacaggcccactccatcatcaaggagtgtaaagtggtagaacgctgccattggggtatacttacggacctgcttcataagtggaaccagagttag

SEQ ID NO: 255864 - DNA, 1017 bp, Artificial Sequence
  derived and/or modified sequence
atggacgccaaggcccggaactgcctgctgcagcaccgggaggcccttgagaaggatattaagacatcctatatcatggaccacatgatcagcgatggatttttaaccataagcgaagaagaaaaggtcaggaatgaaccaacccagcaacaaagggcagccatgctcattaagatgatcttgaagaaggacaacgattcttacgtctccttctataatgcgttactgcatgaaggatacaaggatttagccgccctcctgcacgatggaattcctgtcgtttccagtagctccggaaaagacagcgtgtccggtataacgtcctacgtgcggactgtgctgtgtgagggtggcgtcccacagcggcccgttgtctttgtgacccggaaaaaacttgtcaatgcgatacagcaaaagctcagtaaactcaaaggtgagcctgggtgggtgacgattcatggtatggcagggtgcgggaaaagcgtactcgcggcagaagcagtacgcgaccattctcttctggaaggctgttttcctggcggtgtccattgggtgagcgtgggtaaacaggataagtctggactcctaatgaagttgcaaaatctgtgcaccagactggaccaggatgagagtttctcacaacggctgcctctgaacatcgaagaggctaaggatcgactaagaattctgatgttgcgcaagcatcctcggagcctcctgatcctggacgatgtttgggactcatgggtgctgaaggcattcgatagccaatgccaaatcctgttaaccacaagggacaagagcgtgaccgattccgtgatgggcccgaaatacgtcgtcccagtggagtcaagtctggggaaagagaaaggcctcgagatcttgtcactgtttgtaaacatgaaaaaggccgatctaccggagcaggcccattccattatcaaggaatgcaaagtggttgaacgctgtcactggggtatactgactgatctcctgcacaagtggaatcagagctag

SEQ ID NO: 255865 - DNA, 1017 bp, Artificial Sequence
  derived and/or modified sequence
atggatgccaaggcacgcaactgtttgctacaacatagagaagcccttgagaaggatattaaaaccagttatataatggaccacatgatctccgatgggttcctaactatctctgaagaggagaaagtaaggaacgaaccaactcagcagcaaagggccgcaatgctcattaagatgatcctgaaaaaagataatgattcatacgtctctttttataacgccctgctgcacgaggggtataaggacctggctgctctcctgcatgacggaattcccgtagtttccagctctagcggaaaggattctgtgtctggaatcaccagctacgtgcgaactgtgctgtgcgaagggggtgtgccccagcgccctgtggttttcgtgacccgcaagaagctcgtgaacgcgatccagcagaagctgtccaagctcaaaggggagcccggttgggtcacaattcacggcatggccggttgcggaaaatcagtgctggccgctgaggccgttcgggaccacagcctcttggagggatgcttccctgggggtgtgcactgggttagcgtgggtaaacaggataagagtgggctgctgatgaaactgcagaatttgtgcaccagactcgatcaggatgaatctttctcccagagactccccttaaacattgaggaagccaaagacagacttcgaattttgatgcttcggaagcaccctaggagtctcctgatccttgacgacgtgtgggatagctgggtgctgaaggcatttgactcccaatgccagatcttgcttaccacaagagacaagagcgtgacggactccgttatggggcctaagtacgtggtccctgtggaatcatccttgggaaaggagaaaggattagagatactctccctgttcgtaaatatgaagaaagccgacttacctgaacaggcccacagtatcatcaaggagtgtaaagtagtggagcgatgccactggggtattctgacggacctcctgcacaaatggaatcagagctag

SEQ ID NO: 255866 - DNA, 1017 bp, Artificial Sequence
  derived and/or modified sequence
atggatgcaaaagcccgtaactgtctgctccagcaccgggaagctcttgagaaggacattaagacatcctatatcatggatcacatgatttctgatgggtttctgactattagcgaggaagaaaaagtgcggaatgaacctacacaacagcagcgtgcggcaatgctgattaaaatgatcctgaagaaggacaatgattcttatgttagcttctataacgcgctcctgcacgagggatataaggacctggccgctctgctccacgacgggatccctgtagtgtcaagttcctcagggaaagacagtgtgagcggcattaccagctatgtgcgtaccgtactctgtgagggaggtgttccccagaggcctgtggtgttcgtaacccgaaaaaagctggttaacgcaatacaacaaaaactgagtaagctgaaaggggaacccggatgggtgaccattcatggtatggctgggtgcggcaagagcgtgctggcagctgaagctgtgagagaccactctctgctcgagggttgttttccgggtggggtccattgggtgagtgtgggaaaacaggacaaaagtgggctgcttatgaagctacagaacttgtgcacccgactagaccaggacgagtcgttttcccagcggctccctctcaatatcgaggaggccaaggaccgcctgcggatacttatgctgcggaagcacccccgatccctgctgatactggatgacgtgtgggattcctgggttctcaaagccttcgatagccaatgccagatccttctgacgacaagagataaaagtgtgactgacagcgtcatggggccaaagtacgtggttccagtggagtcttccctcggcaaagagaagggcttagagattttatctcttttcgtcaatatgaaaaaggctgacctaccagaacaagctcatagtattataaaagaatgcaaggtcgtggaacgatgtcattgggggatcctgaccgacctgctgcacaagtggaaccagtcgtag

SEQ ID NO: 255867 - DNA, 4539 bp, Artificial Sequence
  derived and/or modified sequence
aagaagaggtagcgagtggacgtgactgctctatcccgggcaaaagggatagaaccagaggtggggagtctgggcagtcggcgacccgcgaagacttgaggtgccgcagcggcatccggagtagcgccgggctccctccggggtgcagccgccgtcgggggaagggcgccacaggccgggaagacctcctccctttgtgtccagtagtggggtccaccggagggcggcccgtgggccgggcctcaccgcggcgctccgggactgtggggtcaggctgcgttgggtggacgcccacctcgccaaccttcggaggtccctgggggtcttcgtgcgccccggggctgcagagatccaggggaggcgcctgtgaggcccggacctgccccggggcgaagggtatgtggcgagacagagccctgcacccctaattcccggtggaaaactcctgttgccgtttccctccaccggcctggagtctcccagtcttgtcccggcagtgccgccctccccactaagacctaggcgcaaaggcttggctcatggttgacagctcagagagagaaagatctgagggaagatggatgcaaaagctcgaaattgtttgcttcaacatagagaagctctggaaaaggacatcaagacatcctacatcatggatcacatgattagtgatggatttttaacaatatcagaagaggaaaaagtaagaaatgagcccactcaacagcaaagagcagctatgctgattaaaatgatacttaaaaaagataatgattcctacgtatcattctacaatgctctactacatgaaggatataaagatcttgctgcccttctccatgatggcattcctgttgtctcttcttccagtggtaaagattcagttagtggaataacttcgtatgtaaggacagtcctgtgtgaaggtggagtaccacagaggccagttgtttttgtcacaaggaagaagctggtgaatgcaattcagcagaagctctccaaattgaaaggtgaaccaggatgggtcaccatacatggaatggcaggctgtgggaagtctgtattagctgcagaagctgttagagatcattcccttttagaaggttgtttcccagggggagtgcattgggtttcagttgggaaacaagacaaatctgggcttctgatgaaactgcagaatctttgcacacggttggatcaggatgagagtttttcccagaggcttccacttaatattgaagaggctaaagaccgtctccgcattctgatgcttcgcaaacacccaaggtctctcttgatcttggatgatgtttgggactcttgggtgttgaaagcttttgacagtcagtgtcagattcttcttacaaccagagacaagagtgttacagattcagtaatgggtcctaaatatgtagtccctgtggagagttccttaggaaaggaaaaaggacttgaaattttatccctttttgttaatatgaagaaggcagatttgccagaacaagctcatagtattataaaagaatgtaaagtggtggaacgttgtcactggggaatcctcacagaccttctacacaaatggaaccaatcttaagaaaatacacgtgtcccctgacttcaaaacatatgtgactgtggataatcttggtattttatatattttacagactttagaataaaatagttaagcattaatgtagttgaactttttaaatttttgaattggaaaaaaattctaatgaaaccctgatatcaactttttataaagctcttaattgttgtgcagtattgcattcattacaaaagtgtttgtggttggatgaataatattaatgtagctttttcccaaatgaacatacctttaatcttgtttttcatgatcatcattaacagtttgtccttaggatgcaaatgaaaatgtgaatacataccttgttgtactgttggtaaaattctgtcttgatgcattcaaaatggttgacataattaatgagaagaatttggaagaaattggtattttaatactgtctgtatttattactgttatgcaggctgtgcctcagggtagcagtggcctgctttttgaaccacacttaccccaagggggttttgttctcctaaatacaatcttagaggttttttgcactctttaaatttgctttaaaaatattgtgtctgtgtgcatagtctgcagcatttcctttaattgactcaataagtgagtcttggatttagcaggcccccccaccttttttttttgtttttggagacagagtcttgctttgttgccaggctggagtgcagtggcgcgatctcggctcaccacaatcgctgcctcctgggttcaagcaattctcctgcctcagcctcccgagtagctgggactacaggtgtgcgcacatgccaggctaatttttgtatttttagtagagacggggtttcaccatgttggccgggatggtctcgatctcttgacctcatgatctacccgccttggcctcccaaagtgctgagattacaggcgtgagccaccgtgcctggccaggccccttctcttttaatggagacagggtcttgcactatcacccaggctggagtgcagtggcataatcatacctcattgcagcctcagactcctgggttcaagcaatcctcctgcctcagcctcccaagtagctgagactacaggcacgagccaccacacccagctaatttttaagttttcttgtagagacagggtctcactatgttgtctaggctggtcttgaactcttggcctcaagtaatcctcctgcctcagcctcccaaagtgttgggattgcagatatgagccactggcctggccttcagcagttctttttgtgaagtaaaacttgtatgttggaaagagtagattttattggtctacccttttctcactgtagctgctggcagccctgtgccatatctggactctagttgtcagtatctgagttggacactattcctgctccctcttgtttcttacatatcagacttcttacttgaatgaaacctgatctttcctaatcctcacttttttcttttttaaaaagcagtttctccactgctaaatgttagtcattgaggtggggccaattttaatcataagccttaataagatttttctaagaaatgtgaaatagaacaattttcatctaattccatttacttttagatgaatggcattgtgaatgccattcttttaatgaatttcaagagaattctctggttttctgtgtaattccagatgagtcactgtaactctagaagattaaccttccagccaacctattttcctttcccttgtctctctcatcctcttttccttccttctttcctttctcttcttttatctccaaggttaatcaggaaaaatagcttttgacaggggaaaaaactcaataactagctatttttgacctcctgatcaggaactttagttgaagcgtaaatctaaagaaacattttctctgaaatatattattaagggcaatggagataaattaatagtagatgtggttcccagaaaatataatcaaaattcaaagattttttttgtttctgtaactggaactaaatcaaatgattactagtgttaatagtagataacttgtttttattgttggtgcatattagtataactgtggggtaggtcggggagagggtaagggaatagatcactcagatgtattttagataagctatttagcctttgatggaatcataaatacagtgaatacaatcctttgcattgttaaggaggttttttgtttttaaatggtgggtcaaggagctagtttacaggcttactgtgatttaagcaaatgtgaaaagtgaaaccttaattttatcaaaagaaatttctgtaaatggtatgtctccttagaatacccaaatcataattttatttgtacacactgttaggggctcatctcatgtaggcagagtataaagtattaccttttggaattaaaagccactgactgttataaagtataacaacacacatcaggttttaaaaagccttgaatggcccttgtcttaaaaagaaattaggagccaggtgcggtggcacgtgcctgtaatcccagctccttgggaggctaagacaggaggattccttgagccctggagtttgagtccagcctgggtgacatagcaagaccctgtcttaaaagaaaaatgggaagaaagacaaggtaacatgaagaaagaagagatacctagtatgatggagctgcaaatttcatggcagttcatgcagtcggtcaagaggaggattttgttttgtagtttgcagatgagcatttctaaagcattttcccttgctgtatttttttgtattataaattacattggacttcatatatataatttttttttacattatatgtctcttgtatgttttgaaactcttgtatttatgatatagcttatatgatttttttgccttggtatacattttaaaatatgaatttaaaaaatttttgtaaaaataaaattcacaaaattgttttg

SEQ ID NO: 255868 - DNA, 1143 bp, Artificial Sequence
  derived and/or modified sequence
tagctcatggttgacagctcagagagagaaagatctgagggaagatggatgcaaaagctcgaaattgtttgcttcaacatagagaagctctggaaaaggacatcaagacatcctacatcatggatcacatgattagtgatggatttttaacaatatcagaagaggaaaaagtaagaaatgagcccactcaacagcaaagagcagctatgctgattaaaatgatacttaaaaaagataatgattcctacgtatcattctacaatgctctactacatgaaggatataaagatcttgctgcccttctccatgatggcattcctgttgtctcttcttccagtggtaaagattcagttagtggaataacttcgtatgtaaggacagtcctgtgtgaaggtggagtaccacagaggccagttgtttttgtcacaaggaagaagctggtgaatgcaattcagcagaagctctccaaattgaaaggtgaaccaggatgggtcaccatacatggaatggcaggctgtgggaagtctgtattagctgcagaagctgttagagatcattcccttttagaaggttgtttcccagggggagtgcattgggtttcagttgggaaacaagacaaatctgggcttctgatgaaactgcagaatctttgcacacggttggatcaggatgagagtttttcccagaggcttccacttaatattgaagaggctaaagaccgtctccgcattctgatgcttcgcaaacacccaaggtctctcttgatcttggatgatgtttgggactcttgggtgttgaaagcttttgacagtcagtgtcagattcttcttacaaccagagacaagagtgttacagattcagtaatgggtcctaaatatgtagtccctgtggagagttccttaggaaaggaaaaaggacttgaaattttatccctttttgttaatatgaagaaggcagatttgccagaacaagctcatagtattataaaagaatgtaaagtggtggaacgttgtcactggggaatcctcacagaccttctacacaaatggaaccaatcttaagaaaatacacgtgtcccctgacttcaaaacatatgtgactgtggataatcttggtattttatatattttacagactttagaa

SEQ ID NO: 255869 - DNA, 1017 bp, Artificial Sequence
  derived and/or modified sequence
atggacgccaaggccagaaactgcctgctgcagcacagagaggccctggagaaggacatcaagaccagctacatcatggaccacatgatcagcgacggcttcctgaccatcagcgaggaggagaaggtgagaaacgagcccacccagcagcagagagccgccatgctgatcaagatgatcctgaagaaggacaacgacagctacgtgagcttctacaacgccctgctgcacgagggctacaaggacctggccgccctgctgcacgacggcatccccgtggtgagcagcagcagcggcaaggacagcgtgagcggcatcaccagctacgtgagaaccgtgctgtgcgagggcggcgtgccccagagacccgtggtgttcgtgaccagaaagaagctggtgaacgccatccagcagaagctgagcaagctgaagggcgagcccggctgggtgaccatccacggcatggccggctgcggcaagagcgtgctggccgccgaggccgtgagagaccacagcctgctggagggctgcttccccggcggcgtgcactgggtgagcgtgggcaagcaggacaagagcggcctgctgatgaagctgcagaacctgtgcaccagactggaccaggacgagagcttcagccagagactgcccctgaacatcgaggaggccaaggacagactgagaatcctgatgctgagaaagcaccccagaagcctgctgatcctggacgacgtgtgggacagctgggtgctgaaggccttcgacagccagtgccagatcctgctgaccaccagagacaagagcgtgaccgacagcgtgatgggccccaagtacgtggtgcccgtggagagcagcctgggcaaggagaagggcctggagatcctgagcctgttcgtgaacatgaagaaggccgacctgcccgagcaggcccacagcatcatcaaggagtgcaaggtggtggagagatgccactggggcatcctgaccgacctgctgcacaagtggaaccagagctag

SEQ ID NO: 255870 - protein, 543 aa, Artificial Sequence
  derived and/or modified sequence
MEGPAGYLRRASVAQLTQELGTAFFQQQQLPAAMADTFLEHLCLLDIDSEPVAARSTSIIATIGPASRSVERLKEMIKAGMNIARLNFSHGSHEYHAESIANVREAVESFAGSPLSYRPVAIALDTKGPEIRTGILQGGPESEVELVKGSQVLVTVDPAFRTRGNANTVWVDYPNIVRVVPVGGRIYIDDGLISLVVQKIGPEGLVTQVENGGVLGSRKGVNLPGAQVDLPGLSEQDVRDLRFGVEHGVDIVFASFVRKASDVAAVRAALGPEGHGIKIISKIENHEGVKRFDEILEVSDGIMVARGDLGIEIPAEKVFLAQKMMIGRCNLAGKPVVCATQMLESMITKPRPTRAETSDVANAVLDGADCIMLSGETAKGNFPVEAVKMQHAIAREAEAAVYHRQLFEELRRAAPLSRDPTEVTAIGAVEAAFKCCAAAIIVLTTTGRSAQLLSRYRPRAAVIAVTRSAQAARQVHLCRGVFPLLYREPPEAIWADDVDRRVQFGIESGKLRGFLRVGDLVIVVTGWRPGSGYTNIMRVLSIS

SEQ ID NO: 255871 - DNA, 1632 bp, Artificial Sequence
  derived and/or modified sequence
atggagggccctgctggctaccttagaagagccagcgtggctcagctaacgcaggagctaggtacagctttctttcagcagcagcagctaccagcagctatggctgacacatttctggaacacctgtgcctattggatatcgattctgaacccgttgccgcaaggtcgacaagcattatcgcaacgatcggaccagcatctcgatcagtggagcgccttaaagagatgattaaagccggtatgaatatcgcccgcctgaacttttcgcacggctctcacgagtatcacgctgagagtattgctaacgtccgagaggctgtcgaaagcttcgcggggtctcccctgagctacagaccggtcgcgattgcccttgatacaaagggccctgagatccggacaggtatccttcaaggcggtcccgagtctgaggtggagctcgttaaagggagtcaggtgctagtaaccgtcgatccagccttccgtactagaggtaatgctaacacagtgtgggtcgattatccgaacatcgtgcgagtcgtgcccgtgggaggtagaatttacattgacgatggactgatatccttggtggtccagaagattggccccgaagggttagtcacccaggtcgaaaacgggggggtcctgggatcaaggaaaggcgtgaatttgcccggggcccaggtggatctccctggattatccgagcaagatgttcgtgacttgcgttttggggtggagcacggagttgatattgtgttcgcctcctttgtgagaaaagcctccgatgtggcagccgttcgtgctgcattgggtcccgagggccacggtatcaagattatcagcaaaatagagaatcatgagggagtaaagagatttgacgagatcctcgaggtctcagacggtataatggtggcaagaggcgacctgggcattgaaatccccgctgaaaaagtgttcctggcgcagaagatgatgattggacggtgtaacctcgccggcaaacctgtggtttgcgcgacccagatgctcgagtctatgattacaaagccacgaccaaccagagcagaaacaagtgacgttgccaacgccgtgctggacggcgccgactgtatcatgctttctggtgagacggccaaaggaaactttccagtagaggccgtgaagatgcaacacgccatcgcaagggaagcagaggcagcggtgtatcataggcagctgtttgaggagttaaggcgagctgcaccacttagtagagatcctacggaggttacagccatcggcgccgtcgaagccgcatttaaatgttgcgcagccgctattatcgttctaacgacgactggcaggtctgcccagttgctgtcacggtaccgccctcgggcggcagtgatcgccgttacaagaagtgcacaagccgccaggcaagtgcacctgtgtagaggggtgttcccccttttgtacagagagcctcctgaagcgatctgggcggatgacgtggacaggagggtgcagtttgggatcgagtccggaaagttgagaggctttctgcgcgttggggatctggtcatcgttgtcaccggttggagaccaggctcaggctacaccaatataatgcgcgttctttccataagctag

SEQ ID NO: 255872 - DNA, 1632 bp, Artificial Sequence
  derived and/or modified sequence
atggagggccctgctggctacctgcggcgggcctctgtggcccagctgacccaggagctgggcacagccttcttccagcagcagcagctgcctgctgccatggctgacaccttcctggagcacctgtgcctgctggacattgattctgagcctgtggccgcccggagcaccagcatcatcgccaccatcggccctgccagccgctctgtggagcggctgaaggagatgatcaaggccggcatgaacatcgcccggctgaacttcagccacggcagccatgagtaccacgccgagagcatcgccaacgtgcgggaggccgtggagagctttgctggcagccccctgagctacagacctgtggccatcgccctggacaccaagggccctgagatcagaacaggcatcctgcagggcggccctgagagcgaggtggagctggtgaagggcagccaggtgctggtgacagtggaccctgccttccgcaccagaggaaatgccaacacagtgtgggtggactaccccaacatcgtgcgggtggtgcctgtgggcggccgcatctacattgatgatggcctcatcagcctggtggtgcagaagattggccctgagggcctggtgacccaggtggagaatggaggagtgctgggcagcaggaaaggagtgaacctgcccggggcccaggtggacctgcccggcctgtctgagcaggatgtgcgggacctgcgctttggagtggagcacggcgtggacatcgtgtttgccagctttgtgaggaaggccagtgatgtggccgctgtgcgggccgccctgggccctgagggccacggcatcaagatcatcagcaagattgagaaccacgagggcgtgaagagatttgatgagatcctggaggtgtctgatggcatcatggtggcccggggggacctgggcatcgagatcccagctgagaaggtgttcctggcccagaagatgatgattggccgctgcaacctggccggcaagcctgtggtgtgtgccacccagatgctggagagcatgatcaccaagccccggcccaccagggctgagaccagtgatgtggccaatgctgtgctggatggagctgactgcatcatgctgagcggggagacagccaagggcaacttccctgtggaggccgtgaagatgcagcacgccatcgcccgggaggccgaggccgctgtgtaccaccggcagctgtttgaggagctgcggcgggccgcccccctgagccgggaccccacagaggtgacagccatcggggctgtggaggccgccttcaagtgctgtgccgccgccatcatcgtgctgaccaccaccggccgcagcgcccagctgctgagccgctaccggcccagggctgctgtgattgctgtgaccaggtctgcccaggccgcccggcaggtgcacctgtgccggggcgtcttccccctgctgtaccgggagcccccagaggccatctgggcagatgatgtggaccggcgggtgcagtttggcatcgagagcggcaagctgcggggcttcctgcgggtgggggacctggtgattgtggtgacaggctggaggcctggcagcggctacaccaacatcatgagggtgctgagcatctcctag

SEQ ID NO: 255873 - DNA, 1632 bp, Artificial Sequence
  derived and/or modified sequence
atggagggccccgccggctacctgcggcgggccagcgtggcccagctcacgcaggaacttggaacagctttcttccaacaacagcagcttcccgcagctatggcagacacctttcttgaacacctttgtctcctggacatcgacagcgaaccagtcgcggcccgatctaccagtatcattgccactattggaccagcttcacgcagtgtcgagagattaaaagagatgattaaggctggcatgaacatcgcacggttgaatttctctcacggcagccacgagtatcacgcggaaagtatcgccaatgtgcgagaggccgtggagtcgttcgccgggagtcccctgtcttacagaccggtcgccatcgctctcgacacaaagggacccgagatccgcaccgggatcctgcagggcgggccggagtctgaagtcgagttagtgaaaggatcacaggttctcgtgaccgttgatccagctttccggacacgtggtaatgctaatactgtctgggtcgattatccaaatattgtgcgggtcgttccagtgggtggtcgcatttatatcgatgatggcctgatctcactcgtggttcagaaaatagggcccgagggattagtgacccaggtggagaatgggggtgtgctgggtagtcgtaagggagtgaacctaccaggggcccaggttgacctgccaggcctgtcagagcaagacgtgcgggatctacggtttggggtcgaacatggcgtcgatatcgtctttgcatccttcgtgagaaaagctagtgatgtagccgccgtccgggcggctctcgggccagagggccatggaatcaaaatcattagtaagatcgaaaatcacgaaggcgtgaagagatttgatgagatactcgaagtcagcgatggcatcatggtggccaggggagatctggggatcgagattcctgcagagaaggtgtttctggcccagaagatgatgattggccgttgtaacctagcagggaaacccgtagtatgcgcgacccaaatgctcgagtccatgattactaagccacggccaaccagagccgaaacgtcggatgtggcaaatgcagtgttggacggcgccgactgcattatgttgtcaggagaaaccgctaagggcaatttccctgtggaagcggttaagatgcagcatgctatagctcgagaggctgaggctgccgtgtaccacaggcaactgtttgaagagctgaggcgggcagcccctctgagccgggaccccactgaagttacagcgattggggccgttgaggccgccttcaagtgctgcgcagccgccattattgtcctgaccacaaccggcaggagcgcccagctcctgtcacgctacaggcctagggccgctgtgattgcagtcactcgctccgcgcaggctgcaagacaggtgcacctgtgtagaggggtgttccctctcctgtatcgtgagcccccagaggctatctgggcagacgatgtggatagacgcgtgcagtttgggatagaaagcggtaaattgcgcggtttcctgagagtgggggatctcgttatagttgtgacaggatggcgtcctgggtctggatataccaacatcatgagagtgctatccatctcatag

SEQ ID NO: 255874 - DNA, 1632 bp, Artificial Sequence
  derived and/or modified sequence
atggaaggcccagccggttacctacgcagggcttctgtggcacaactgacccaagaactgggcacagctttttttcagcagcagcaactgcctgccgcaatggcagacaccttcctagagcatctgtgtcttctggacattgacagtgagcccgttgccgctagaagcacatcaattatagccacgattggaccggctagcagatccgtggagcgtctgaaggagatgattaaagctggaatgaatatcgccaggcttaacttttcacacggctcacacgagtaccacgccgagtctatcgccaacgtgagggaggcagtagagtcattcgcaggctcccccctgtcataccgccctgtggctattgccctagacaccaagggcccagagatacggaccggaatcctccagggcggtccagaaagcgaagtggaattggttaagggctcccaggtcctggtgacggttgaccctgctttcaggacaagaggcaacgcaaatacggtgtgggtggattaccccaatatcgtgcgtgtggtcccggtaggcggaagaatctatatagatgatggactgatcagtctggtcgtacagaaaatcggccctgagggcctcgtcacccaggtggagaatggcggtgttctcggaagccgcaagggagtaaatcttcctggagcccaggtggatctgccgggtttatccgagcaggatgtaagggatctgcgctttggggtcgagcacggggtcgatattgtgtttgcgagtttcgttcgcaaggcctccgacgtggctgctgttagagctgccctgggaccggaagggcacgggattaagatcatctcaaaaatcgaaaaccacgagggggtgaagagattcgatgagatcctcgaagtatccgacggcataatggtggcaaggggcgatctaggtatagaaatccctgcagagaaggtgtttctcgcacagaaaatgatgatcggacggtgtaacttagccggtaagcccgttgtttgcgctacccagatgcttgaatcaatgataactaagccacgccctacgagggccgagacaagcgatgtcgcaaatgccgttctcgacggggcagactgtataatgctctcaggagagaccgcaaagggaaattttcccgtggaggctgtgaaaatgcaacatgcgatcgcacgagaagctgaggccgcagtgtaccaccgccaactgttcgaggagcttaggcgggctgctccattgtcccgcgaccccacagaggttacagctattggagctgtggaagccgcatttaagtgctgtgcggctgccataatagtcctcacgactacagggaggagtgcgcagctgttgagccgttacaggccccgtgctgctgtgattgccgtgaccagatccgctcaggcagccagacaagtccatctttgccgcggtgtttttccgcttctgtacagggagcctcctgaagcaatttgggctgacgatgttgaccggagggtacagtttgggatcgagagcggtaagttacgagggtttctgcgcgtcggggacttggtgattgttgttactggctggcgtccaggatcggggtatacgaacatcatgagggtgctgtcaatatcatag

SEQ ID NO: 255875 - DNA, 2479 bp, Artificial Sequence
  derived and/or modified sequence
actttaaccagtctgcagaactgatccccagcccagctgggcctcatgcctctgacaacccaacagtgtggagcagacccacagagagggagacccagagaggtgtgcagtggcatggaagggccagcggggtatctgcggcgggccagtgtggcccaactgacccaggagctgggcactgccttcttccagcagcagcagctgccagctgctatggcagacaccttcctggaacacctctgcctactggacattgactccgagcccgtggctgctcgcagtaccagcatcattgccaccatcgggccagcatctcgctccgtggagcgcctcaaggagatgatcaaggccgggatgaacattgcgcgactcaacttctcccacggctcccacgagtaccatgctgagtccatcgccaacgtccgggaggcggtggagagctttgcaggttccccactcagctaccggcccgtggccatcgccctggacaccaagggaccggagatccgcactgggatcctgcaggggggtccagagtcggaagtggagctggtgaagggctcccaggtgctggtgactgtggaccccgcgttccggacgcgggggaacgcgaacaccgtgtgggtggactaccccaatattgtccgggtcgtgccggtggggggccgcatctacattgacgacgggctcatctccctagtggtccagaaaatcggcccagagggactggtgacccaagtggagaacggcggcgtcctgggcagccggaagggcgtgaacttgccaggggcccaggtggacttgcccgggctgtccgagcaggacgtccgagacctgcgcttcggggtggagcatggggtggacatcgtctttgcctcctttgtgcggaaagccagcgacgtggctgccgtcagggctgctctgggtccggaaggacacggcatcaagatcatcagcaaaattgagaaccacgaaggcgtgaagaggtttgatgaaatcctggaggtgagcgacggcatcatggtggcacggggggacctaggcatcgagatcccagcagagaaggttttcctggctcagaagatgatgattgggcgctgcaacttggcgggcaagcctgttgtctgtgccacacagatgctggagagcatgattaccaagccccggccaacgagggcagagacaagcgatgtcgccaatgctgtgctggatggggctgactgcatcatgctgtcaggggagactgccaagggcaacttccctgtggaagcggtgaagatgcagcatgcgattgcccgggaggcagaggccgcagtgtaccaccggcagctgtttgaggagctacgtcgggcagcgccactaagccgtgatcccactgaggtcaccgccattggtgctgtggaggctgccttcaagtgctgtgctgctgccatcattgtgctgaccacaactggccgctcagcccagcttctgtctcggtaccgacctcgggcagcagtcattgctgtcacccgctctgcccaggctgcccgccaggtccacttatgccgaggagtcttccccttgctttaccgtgaacctccagaagccatctgggcagatgatgtagatcgccgggtgcaatttggcattgaaagtggaaagctccgtggcttcctccgtgttggagacctggtgattgtggtgacaggctggcgacctggctccggctacaccaacatcatgcgggtgctaagcatatcctgagacgcccctccctcctctggcccagcctacccttgtaccccatcccttcctccccagtctacgttctccagcccacacccctccaaagccccacctttaagtcctctcttctctattcctgaccctccctacctgaggcctatctgagactataactgtcatctagccccttcgaggttgccccttccccatctccatttcacacaggtcctgaaagtctgtgtccaattatgcactggccacccaacagcaccaattgtacattccctgcatccaatctgctcagcaggccctaagatgccttgagtctttaatcccagtttggctggttaattccataaccccaggcatcccatcccttggggtgggggagaggggagacagggcaatcttgtccacagtctcccattctcatatgtagccctcatgataatctgggcatctcgtgccagggcaggctaccccttcatggtgactaacagttacatgaaagtccacgcttttgggaaaactgggtgggatggatgctggggagaagtgagggctgggcagctgattttgtcactgtcttcacaacctccgtgctgggcttgtagaccactgtcctggctgctctcatgcctgcctgataccctgcttggtcaaatccccggctgcttccttctgcacccagaaattccttcccactcatgttgttcccacacacaaaccaagagccaaaaatgagtgtgtc

SEQ ID NO: 255876 - DNA, 1632 bp, Artificial Sequence
  derived and/or modified sequence
atggagggccccgccggctacctgagaagagccagcgtggcccagctgacccaggagctgggcaccgccttcttccagcagcagcagctgcccgccgccatggccgacaccttcctggagcacctgtgcctgctggacatcgacagcgagcccgtggccgccagaagcaccagcatcatcgccaccatcggccccgccagcagaagcgtggagagactgaaggagatgatcaaggccggcatgaacatcgccagactgaacttcagccacggcagccacgagtaccacgccgagagcatcgccaacgtgagagaggccgtggagagcttcgccggcagccccctgagctacagacccgtggccatcgccctggacaccaagggccccgagatcagaaccggcatcctgcagggcggccccgagagcgaggtggagctggtgaagggcagccaggtgctggtgaccgtggaccccgccttcagaaccagaggcaacgccaacaccgtgtgggtggactaccccaacatcgtgagagtggtgcccgtgggcggcagaatctacatcgacgacggcctgatcagcctggtggtgcagaagatcggccccgagggcctggtgacccaggtggagaacggcggcgtgctgggcagcagaaagggcgtgaacctgcccggcgcccaggtggacctgcccggcctgagcgagcaggacgtgagagacctgagattcggcgtggagcacggcgtggacatcgtgttcgccagcttcgtgagaaaggccagcgacgtggccgccgtgagagccgccctgggccccgagggccacggcatcaagatcatcagcaagatcgagaaccacgagggcgtgaagagattcgacgagatcctggaggtgagcgacggcatcatggtggccagaggcgacctgggcatcgagatccccgccgagaaggtgttcctggcccagaagatgatgatcggcagatgcaacctggccggcaagcccgtggtgtgcgccacccagatgctggagagcatgatcaccaagcccagacccaccagagccgagaccagcgacgtggccaacgccgtgctggacggcgccgactgcatcatgctgagcggcgagaccgccaagggcaacttccccgtggaggccgtgaagatgcagcacgccatcgccagagaggccgaggccgccgtgtaccacagacagctgttcgaggagctgagaagagccgcccccctgagcagagaccccaccgaggtgaccgccatcggcgccgtggaggccgccttcaagtgctgcgccgccgccatcatcgtgctgaccaccaccggcagaagcgcccagctgctgagcagatacagacccagagccgccgtgatcgccgtgaccagaagcgcccaggccgccagacaggtgcacctgtgcagaggcgtgttccccctgctgtacagagagccccccgaggccatctgggccgacgacgtggacagaagagtgcagttcggcatcgagagcggcaagctgagaggcttcctgagagtgggcgacctggtgatcgtggtgaccggctggagacccggcagcggctacaccaacatcatgagagtgctgagcatcagctag

SEQ ID NO: 255877 - protein, 922 aa, Artificial Sequence
  derived and/or modified sequence
MVQLRKLLRVLTLMKFPCCVLEVLLCALAAAARGQEMYAPHSIRIEGDVTLGGLFPVHAKGPSGVPCGDIKRENGIHRLEAMLYALDQINSDPNLLPNVTLGARILDTCSRDTYALEQSLTFVQALIQKDTSDVRCTNGEPPVFVKPEKVVGVIGASGSSVSIMVANILRLFQIPQISYASTAPELSDDRRYDFFSRVVPPDSFQAQAMVDIVKALGWNYVSTLASEGSYGEKGVESFTQISKEAGGLCIAQSVRIPQERKDRTIDFDRIIKQLLDTPNSRAVVIFANDEDIKQILAAAKRADQVGHFLWVGSDSWGSKINPLHQHEDIAEGAITIQPKRATVEGFDAYFTSRTLENNRRNVWFAEYWEENFNCKLTISGSKKEDTDRKCTGQERIGKDSNYEQEGKVQFVIDAVYAMAHALHHMNKDLCADYRGVCPEMEQAGGKKLLKYIRNVNFNGSAGTPVMFNKNGDAPGRYDIFQYQTTNTSNPGYRLIGQWTDELQLNIEDMQWGKGVREIPASVCTLPCKPGQRKKTQKGTPCCWTCEPCDGYQYQFDEMTCQHCPYDQRPNENRTGCQDIPIIKLEWHSPWAVIPVFLAMLGIIATIFVMATFIRYNDTPIVRASGRELSYVLLTGIFLCYIITFLMIAKPDVAVCSFRRVFLGLGMCISYAALLTKTNRIYRIFEQGKKSVTAPRLISPTSQLAITSSLISVQLLGVFIWFGVDPPNIIIDYDEHKTMNPEQARGVLKCDITDLQIICSLGYSILLMVTCTVYAIKTRGVPENFNEAKPIGFTMYTTCIVWLAFIPIFFGTAQSAEKLYIQTTTLTISMNLSASVALGMLYMPKVYIIIFHPELNVQKRKRSFKAVVTAATMSSRLSHKPSDRPNGEAKTELCENVDPNNCIPPVRKSVQKSVTWYTIPPTV

SEQ ID NO: 255878 - DNA, 2769 bp, Artificial Sequence
  derived and/or modified sequence
atggtccagctgcgaaagttactgagggtcctgaccctgatgaaatttccttgctgcgttttggaagtgctgttgtgtgctctagccgccgccgcaagaggccaagaaatgtacgctcctcactccatcagaatcgagggagatgtgacactcggcggactgtttccagtccatgcaaagggcccttcgggggttccttgtggtgacattaaacgtgagaacgggattcaccgtctggaggctatgctgtacgctctcgaccagataaactccgaccctaatctgttacccaatgtcacactcggcgcccgaattctggacacatgcagcagggatacctatgcattggaacagtcactgacctttgtccaggccctgattcagaaggacacgagcgatgtgcggtgtacaaatggtgaacctccggttttcgtcaagccagagaaagtcgtgggagtgatcggcgcctcgggttctagtgtgagcatcatggtcgcaaatattctgagactgtttcaaatcccgcaaatttcgtacgccagtactgcccccgagctcagcgacgatagacgttacgattttttttcaagagtggttccaccggattcctttcaggctcaagccatggtcgatatcgttaaagccctgggctggaactacgttagtacccttgcttcggagggcagctacggcgagaaaggggtggagagctttacacaaatttcaaaggaggcagggggactctgcattgctcagagtgtccggattccgcaggagcgcaaggaccgaacaatcgatttcgatagaatcattaagcagctcttggatacccccaactcgcgggccgtagtcatcttcgctaacgacgaggacataaaacagattctcgcagctgccaaacgagcagatcaggtgggacacttcctgtgggtgggctccgactcatgggggtcaaagattaaccccttgcaccaacacgaggacatcgcggagggcgctatcacaattcagccaaaacgggcaacagttgagggctttgatgcatattttacctcaagaacattagagaacaatagacggaatgtgtggtttgctgagtactgggaagaaaactttaattgtaaactcacaatctcaggcagcaagaaggaagacaccgataggaaatgcaccgggcaagaaagaataggcaaggatagcaactacgagcaggaggggaaggtacagttcgtgatcgatgctgtctacgccatggcccatgcccttcatcatatgaataaagatctgtgtgcagactatcgcggggtctgcccggagatggaacaggccggcgggaagaagcttttaaaatacatccgtaatgtgaatttcaacggatcggccgggacccctgtgatgttcaacaagaatggcgacgctccggggaggtacgacatatttcaatatcagaccactaatacttcaaaccctggctaccgtctcatcgggcagtggactgacgaactgcagttaaatattgaagacatgcagtgggggaaaggggtacgcgaaattccagcctccgtgtgcacactaccatgtaaacccggacagaggaaaaagacccaaaagggaacaccatgttgctggacctgtgagccttgtgacgggtaccagtaccagttcgatgaaatgacgtgtcaacactgcccatacgatcagcgccctaatgagaatcgcacaggctgtcaggatattccgattatcaagctggaatggcatagcccgtgggccgtgatccccgtcttcctggctatgctaggaattatcgcaaccatcttcgtcatggcaactttcattcgatacaatgacacacccatcgtgagagcctcaggtcgtgaattatcatatgtgcttctgaccggtatctttctttgttacattatcacttttctgatgatcgcgaagcctgatgtggccgtatgctcttttcgccgggtctttttgggcctgggcatgtgtatttcatatgcagccctgcttaccaaaaccaaccgcatttacaggattttcgagcaaggtaagaaatccgtcacggctcccagattgattagtccgacaagccagctggccatcacatcctcccttatctccgtacaattgctgggcgtgtttatatggtttggggtggatccccctaacatcatcattgattacgacgagcataagactatgaatcccgagcaagcaaggggtgtgctgaagtgcgatatcacagacctccagattatctgctcccttgggtattccatactcctcatggttacatgtaccgtttacgctataaagaccaggggtgttccagagaatttcaatgaagcgaaaccaattggattcaccatgtacaccacttgtatcgtttggctggctttcatccccatctttttcggtactgcccagagtgccgagaaattgtatatccaaacaactactctgaccataagtatgaatctttctgcttccgttgccttaggtatgctctacatgccaaaagtctacatcattatctttcatccagaattgaacgtgcaaaagcgtaaacgctcctttaaggcagtggttaccgccgcgacgatgagctctcgcctcagccacaagccttcggacagacccaacggcgaggcgaagaccgagctctgtgagaatgtagatcccaataactgcattcctcccgtgaggaagtcagtgcaaaaatcagtcacctggtatactattcctccaactgtttag

SEQ ID NO: 255879 - DNA, 2769 bp, Artificial Sequence
  derived and/or modified sequence
atggtccagttgcgcaaattgctgcgcgtgctgaccctgatgaagtttccatgctgcgttctggaagtattactctgcgccctggcagccgcagcccgaggccaggaaatgtacgcccctcactcaatcagaatcgaaggagacgtcaccctagggggcctctttcctgtgcacgccaaaggaccatccggcgtgccctgtggggatatcaagcgggagaatggaatacatcggctggaggctatgctctacgccctggaccagattaatagcgatcccaacctgctgcccaatgtgacactaggcgctcgtatcctggatacctgcagtcgtgacacctacgctttggagcagtcgctgacctttgttcaggcactcattcagaaggacacctctgatgtgaggtgcactaacggagagccaccggtgtttgtgaagcccgaaaaggtcgtgggggtgataggcgcatccggatcttccgtctccatcatggttgcaaatattctaagactctttcaaatcccacagataagctacgcctctacggccccggaattgtcagatgatcgcagatatgattttttctccagagtcgtgcctcccgattcatttcaggcccaagccatggttgatattgtgaaggctctggggtggaattacgtatctacactcgcatccgaaggcagctatggagagaaaggagtggagtcctttacacagattagcaaagaggccggtggactttgtatcgcccagagtgtccgaatccctcaggaacggaaggaccgcactatcgacttcgaccgtataatcaaacagctgctggatactccaaactctagagcagtggtcattttcgccaacgacgaagacatcaagcaaattttggctgcggccaaacgagcggatcaggtggggcactttttatgggtcgggagcgattcttggggctccaagatcaaccctttacatcagcatgaggatatcgcagagggagcgattaccatacagccaaagcgcgccaccgtcgagggattcgacgcatacttcacctctcgaacactcgagaacaacaggcgcaacgtgtggttcgccgaatactgggaggaaaattttaattgtaagttaaccatttctggatcaaagaaggaggacaccgatagaaagtgtacgggacaagagagaatcggcaaggatagtaattacgaacaggaaggcaaggtgcaatttgtgatcgatgctgtgtatgccatggcacatgcacttcaccatatgaacaaggacttatgcgccgattaccgcggcgtgtgtcctgagatggagcaggccggagggaaaaaactcttaaagtatattagaaacgtcaattttaacggtagtgccggcaccccggtgatgttcaataagaatggagacgcacccgggaggtacgacattttccagtatcagactactaatacctccaaccccggctaccggctgataggacagtggaccgacgaactgcagctaaacattgaggatatgcagtgggggaaaggggtaagggaaattccagccagcgtgtgcaccctgccctgtaagcccggtcagagaaagaagacccagaaagggacaccttgttgctggacctgtgagccatgcgacgggtatcagtaccagtttgatgaaatgacctgtcagcactgcccgtacgaccagcgccctaatgaaaaccgcacgggatgccaggatatccctatcatcaaactggaatggcactctccctgggccgtaatccccgtctttctcgctatgctcggcattattgccactattttcgttatggctaccttcattagatataacgacaccccaatcgtaagagctagcggccgcgagctatcatacgtgctcttgactgggatcttcctttgttacatcattactttcctgatgatcgccaagccagatgtagcagtctgctcttttaggagggtgttcctgggcctgggtatgtgtatatcctacgcagccctgttgactaagaccaacaggatctacagaatctttgaacaggggaaaaaatcagtgaccgctcctagactcatctccccaactagccaattggctatcacctccagtttgatcagtgtccagctgctaggagtttttatttggtttggggttgatccacctaatattatcatcgattacgacgaacacaagacaatgaatcccgagcaggctcggggagtgctgaagtgcgacattaccgatctgcagatcatctgcagcctggggtattccatcctactgatggtgacttgtaccgtatacgcgattaagacccggggtgttcctgagaactttaatgaagcaaagccgattggatttaccatgtataccacatgcatcgtgtggctggctttcattcccatattttttgggacagcccagagtgcggagaagctatatatccagaccactacgttgacaattagtatgaatctgtcggcctccgtggccctgggcatgctgtacatgccaaaggtctacatcattatatttcatccggagctgaacgttcagaaaagaaaaagatccttcaaggcagtagtcacagccgcgacaatgagctccaggctgagccataagccttcagaccgccccaatggcgaagccaagactgaattgtgtgaaaacgtggatcctaacaactgcataccgcctgttcgcaagtcggtgcaaaaaagtgtgacatggtataccattcccccaacagtgtag

SEQ ID NO: 255880 - DNA, 2736 bp, Artificial Sequence
  derived and/or modified sequence
atggtacagctccgcaaactcctccgcgtgctgacactgatgaaatttccgtgttgcgtgttagaggtgctgctgtgcgcactggcagccgctgcccggggacaagagatgtatgccccgcattctatccgcatagagggggatgtgacacttggcgggttgttcccagtccacgcaaagggcccctccggcgtgccatgcggggacattaaaagggaaaacggtatacaccggctggaggcaatgctctatgcgctggatcagataaatagcgatcctaacctgctgccaaatgttactctcggcgctcgcattctcgatacatgttcacgtgacacttatgctctggagcaaagcttaactttcgttcaagccctgattcagaaggatacctcagacgtgaggtgcactaatggagaaccccctgtgttcgtgaaaccagagaaagttgtgggcgtaatcggtgcctccggatcgagcgtgtccattatggtggccaatatcctccggctatttcaaatccctcaaattagttatgccagcactgctccagagttgagtgatgaccgacggtatgacttcttcagcagagtagttcccccagattcatttcaggcacaagctatggtggatattgttaaggcccttggctggaactacgtctccaccctggcatccgagggatcctacggtgagaagggagtggagagctttacccagatcagcaaggaagcaggcgggctctgcatcgcgcagtccgttcggataccgcaagagcgtaaggaccgcacaatcgattttgacaggattatcaaacaactgctggatactcccaattcacgcgctgtggtaatctttgcaaatgacgaagatatcaaacagatacttgccgctgcgaagagagcagaccaggtcggacactttctgtgggttgggtccgatagctggggctccaagatcaatccacttcaccagcacgaggatatcgcagagggcgccattaccatacagccaaaaagagctaccgttgaggggttcgatgcctacttcacaagtcggacgctggagaataatcgtcgtaatgtgtggtttgctgagtactgggaggaaaacttcaactgtaaactgactattagcggctcaaaaaaggaagacactgataggaagtgtacggggcaggagcgtatcggcaaggactcaaattacgaacaggaaggcaaggtccagttcgttattgacgccgtttacgctatggctcacgcactgcaccatatgaataaagacttgtgtgcggattatcgaggtgtgtgcccagaaatggagcaggccggagggaagaaacttctgaagtatatccgcaatgtgaatttcaatggctccgccggcactcccgtgatgttcaataaaaacggggacgccccggggaggtatgacatctttcagtaccagaccacgaatacctctaatcccggttatcgcctcattggccaatggaccgacgagctccaactaaacatcgaggacatgcagtggggcaaaggcgtacgtgagattcccgcttcagtgtgtaccttgccttgtaaaccagggcaaagaaagaagactcagaaaggcaccccttgctgttggacttgcgagccgtgcgacggttaccagtatcaattcgatgaaatgacctgccagcactgtccttatgaccaacgccctaacgagaatagaacgggttgccaggacatcccgattataaagctagaatggcactcaccatgggcggtgatcccagtttttcttgctatgctgggaataatcgcgactattttcgtgatggccacgtttatccgatataatgatactccaatagtacgcgcctccggaagagagctgtcctatgtgctcttgactggcatctttctctgttatataatcacatttttgatgattgcaaagccagatgtggcggtgtgctctttcagacgggttttcctgggattgggaatgtgcattagttacgccgccctgctgacaaaaactaaccggatttatagaatttttgagcagggcaagaagtctgttactgctccaaggttgattagtcctacatcccaactagccatcacctcgagtctgatctccgtccaactcctgggggtttttatctggttcggtgtggatccacctaatataattattgactatgacgagcacaagacgatgaaccccgaacaggccagaggggtcctcaagtgtgacatcacggatctgcaaataatctgcagtctgggctacagcatcctgttgatggttacatgcaccgtatatgcgatcaaaacgcggggagtgccggagaacttcaatgaggctaagccgatcggtttcacgatgtacacaacctgtattgtctggctcgcctttatccctatcttcttcgggaccgcccagtccgccgaaaaactttacatccagactaccaccctcacaattagcatgaatctatctgcctctgttgcgctcggaatgctgtacatgcccaaggtatacatcatcatcttccatccggaacttaacgtccagaagagaaagcgctcctttaaggcagttgtgacagccgccaccatgtctagcagactgagtcacaagccatccgaccgcccaaacggagaggcaaaaacagagctgtgcgaaaacgtggaccctaacatcacctccgaagacctctccctgcataaggaggactag

SEQ ID NO: 255881 - DNA, 2475 bp, Artificial Sequence
  derived and/or modified sequence
atggtgcaactcaggaagttgctgcgcgtcttaactctcatgaagttcccatgctgcgtgctcgaggttctgctctgcgctctggcagcggcggcgcggggacaggagatgtacgctccccactctataaggatagagggcgacgtgacacttggtgggttgtttccagtacacgccaagggaccaagcggggttccttgtggcgatattaaacgcgagaacggaattcaccgactggaggcgatgctgtatgctttagaccagataaactcagatcccaacttgctaccaaatgtgacgcttggcgcgagaattctagacacatgttcaagggacacctacgctttggaacagtctttgacgtttgtgcaggccttaatacaaaaggacacctcggacgttaggtgcacaaacggagaacctcctgtgttcgtgaaacccgaaaaggtcgtgggtgtgatcggcgcctctggatcctccgtatccataatggtcgccaacatcctcagactcttccagatacctcaaatctcctatgccagtactgcgcccgaattgagtgacgacaggagatatgactttttctcacgggtggtcccccctgactcctttcaggctcaggccatggtggatatcgtgaaggcactaggctggaattatgtctcaaccctggcttctgagggctcttacggagagaagggggtggagtccttcacccagatctctaaggaggccggaggactttgcatagcccagagcgtgcgtatcccccaggagcgcaaggatcgcacaattgatttcgatcgcattataaagcagttgcttgacacgcccaacagcagggcagttgttattttcgcaaatgacgaggatattaaacagatactggctgccgcgaaacgcgctgatcaggtcgggcattttctatgggtcggaagcgattcttgggggagcaaaatcaatcccctgcatcagcacgaagacatcgccgagggtgctataaccattcagccgaaacgagccaccgtagaaggcttcgacgcatactttacatctcggaccctggaaaacaatagacgcaatgtttggttcgccgaatattgggaggagaatttcaattgtaagttaactatttcaggctccaaaaaagaagatacggaccggaaatgtacgggccaggagaggattggcaaagactcgaattatgagcaggaaggtaaagtgcaatttgtcattgatgcagtttatgccatggcacacgctctgcaccacatgaacaaagacctgtgcgccgactatcgcggcgtgtgccccgagatggagcaagcgggcggcaagaagcttctgaagtatatcagaaatgtgaacttcaatggcgatgcgggcaccccagtaatgttcaacaagaacggtgatgctcccgggagatatgatatttttcagtatcagaccacaaatacctccaacccaggttataggcttattggtcaatggactgacgagctccagctaaacattgaggacatgcagtggggtaaaggggtccgagagattcctgccagtgtctgtacactcccatgtaagcctggccaaagaaagaaaactcagaagggcacgccatgctgttggacctgcgaaccctgcgacgggtatcagtaccaattcgacgaaatgacatgccagcattgtccgtacgatcagaggcccaacgagaaccgcaccggctgccaagatattccaattatcaagctcgaatggcatagcccctgggccgttatcccagtgtttctcgctatgctcgggataattgccaccatcttcgtaatggctacatttatcagatacaacgatacacctatcgtacgggcatcaggcagggaactttcatatgtgctcctgacaggaatcttcctctgttacattattaccttcctgatgattgccaaacccgacgtggctgtgtgctccttcagaagggtgttcctcgggctgggtatgtgcattagttacgccgcgctcctcaccaagaccaataggatttataggatcttcgagcagggaaagaaaagtgtgacagccccccggctgatctctcccacatctcagctggccatcacatcctccctaattagtgtacaactactaggggtgttcatctggttcggggtcgatccccccaacatcatcattgattatgatgagcacaaaacaatgaatccggaacaagccaggggggttctgaagtgcgacataaccgaccttcagataatctgctcactgggatatagcatcttacttatggtaacttgcacagtgtacgcaatcaagaccaggggggtacccgagaatttcaacgaagctaaacccatcggattcaccatgtacacaacttgtatcgtctggttggcctttatccctatcttctttggaaccgcccagagcgcagaaaaggttatactgtgttgtatttcctag

SEQ ID NO: 255882 - DNA, 2775 bp, Artificial Sequence
  derived and/or modified sequence
atggtacagctgaggaagctgctcagggtgctaactttgatgaagtttccctgttgtgtccttgaggtgctgctctgcgccttagccgcagcggcccgaggccaggaaatgtacgcaccccatagtatccgcatcgagggcgatgtgactctcggaggcctctttccggtacacgccaagggccctagcggggtaccctgcggggacataaagcgggaaaacggcatccaccgattggaggccatgttgtatgcgttggaccaaatcaatagtgatccgaatctgttacctaacgttacgctgggcgcccgaatcctggacacctgtagtagggacacatatgccctcgaacagtctctgaccttcgtccaggccctgatccagaaagacacctctgatgttcgatgcactaatggggaacctcccgtgttcgttaagcctgaaaaggtcgtcggcgtgataggcgcctctggctctagtgtctccattatggtcgccaatatcctccggctcttccagattccccagatcagttatgcatcaaccgcacccgagttaagcgacgatagacgctacgactttttctccagagtggtcccgccagactcgtttcaagcccaagcaatggtcgacatagtcaaagcactcggctggaactacgtgtccactctcgcttcggaggggtcctacggtgagaaaggcgttgagagcttcacccagatatccaaagaagctggaggactgtgcatcgcccagagcgtacggattccacaggaacggaaggatcgcactattgatttcgatcgcatcataaagcagctactggatacaccaaattcccgagctgttgtcattttcgccaacgatgaagatatcaaacagattctggcagctgcaaagcgtgctgatcaagttgggcactttctgtgggtgggtagtgactcctgggggagcaaaatcaatcctttgcatcagcacgaagacattgctgagggcgccatcaccatccagcccaagagggctaccgtggagggttttgacgcctattttacatctcgcactttggaaaataaccggagaaatgtctggttcgccgaatattgggaggagaattttaattgcaagttaacaatctccgggagtaaaaaggaagacaccgaccggaagtgcacggggcaagaacggattggcaaggattctaattatgagcaggaagggaaggtacagttcgtcatcgacgccgtatacgctatggcacacgctctccaccacatgaataaggacctctgtgctgattacaggggggtgtgtcccgaaatggagcaggcaggcggaaagaagctgttgaagtacatacgaaatgtcaatttcaacggcagcgcaggcacccctgttatgttcaacaagaacggcgacgcccccggtaggtatgacattttccagtatcagacaaccaacactagcaatcccggctaccgcttgatcgggcagtggactgatgagttgcaactaaacatcgaagatatgcagtggggtaagggcgtacgtgagatccccgctagcgtgtgcacactgccatgcaagcccggccagcggaaaaaaactcaaaaaggcacaccctgttgttggacctgtgaaccgtgtgatggataccaatatcagtttgatgaaatgacctgtcagcactgcccatatgatcagcggccaaacgagaaccggacaggctgtcaggacatcccaattattaagctcgagtggcacagcccctgggccgtgatacctgtattcctcgccatgttaggaatcatcgccaccatcttcgtgatggcaacattcatcagatacaatgatactcccattgtgcgcgcatccgggcgggagttatcttatgtactgctcacaggtatcttcctatgctacatcattacttttctcatgatcgctaaaccggacgtggccgtttgcagctttaggagagtgtttctgggcctagggatgtgtatttcttacgccgcgcttctgacaaagaccaaccgaatttatcggatcttcgagcagggaaagaagagcgttactgctccacgtctaattagcccgacctcccaactggctattaccagctcacttatttccgtgcagttactcggggtgttcatttggtttggcgtggacccacccaacattattatagactacgacgaacataagaccatgaaccccgagcaggctagaggggtgctcaagtgcgatattacagacctgcagattatatgttcactgggttattcaatcctccttatggtcacctgtacagtgtatgctatcaagacccgcggcgtgcctgagaatttcaacgaagcaaagcctattggctttacaatgtatacaacttgcatcgtgtggcttgcttttatcccgatcttcttcggaaccgcccagtccgcagaaaaattgtacatacagactacaacactgacgatttctatgaacctcagcgcatccgtggctctggggatgctctatatgccgaaagtctatattatcatatttcacccagaactgaacgtgcagaaacgaaagaggtcctttaaagcggttgtgaccgcagccaccatgagtagccggctgagccataaaccatcggataggcccaatggcgaagcaaagaccgaactctgcgagaatgtggatccaaatatctttttctttggatgtaccgtcgagttgggcctccacttcaagctcacattctccaggaaccagtccaatttatag

SEQ ID NO: 255883 - DNA, 4236 bp, Artificial Sequence
  derived and/or modified sequence
agtgctgggctgttggagagagcgagcagcaagccggtgagcgcgagcgcggcgcgccggccggctaacccgagagcgcgaggcgccccaggctggcaggcgccgcgggacccctcaccctctctggtcgcccctccccggattcccccaccctccgtgcctgcaggagcccctgggctttcccggaggagctcgccctgaagggcccggacctcggcgagcccaccaccgttccctccagcgccgccgccgccaccgcagcagccggagcagcatggtccagctgaggaagctgctccgcgtcctgactttgatgaagttcccctgctgcgtgctggaggtgctcctgtgcgcgctggcggcggcggcgcgcggccaggagatgtacgccccgcactcaatccggatcgagggggacgtcaccctcggggggctgttccccgtgcacgccaagggtcccagcggagtgccctgcggcgacatcaagagggaaaacgggatccacaggctggaagcgatgctctacgccctggaccagatcaacagtgatcccaacctactgcccaacgtgacgctgggcgcgcggatcctggacacttgttccagggacacttacgcgctcgaacagtcgcttactttcgtccaggcgctcatccagaaggacacctccgacgtgcgctgcaccaacggcgaaccgccggttttcgtcaagccggagaaagtagttggagtgattggggcttcggggagttcggtctccatcatggtagccaacatcctgaggctcttccagatcccccagattagttatgcatcaacggcacccgagctaagtgatgaccggcgctatgacttcttctctcgcgtggtgccacccgattccttccaagcccaggccatggtagacattgtaaaggccctaggctggaattatgtgtctaccctcgcatcggaaggaagttatggagagaaaggtgtggagtccttcacgcagatttccaaagaggcaggtggactctgcattgcccagtccgtgagaatcccccaggaacgcaaagacaggaccattgactttgatagaattatcaaacagctcctggacacccccaactccagggccgtcgtgatttttgccaacgatgaggatataaagcagatccttgcagcagccaaaagagctgaccaagttggccattttctttgggtgggatcagacagctggggatccaaaataaacccactgcaccagcatgaagatatcgcagaaggggccatcaccattcagcccaagcgagccacggtggaagggtttgatgcctactttacgtcccgtacacttgaaaacaacagaagaaatgtatggtttgccgaatactgggaggaaaacttcaactgcaagttgacgattagtgggtcaaaaaaagaagacacagatcgcaaatgcacaggacaggagagaattggaaaagattccaactatgagcaggagggtaaagtccagttcgtgattgacgcagtctatgctatggctcacgcccttcaccacatgaacaaggatctctgtgctgactaccggggtgtctgcccagagatggagcaagctggaggcaagaagttgctgaagtatatacgcaatgttaatttcaatggtagtgctggcactccagtgatgtttaacaagaacggggatgcacctgggcgttatgacatctttcagtaccagaccacaaacaccagcaacccgggttaccgtctgatcgggcagtggacagacgaacttcagctcaatatagaagacatgcagtggggtaaaggagtccgagagatacccgcctcagtgtgcacactaccatgtaagccaggacagagaaagaagacacagaaaggaactccttgctgttggacctgtgagccttgcgatggttaccagtaccagtttgatgagatgacatgccagcattgcccctatgaccagaggcccaatgaaaatcgaaccggatgccaggatattcccatcatcaaactggagtggcactccccctgggctgtgattcctgtcttcctggcaatgttggggatcattgccaccatctttgtcatggccactttcatccgctacaatgacacgcccattgtccgggcatctgggcgggaactcagctatgttcttttgacgggcatctttctttgctacatcatcactttcctgatgattgccaaaccagatgtggcagtgtgttctttccggcgagttttcttgggcttgggtatgtgcatcagttatgcagccctcttgacgaaaacaaatcggatttatcgcatatttgagcagggcaagaaatcagtaacagctcccagactcataagcccaacatcacaactggcaatcacttccagtttaatatcagttcagcttctaggggtgttcatttggtttggtgttgatccacccaacatcatcatagactatgatgaacacaagacaatgaaccctgagcaagccagaggggttctcaagtgtgacattacagatctccaaatcatttgctccttgggatatagcattcttctcatggtcacatgtactgtgtatgccatcaagactcggggtgtacccgagaattttaacgaagccaagcccattggattcactatgtacacgacatgtatagtatggcttgccttcattccaattttttttggcaccgctcaatcagcggaaaagctctacatacaaactaccacgcttacaatctccatgaacctaagtgcatcagtggcgctggggatgctatacatgccgaaagtgtacatcatcattttccaccctgaactcaatgtccagaaacggaagcgaagcttcaaggcggtagtcacagcagccaccatgtcatcgaggctgtcacacaaacccagtgacagacccaacggtgaggcaaagaccgagctctgtgaaaacgtagacccaaacaactgtataccaccagtaagaaagagtgtacaaaagtctgttacttggtacactatcccaccaacagtatagcttttgactgctttcccaaaggccctgctgcaaaaaagaagtatgtcagttataataacctggttatctaacctgttccattccatggaaccatggaggaggaagaccctcagttattttgtcacccaacctggcataggactctttggtcctacccgcttcccatcaccggaggagcttccccggccgggagaccagtgttagaggatccaagcgacctaaacagctgctttatgaaatatccttactttatctgggcttaataagtcactgacatcagcactgccaactcggctgcaattgtggaccttccctaccaaagggagtgttgaaactcaagtcccgccctggctctttagaatggaccactgagagccacaggaccgttttggggctgacctgtcttattacgtatgtacttctaggttgcaaggttttgaaattttctgtacagtttgtgaggacctttgcactttgccatctgatgtcgtacctcggttcactgtttgttttcgaatgccttgttttcatagagccctattctctcagacggtggaatatttggaaaaattttaaaacaattaaaattttaaagcaatcttggcagactaaaacaagtacatctgtacatgactgtataattacgattatagtaccactgcacatcatgtttttttttttaagacaaaaaagatgtttaaagaccaaaaactgtgctgagaaagtatgccccacctatctttggtatatgataggttacataaaaggaaggtattggctgaactgaatagaggtcttgatctttggaatgcatgccagtaatgtattttacagtacatgtttattatgttcaatatttgtatttgtgttctcttttgttatttttaattagggtatatgaatattttgcaataattttaataattattaagctgtttgaaggaaagaatatggatttttcatgtcttgaggttttgttcatgccccctttgactgatcagtgtgataaggactttaggaaaaaaagcatgtatgttttttactgtttgtaataagtactttcgttaatcttgctgcttatgtgccaatttagtggaaaaaaacaacccttgctgaaaaattccctctttccattctctttcaattctgtgatattgtccaagaatgtatcaataaaatactttggttaactt

SEQ ID NO: 255884 - DNA, 2769 bp, Artificial Sequence
  derived and/or modified sequence
atggtccagctgaggaagctgctccgcgtcctgactttgatgaagttcccctgctgcgtgctggaggtgctcctgtgcgcgctggcggcggcggcgcgcggccaggagatgtacgccccgcactcaatccggatcgagggggacgtcaccctcggggggctgttccccgtgcacgccaagggtcccagcggagtgccctgcggcgacatcaagagggaaaacgggatccacaggctggaagcgatgctctacgccctggaccagatcaacagtgatcccaacctactgcccaacgtgacgctgggcgcgcggatcctggacacttgttccagggacacttacgcgctcgaacagtcgcttactttcgtccaggcgctcatccagaaggacacctccgacgtgcgctgcaccaacggcgaaccgccggttttcgtcaagccggagaaagtagttggagtgattggggcttcggggagttcggtctccatcatggtagccaacatcctgaggctcttccagatcccccagattagttatgcatcaacggcacccgagctaagtgatgaccggcgctatgacttcttctctcgcgtggtgccacccgattccttccaagcccaggccatggtagacattgtaaaggccctaggctggaattatgtgtctaccctcgcatcggaaggaagttatggagagaaaggtgtggagtccttcacgcagatttccaaagaggcaggtggactctgcattgcccagtccgtgagaatcccccaggaacgcaaagacaggaccattgactttgatagaattatcaaacagctcctggacacccccaactccagggccgtcgtgatttttgccaacgatgaggatataaagcagatccttgcagcagccaaaagagctgaccaagttggccattttctttgggtgggatcagacagctggggatccaaaataaacccactgcaccagcatgaagatatcgcagaaggggccatcaccattcagcccaagcgagccacggtggaagggtttgatgcctactttacgtcccgtacacttgaaaacaacagaagaaatgtatggtttgccgaatactgggaggaaaacttcaactgcaagttgacgattagtgggtcaaaaaaagaagacacagatcgcaaatgcacaggacaggagagaattggaaaagattccaactatgagcaggagggtaaagtccagttcgtgattgacgcagtctatgctatggctcacgcccttcaccacatgaacaaggatctctgtgctgactaccggggtgtctgcccagagatggagcaagctggaggcaagaagttgctgaagtatatacgcaatgttaatttcaatggtagtgctggcactccagtgatgtttaacaagaacggggatgcacctgggcgttatgacatctttcagtaccagaccacaaacaccagcaacccgggttaccgtctgatcgggcagtggacagacgaacttcagctcaatatagaagacatgcagtggggtaaaggagtccgagagatacccgcctcagtgtgcacactaccatgtaagccaggacagagaaagaagacacagaaaggaactccttgctgttggacctgtgagccttgcgatggttaccagtaccagtttgatgagatgacatgccagcattgcccctatgaccagaggcccaatgaaaatcgaaccggatgccaggatattcccatcatcaaactggagtggcactccccctgggctgtgattcctgtcttcctggcaatgttggggatcattgccaccatctttgtcatggccactttcatccgctacaatgacacgcccattgtccgggcatctgggcgggaactcagctatgttcttttgacgggcatctttctttgctacatcatcactttcctgatgattgccaaaccagatgtggcagtgtgttctttccggcgagttttcttgggcttgggtatgtgcatcagttatgcagccctcttgacgaaaacaaatcggatttatcgcatatttgagcagggcaagaaatcagtaacagctcccagactcataagcccaacatcacaactggcaatcacttccagtttaatatcagttcagcttctaggggtgttcatttggtttggtgttgatccacccaacatcatcatagactatgatgaacacaagacaatgaaccctgagcaagccagaggggttctcaagtgtgacattacagatctccaaatcatttgctccttgggatatagcattcttctcatggtcacatgtactgtgtatgccatcaagactcggggtgtacccgagaattttaacgaagccaagcccattggattcactatgtacacgacatgtatagtatggcttgccttcattccaattttttttggcaccgctcaatcagcggaaaagctctacatacaaactaccacgcttacaatctccatgaacctaagtgcatcagtggcgctggggatgctatacatgccgaaagtgtacatcatcattttccaccctgaactcaatgtccagaaacggaagcgaagcttcaaggcggtagtcacagcagccaccatgtcatcgaggctgtcacacaaacccagtgacagacccaacggtgaggcaaagaccgagctctgtgaaaacgtagacccaaacaactgtataccaccagtaagaaagagtgtacaaaagtctgttacttggtacactatcccaccaacagtatag

SEQ ID NO: 255885 - DNA, 2736 bp, Artificial Sequence
  derived and/or modified sequence
atggtccagctgaggaagctgctccgcgtcctgactttgatgaagttcccctgctgcgtgctggaggtgctcctgtgcgcgctggcggcggcggcgcgcggccaggagatgtacgccccgcactcaatccggatcgagggggacgtcaccctcggggggctgttccccgtgcacgccaagggtcccagcggagtgccctgcggcgacatcaagagggaaaacgggatccacaggctggaagcgatgctctacgccctggaccagatcaacagtgatcccaacctactgcccaacgtgacgctgggcgcgcggatcctggacacttgttccagggacacttacgcgctcgaacagtcgcttactttcgtccaggcgctcatccagaaggacacctccgacgtgcgctgcaccaacggcgaaccgccggttttcgtcaagccggagaaagtagttggagtgattggggcttcggggagttcggtctccatcatggtagccaacatcctgaggctcttccagatcccccagattagttatgcatcaacggcacccgagctaagtgatgaccggcgctatgacttcttctctcgcgtggtgccacccgattccttccaagcccaggccatggtagacattgtaaaggccctaggctggaattatgtgtctaccctcgcatcggaaggaagttatggagagaaaggtgtggagtccttcacgcagatttccaaagaggcaggtggactctgcattgcccagtccgtgagaatcccccaggaacgcaaagacaggaccattgactttgatagaattatcaaacagctcctggacacccccaactccagggccgtcgtgatttttgccaacgatgaggatataaagcagatccttgcagcagccaaaagagctgaccaagttggccattttctttgggtgggatcagacagctggggatccaaaataaacccactgcaccagcatgaagatatcgcagaaggggccatcaccattcagcccaagcgagccacggtggaagggtttgatgcctactttacgtcccgtacacttgaaaacaacagaagaaatgtatggtttgccgaatactgggaggaaaacttcaactgcaagttgacgattagtgggtcaaaaaaagaagacacagatcgcaaatgcacaggacaggagagaattggaaaagattccaactatgagcaggagggtaaagtccagttcgtgattgacgcagtctatgctatggctcacgcccttcaccacatgaacaaggatctctgtgctgactaccggggtgtctgcccagagatggagcaagctggaggcaagaagttgctgaagtatatacgcaatgttaatttcaatggtagtgctggcactccagtgatgtttaacaagaacggggatgcacctgggcgttatgacatctttcagtaccagaccacaaacaccagcaacccgggttaccgtctgatcgggcagtggacagacgaacttcagctcaatatagaagacatgcagtggggtaaaggagtccgagagatacccgcctcagtgtgcacactaccatgtaagccaggacagagaaagaagacacagaaaggaactccttgctgttggacctgtgagccttgcgatggttaccagtaccagtttgatgagatgacatgccagcattgcccctatgaccagaggcccaatgaaaatcgaaccggatgccaggatattcccatcatcaaactggagtggcactccccctgggctgtgattcctgtcttcctggcaatgttggggatcattgccaccatctttgtcatggccactttcatccgctacaatgacacgcccattgtccgggcatctgggcgggaactcagctatgttcttttgacgggcatctttctttgctacatcatcactttcctgatgattgccaaaccagatgtggcagtgtgttctttccggcgagttttcttgggcttgggtatgtgcatcagttatgcagccctcttgacgaaaacaaatcggatttatcgcatatttgagcagggcaagaaatcagtaacagctcccagactcataagcccaacatcacaactggcaatcacttccagtttaatatcagttcagcttctaggggtgttcatttggtttggtgttgatccacccaacatcatcatagactatgatgaacacaagacaatgaaccctgagcaagccagaggggttctcaagtgtgacattacagatctccaaatcatttgctccttgggatatagcattcttctcatggtcacatgtactgtgtatgccatcaagactcggggtgtacccgagaattttaacgaagccaagcccattggattcactatgtacacgacatgtatagtatggcttgccttcattccaattttttttggcaccgctcaatcagcggaaaagctctacatacaaactaccacgcttacaatctccatgaacctaagtgcatcagtggcgctggggatgctatacatgccgaaagtgtacatcatcattttccaccctgaactcaatgtccagaaacggaagcgaagcttcaaggcggtagtcacagcagccaccatgtcatcgaggctgtcacacaaacccagtgacagacccaacggtgaggcaaagaccgagctctgtgaaaacgtagacccaaacataacctctgaggacctcagcttgcacaaagaggattga

SEQ ID NO: 255886 - DNA, 2472 bp, Artificial Sequence
  derived and/or modified sequence
atggtccagctgaggaagctgctccgcgtcctgactttgatgaagttcccctgctgcgtgctggaggtgctcctgtgcgcgctggcggcggcggcgcgcggccaggagatgtacgccccgcactcaatccggatcgagggggacgtcaccctcggggggctgttccccgtgcacgccaagggtcccagcggagtgccctgcggcgacatcaagagggaaaacgggatccacaggctggaagcgatgctctacgccctggaccagatcaacagtgatcccaacctactgcccaacgtgacgctgggcgcgcggatcctggacacttgttccagggacacttacgcgctcgaacagtcgcttactttcgtccaggcgctcatccagaaggacacctccgacgtgcgctgcaccaacggcgaaccgccggttttcgtcaagccggagaaagtagttggagtgattggggcttcggggagttcggtctccatcatggtagccaacatcctgaggctcttccagatcccccagattagttatgcatcaacggcacccgagctaagtgatgaccggcgctatgacttcttctctcgcgtggtgccacccgattccttccaagcccaggccatggtagacattgtaaaggccctaggctggaattatgtgtctaccctcgcatcggaaggaagttatggagagaaaggtgtggagtccttcacgcagatttccaaagaggcaggtggactctgcattgcccagtccgtgagaatcccccaggaacgcaaagacaggaccattgactttgatagaattatcaaacagctcctggacacccccaactccagggccgtcgtgatttttgccaacgatgaggatataaagcagatccttgcagcagccaaaagagctgaccaagttggccattttctttgggtgggatcagacagctggggatccaaaataaacccactgcaccagcatgaagatatcgcagaaggggccatcaccattcagcccaagcgagccacggtggaagggtttgatgcctactttacgtcccgtacacttgaaaacaacagaagaaatgtatggtttgccgaatactgggaggaaaacttcaactgcaagttgacgattagtgggtcaaaaaaagaagacacagatcgcaaatgcacaggacaggagagaattggaaaagattccaactatgagcaggagggtaaagtccagttcgtgattgacgcagtctatgctatggctcacgcccttcaccacatgaacaaggatctctgtgctgactaccggggtgtctgcccagagatggagcaagctggaggcaagaagttgctgaagtatatacgcaatgttaatttcaatggtgatgctggcactccagtgatgtttaacaagaacggggatgcacctgggcgttatgacatctttcagtaccagaccacaaacaccagcaacccgggttaccgtctgatcgggcagtggacagacgaacttcagctcaatatagaagacatgcagtggggtaaaggagtccgagagatacccgcctcagtgtgcacactaccatgtaagccaggacagagaaagaagacacagaaaggaactccttgctgttggacctgtgagccttgcgatggttaccagtaccagtttgatgagatgacatgccagcattgcccctatgaccagaggcccaatgaaaatcgaaccggatgccaggatattcccatcatcaaactggagtggcactccccctgggctgtgattcctgtcttcctggcaatgttggggatcattgccaccatctttgtcatggccactttcatccgctacaatgacacgcccattgtccgggcatctgggcgggaactcagctatgttcttttgacgggcatctttctttgctacatcatcactttcctgatgattgccaaaccagatgtggcagtgtgttctttccggcgagttttcttgggcttgggtatgtgcatcagttatgcagccctcttgacgaaaacaaatcggatttatcgcatatttgagcagggcaagaaatcagtaacagctcccagactcataagcccaacatcacaactggcaatcacttccagtttaatatcagttcagcttctaggggtgttcatttggtttggtgttgatccacccaacatcatcatagactatgatgaacacaagacaatgaaccctgagcaagccagaggggttctcaagtgtgacattacagatctccaaatcatttgctccttgggatatagcattcttctcatggtcacatgtactgtgtatgccatcaagactcggggtgtacccgagaattttaacgaagccaagcccattggattcactatgtacacgacatgtatagtatggcttgccttcattccaattttttttggcaccgctcaatcagcggaaaaggtaattttatgctgtatatca

SEQ ID NO: 255887 - DNA, 2775 bp, Artificial Sequence
  derived and/or modified sequence
atggtccagctgaggaagctgctccgcgtcctgactttgatgaagttcccctgctgcgtgctggaggtgctcctgtgcgcgctggcggcggcggcgcgcggccaggagatgtacgccccgcactcaatccggatcgagggggacgtcaccctcggggggctgttccccgtgcacgccaagggtcccagcggagtgccctgcggcgacatcaagagggaaaacgggatccacaggctggaagcgatgctctacgccctggaccagatcaacagtgatcccaacctactgcccaacgtgacgctgggcgcgcggatcctggacacttgttccagggacacttacgcgctcgaacagtcgcttactttcgtccaggcgctcatccagaaggacacctccgacgtgcgctgcaccaacggcgaaccgccggttttcgtcaagccggagaaagtagttggagtgattggggcttcggggagttcggtctccatcatggtagccaacatcctgaggctcttccagatcccccagattagttatgcatcaacggcacccgagctaagtgatgaccggcgctatgacttcttctctcgcgtggtgccacccgattccttccaagcccaggccatggtagacattgtaaaggccctaggctggaattatgtgtctaccctcgcatcggaaggaagttatggagagaaaggtgtggagtccttcacgcagatttccaaagaggcaggtggactctgcattgcccagtccgtgagaatcccccaggaacgcaaagacaggaccattgactttgatagaattatcaaacagctcctggacacccccaactccagggccgtcgtgatttttgccaacgatgaggatataaagcagatccttgcagcagccaaaagagctgaccaagttggccattttctttgggtgggatcagacagctggggatccaaaataaacccactgcaccagcatgaagatatcgcagaaggggccatcaccattcagcccaagcgagccacggtggaagggtttgatgcctactttacgtcccgtacacttgaaaacaacagaagaaatgtatggtttgccgaatactgggaggaaaacttcaactgcaagttgacgattagtgggtcaaaaaaagaagacacagatcgcaaatgcacaggacaggagagaattggaaaagattccaactatgagcaggagggtaaagtccagttcgtgattgacgcagtctatgctatggctcacgcccttcaccacatgaacaaggatctctgtgctgactaccggggtgtctgcccagagatggagcaagctggaggcaagaagttgctgaagtatatacgcaatgttaatttcaatggtagtgctggcactccagtgatgtttaacaagaacggggatgcacctgggcgttatgacatctttcagtaccagaccacaaacaccagcaacccgggttaccgtctgatcgggcagtggacagacgaacttcagctcaatatagaagacatgcagtggggtaaaggagtccgagagatacccgcctcagtgtgcacactaccatgtaagccaggacagagaaagaagacacagaaaggaactccttgctgttggacctgtgagccttgcgatggttaccagtaccagtttgatgagatgacatgccagcattgcccctatgaccagaggcccaatgaaaatcgaaccggatgccaggatattcccatcatcaaactggagtggcactccccctgggctgtgattcctgtcttcctggcaatgttggggatcattgccaccatctttgtcatggccactttcatccgctacaatgacacgcccattgtccgggcatctgggcgggaactcagctatgttcttttgacgggcatctttctttgctacatcatcactttcctgatgattgccaaaccagatgtggcagtgtgttctttccggcgagttttcttgggcttgggtatgtgcatcagttatgcagccctcttgacgaaaacaaatcggatttatcgcatatttgagcagggcaagaaatcagtaacagctcccagactcataagcccaacatcacaactggcaatcacttccagtttaatatcagttcagcttctaggggtgttcatttggtttggtgttgatccacccaacatcatcatagactatgatgaacacaagacaatgaaccctgagcaagccagaggggttctcaagtgtgacattacagatctccaaatcatttgctccttgggatatagcattcttctcatggtcacatgtactgtgtatgccatcaagactcggggtgtacccgagaattttaacgaagccaagcccattggattcactatgtacacgacatgtatagtatggcttgccttcattccaattttttttggcaccgctcaatcagcggaaaagctctacatacaaactaccacgcttacaatctccatgaacctaagtgcatcagtggcgctggggatgctatacatgccgaaagtgtacatcatcattttccaccctgaactcaatgtccagaaacggaagcgaagcttcaaggcggtagtcacagcagccaccatgtcatcgaggctgtcacacaaacccagtgacagacccaacggtgaggcaaagaccgagctctgtgaaaacgtagacccaaacatttttttttttggctgtacagtggaacttggattacactttaaattaactttctctaggaatcaaagtaacctctga

SEQ ID NO: 255888 - DNA, 2769 bp, Artificial Sequence
  derived and/or modified sequence
atggtgcagctgaggaagctgctgcgggtgctgaccctgatgaagttcccctgctgcgtgctggaggtgctgctgtgtgccctggccgctgctgcccggggccaggagatgtatgccccccacagcatcagaattgaaggagatgtgaccctgggcggcctcttccctgtgcacgccaagggccccagcggcgtgccctgtggggacatcaagagagaaaatggcatccaccggctggaggccatgctgtatgccctggaccagatcaacagcgaccccaacctgctgcccaacgtgaccctgggcgcccgcatcctggacacctgcagccgggacacctacgccctggagcagagcctgacctttgtgcaggccctgatccagaaggacaccagtgatgtgcgctgcaccaacggggagccccctgtgtttgtgaagccagagaaggtggtgggcgtcatcggggccagcggcagctctgtgtccatcatggtggccaacatcctgcggctcttccagatcccccagatctcctatgccagcacagcccctgagctgagtgatgaccggcgctatgacttcttcagccgggtggtgcccccagacagcttccaggcccaggccatggtggacatcgtgaaggccctgggctggaactacgtgtccaccctggccagcgagggcagctatggagagaagggcgtggagagcttcacccagatcagcaaggaggccggcggcctgtgcatcgcccagagcgtgcgcatcccccaggagaggaaggacaggaccatcgactttgaccgcatcatcaagcagctgctggacacccccaacagcagagctgtggtgatctttgccaatgatgaggacatcaagcagatcctggccgccgccaagagagctgaccaggtgggccacttcctgtgggtgggcagtgacagctggggcagcaagatcaaccccctgcaccagcatgaagatattgctgagggcgccatcaccatccagcccaagagggccaccgtggagggctttgatgcctacttcaccagcaggaccctggagaacaacagaagaaatgtgtggtttgctgagtactgggaggagaacttcaactgcaagctgaccatcagcggcagcaagaaggaggacacagacagaaaatgtacaggccaggagcgcatcggcaaggacagcaactatgagcaggagggcaaggtgcagtttgtgattgatgctgtgtatgccatggcccacgccctgcaccacatgaacaaggacctgtgtgccgactacagaggagtgtgcccagagatggagcaggccggcggcaagaagctgctgaagtacatcagaaatgtgaacttcaacggcagcgctggcacccctgtgatgttcaacaagaatggagatgcccctggccgctatgacatcttccagtaccagaccaccaacaccagcaaccctggctaccgcctgattggccagtggacagatgagctgcagctgaacatcgaggacatgcagtggggcaaaggagtgcgggagatcccagcctctgtgtgcaccctgccctgcaagccaggccagaggaagaagacccagaagggcaccccctgctgctggacctgtgagccctgtgatggctaccagtaccagtttgatgagatgacctgccagcactgcccctatgaccagaggcccaatgaaaatagaacaggctgccaggacatccccatcatcaagctggagtggcacagcccctgggccgtcatccctgtgttcctggccatgctgggcatcatcgccaccatctttgtgatggccaccttcatccgctacaatgacacccccatcgtgcgggccagcggccgggagctgtcctatgtgctgctgaccggcatcttcctgtgctacatcatcaccttcctgatgattgccaagccagatgtggccgtgtgcagcttccggcgggtcttcctgggcctgggcatgtgcatctcctatgctgccctgctgaccaagaccaaccgcatctaccgcatctttgagcagggcaagaagtctgtgacagcccccaggctcatcagccccaccagccagctggccatcaccagcagcctcatctctgtgcagctgctgggcgtcttcatctggtttggagtggacccccccaacatcatcatcgactatgatgagcacaagaccatgaaccctgagcaggcccggggcgtgctgaagtgtgacatcacagacctgcagatcatctgcagcctgggctacagcatcctgctgatggtgacctgcaccgtgtatgccatcaagacccggggcgtgcctgagaacttcaatgaggccaagcccatcggcttcaccatgtacaccacctgcatcgtgtggctggccttcatccccatcttctttggaacagcccagagcgctgagaagctgtacatccagaccaccaccctgaccatctccatgaacctgagcgcctctgtggccctgggcatgctgtacatgcccaaggtgtacatcatcatcttccaccctgagctgaatgtgcagaagaggaagaggagcttcaaggctgtggtgacagctgccaccatgagcagccggctgagccacaagcccagcgaccggcccaatggagaggccaagacagagctgtgtgaaaatgtggaccccaacaactgcatcccccctgtgaggaagtctgtgcagaagtctgtgacctggtacaccatccccccaacagtgtag

SEQ ID NO: 255889 - DNA, 2736 bp, Artificial Sequence
  derived and/or modified sequence
atggtgcagctgaggaagctgctgcgggtgctgaccctgatgaagttcccctgctgcgtgctggaggtgctgctgtgtgccctggccgctgctgcccggggccaggagatgtatgccccccacagcatcagaattgaaggagatgtgaccctgggcggcctcttccctgtgcacgccaagggccccagcggcgtgccctgtggggacatcaagagagaaaatggcatccaccggctggaggccatgctgtatgccctggaccagatcaacagcgaccccaacctgctgcccaacgtgaccctgggcgcccgcatcctggacacctgcagccgggacacctacgccctggagcagagcctgacctttgtgcaggccctgatccagaaggacaccagtgatgtgcgctgcaccaacggggagccccctgtgtttgtgaagccagagaaggtggtgggcgtcatcggggccagcggcagctctgtgtccatcatggtggccaacatcctgcggctcttccagatcccccagatctcctatgccagcacagcccctgagctgagtgatgaccggcgctatgacttcttcagccgggtggtgcccccagacagcttccaggcccaggccatggtggacatcgtgaaggccctgggctggaactacgtgtccaccctggccagcgagggcagctatggagagaagggcgtggagagcttcacccagatcagcaaggaggccggcggcctgtgcatcgcccagagcgtgcgcatcccccaggagaggaaggacaggaccatcgactttgaccgcatcatcaagcagctgctggacacccccaacagcagagctgtggtgatctttgccaatgatgaggacatcaagcagatcctggccgccgccaagagagctgaccaggtgggccacttcctgtgggtgggcagtgacagctggggcagcaagatcaaccccctgcaccagcatgaagatattgctgagggcgccatcaccatccagcccaagagggccaccgtggagggctttgatgcctacttcaccagcaggaccctggagaacaacagaagaaatgtgtggtttgctgagtactgggaggagaacttcaactgcaagctgaccatcagcggcagcaagaaggaggacacagacagaaaatgtacaggccaggagcgcatcggcaaggacagcaactatgagcaggagggcaaggtgcagtttgtgattgatgctgtgtatgccatggcccacgccctgcaccacatgaacaaggacctgtgtgccgactacagaggagtgtgcccagagatggagcaggccggcggcaagaagctgctgaagtacatcagaaatgtgaacttcaacggcagcgctggcacccctgtgatgttcaacaagaatggagatgcccctggccgctatgacatcttccagtaccagaccaccaacaccagcaaccctggctaccgcctgattggccagtggacagatgagctgcagctgaacatcgaggacatgcagtggggcaaaggagtgcgggagatcccagcctctgtgtgcaccctgccctgcaagccaggccagaggaagaagacccagaagggcaccccctgctgctggacctgtgagccctgtgatggctaccagtaccagtttgatgagatgacctgccagcactgcccctatgaccagaggcccaatgaaaatagaacaggctgccaggacatccccatcatcaagctggagtggcacagcccctgggccgtcatccctgtgttcctggccatgctgggcatcatcgccaccatctttgtgatggccaccttcatccgctacaatgacacccccatcgtgcgggccagcggccgggagctgtcctatgtgctgctgaccggcatcttcctgtgctacatcatcaccttcctgatgattgccaagccagatgtggccgtgtgcagcttccggcgggtcttcctgggcctgggcatgtgcatctcctatgctgccctgctgaccaagaccaaccgcatctaccgcatctttgagcagggcaagaagtctgtgacagcccccaggctcatcagccccaccagccagctggccatcaccagcagcctcatctctgtgcagctgctgggcgtcttcatctggtttggagtggacccccccaacatcatcatcgactatgatgagcacaagaccatgaaccctgagcaggcccggggcgtgctgaagtgtgacatcacagacctgcagatcatctgcagcctgggctacagcatcctgctgatggtgacctgcaccgtgtatgccatcaagacccggggcgtgcctgagaacttcaatgaggccaagcccatcggcttcaccatgtacaccacctgcatcgtgtggctggccttcatccccatcttctttggaacagcccagagcgctgagaagctgtacatccagaccaccaccctgaccatctccatgaacctgagcgcctctgtggccctgggcatgctgtacatgcccaaggtgtacatcatcatcttccaccctgagctgaatgtgcagaagaggaagaggagcttcaaggctgtggtgacagctgccaccatgagcagccggctgagccacaagcccagcgaccggcccaatggagaggccaagacagagctgtgtgaaaatgtggaccccaacatcaccagcgaggacctgagcctgcacaaggaggactag

SEQ ID NO: 255890 - DNA, 2475 bp, Artificial Sequence
  derived and/or modified sequence
atggtgcagctgaggaagctgctgcgggtgctgaccctgatgaagttcccctgctgcgtgctggaggtgctgctgtgtgccctggccgctgctgcccggggccaggagatgtatgccccccacagcatcagaattgaaggagatgtgaccctgggcggcctcttccctgtgcacgccaagggccccagcggcgtgccctgtggggacatcaagagagaaaatggcatccaccggctggaggccatgctgtatgccctggaccagatcaacagcgaccccaacctgctgcccaacgtgaccctgggcgcccgcatcctggacacctgcagccgggacacctacgccctggagcagagcctgacctttgtgcaggccctgatccagaaggacaccagtgatgtgcgctgcaccaacggggagccccctgtgtttgtgaagccagagaaggtggtgggcgtcatcggggccagcggcagctctgtgtccatcatggtggccaacatcctgcggctcttccagatcccccagatctcctatgccagcacagcccctgagctgagtgatgaccggcgctatgacttcttcagccgggtggtgcccccagacagcttccaggcccaggccatggtggacatcgtgaaggccctgggctggaactacgtgtccaccctggccagcgagggcagctatggagagaagggcgtggagagcttcacccagatcagcaaggaggccggcggcctgtgcatcgcccagagcgtgcgcatcccccaggagaggaaggacaggaccatcgactttgaccgcatcatcaagcagctgctggacacccccaacagcagagctgtggtgatctttgccaatgatgaggacatcaagcagatcctggccgccgccaagagagctgaccaggtgggccacttcctgtgggtgggcagtgacagctggggcagcaagatcaaccccctgcaccagcatgaagatattgctgagggcgccatcaccatccagcccaagagggccaccgtggagggctttgatgcctacttcaccagcaggaccctggagaacaacagaagaaatgtgtggtttgctgagtactgggaggagaacttcaactgcaagctgaccatcagcggcagcaagaaggaggacacagacagaaaatgtacaggccaggagcgcatcggcaaggacagcaactatgagcaggagggcaaggtgcagtttgtgattgatgctgtgtatgccatggcccacgccctgcaccacatgaacaaggacctgtgtgccgactacagaggagtgtgcccagagatggagcaggccggcggcaagaagctgctgaagtacatcagaaatgtgaacttcaatggagatgctggcacccctgtgatgttcaacaagaatggagatgcccctggccgctatgacatcttccagtaccagaccaccaacaccagcaaccctggctaccgcctgattggccagtggacagatgagctgcagctgaacatcgaggacatgcagtggggcaaaggagtgcgggagatcccagcctctgtgtgcaccctgccctgcaagccaggccagaggaagaagacccagaagggcaccccctgctgctggacctgtgagccctgtgatggctaccagtaccagtttgatgagatgacctgccagcactgcccctatgaccagaggcccaatgaaaatagaacaggctgccaggacatccccatcatcaagctggagtggcacagcccctgggccgtcatccctgtgttcctggccatgctgggcatcatcgccaccatctttgtgatggccaccttcatccgctacaatgacacccccatcgtgcgggccagcggccgggagctgtcctatgtgctgctgaccggcatcttcctgtgctacatcatcaccttcctgatgattgccaagccagatgtggccgtgtgcagcttccggcgggtcttcctgggcctgggcatgtgcatctcctatgctgccctgctgaccaagaccaaccgcatctaccgcatctttgagcagggcaagaagtctgtgacagcccccaggctcatcagccccaccagccagctggccatcaccagcagcctcatctctgtgcagctgctgggcgtcttcatctggtttggagtggacccccccaacatcatcatcgactatgatgagcacaagaccatgaaccctgagcaggcccggggcgtgctgaagtgtgacatcacagacctgcagatcatctgcagcctgggctacagcatcctgctgatggtgacctgcaccgtgtatgccatcaagacccggggcgtgcctgagaacttcaatgaggccaagcccatcggcttcaccatgtacaccacctgcatcgtgtggctggccttcatccccatcttctttggaacagcccagagcgctgagaaggtgatcctgtgctgcatctcctag

SEQ ID NO: 255891 - DNA, 2775 bp, Artificial Sequence
  derived and/or modified sequence
atggtgcagctgaggaagctgctgcgggtgctgaccctgatgaagttcccctgctgcgtgctggaggtgctgctgtgtgccctggccgctgctgcccggggccaggagatgtatgccccccacagcatcagaattgaaggagatgtgaccctgggcggcctcttccctgtgcacgccaagggccccagcggcgtgccctgtggggacatcaagagagaaaatggcatccaccggctggaggccatgctgtatgccctggaccagatcaacagcgaccccaacctgctgcccaacgtgaccctgggcgcccgcatcctggacacctgcagccgggacacctacgccctggagcagagcctgacctttgtgcaggccctgatccagaaggacaccagtgatgtgcgctgcaccaacggggagccccctgtgtttgtgaagccagagaaggtggtgggcgtcatcggggccagcggcagctctgtgtccatcatggtggccaacatcctgcggctcttccagatcccccagatctcctatgccagcacagcccctgagctgagtgatgaccggcgctatgacttcttcagccgggtggtgcccccagacagcttccaggcccaggccatggtggacatcgtgaaggccctgggctggaactacgtgtccaccctggccagcgagggcagctatggagagaagggcgtggagagcttcacccagatcagcaaggaggccggcggcctgtgcatcgcccagagcgtgcgcatcccccaggagaggaaggacaggaccatcgactttgaccgcatcatcaagcagctgctggacacccccaacagcagagctgtggtgatctttgccaatgatgaggacatcaagcagatcctggccgccgccaagagagctgaccaggtgggccacttcctgtgggtgggcagtgacagctggggcagcaagatcaaccccctgcaccagcatgaagatattgctgagggcgccatcaccatccagcccaagagggccaccgtggagggctttgatgcctacttcaccagcaggaccctggagaacaacagaagaaatgtgtggtttgctgagtactgggaggagaacttcaactgcaagctgaccatcagcggcagcaagaaggaggacacagacagaaaatgtacaggccaggagcgcatcggcaaggacagcaactatgagcaggagggcaaggtgcagtttgtgattgatgctgtgtatgccatggcccacgccctgcaccacatgaacaaggacctgtgtgccgactacagaggagtgtgcccagagatggagcaggccggcggcaagaagctgctgaagtacatcagaaatgtgaacttcaacggcagcgctggcacccctgtgatgttcaacaagaatggagatgcccctggccgctatgacatcttccagtaccagaccaccaacaccagcaaccctggctaccgcctgattggccagtggacagatgagctgcagctgaacatcgaggacatgcagtggggcaaaggagtgcgggagatcccagcctctgtgtgcaccctgccctgcaagccaggccagaggaagaagacccagaagggcaccccctgctgctggacctgtgagccctgtgatggctaccagtaccagtttgatgagatgacctgccagcactgcccctatgaccagaggcccaatgaaaatagaacaggctgccaggacatccccatcatcaagctggagtggcacagcccctgggccgtcatccctgtgttcctggccatgctgggcatcatcgccaccatctttgtgatggccaccttcatccgctacaatgacacccccatcgtgcgggccagcggccgggagctgtcctatgtgctgctgaccggcatcttcctgtgctacatcatcaccttcctgatgattgccaagccagatgtggccgtgtgcagcttccggcgggtcttcctgggcctgggcatgtgcatctcctatgctgccctgctgaccaagaccaaccgcatctaccgcatctttgagcagggcaagaagtctgtgacagcccccaggctcatcagccccaccagccagctggccatcaccagcagcctcatctctgtgcagctgctgggcgtcttcatctggtttggagtggacccccccaacatcatcatcgactatgatgagcacaagaccatgaaccctgagcaggcccggggcgtgctgaagtgtgacatcacagacctgcagatcatctgcagcctgggctacagcatcctgctgatggtgacctgcaccgtgtatgccatcaagacccggggcgtgcctgagaacttcaatgaggccaagcccatcggcttcaccatgtacaccacctgcatcgtgtggctggccttcatccccatcttctttggaacagcccagagcgctgagaagctgtacatccagaccaccaccctgaccatctccatgaacctgagcgcctctgtggccctgggcatgctgtacatgcccaaggtgtacatcatcatcttccaccctgagctgaatgtgcagaagaggaagaggagcttcaaggctgtggtgacagctgccaccatgagcagccggctgagccacaagcccagcgaccggcccaatggagaggccaagacagagctgtgtgaaaatgtggaccccaacatcttcttcttcggctgcaccgtggagctgggcctgcacttcaagctgaccttcagcaggaaccagagcaacctgtag

SEQ ID NO: 255892 - DNA, 2769 bp, Artificial Sequence
  derived and/or modified sequence
atggtgcagctgcggaagctgctgcgggtgctgaccctgatgaagttcccatgctgcgtactcgaagtactcctgtgcgcgctggccgctgccgcccggggccaggagatgtacgccccacacagcatccgcatcgagggcgacgttactcttgggggcctcttccctgtgcatgcaaagggcccatctggggtgccatgcggggacatcaagagggagaacgggattcacagactcgaggccatgctctacgctctcgaccagatcaactcagaccctaacctcctccctaacgttacactgggagctagaatactggacacctgtagccgggatacctatgctctggagcagtcactgaccttcgtccaggcattaattcagaaagatacctctgatgttaggtgcacaaacggggagcctcccgtgttcgtaaagccagaaaaggtcgtgggggtgatcggagcatctggttcatcagtgagtatcatggtcgccaatattctccggttgtttcagattccgcagatctcctacgcttctaccgcacctgagctcagtgacgatcgccggtacgatttcttcagccgtgtggtgccccccgattctttccaagcacaggcaatggtggatattgtgaaagccctggggtggaactacgttagtactcttgcctccgagggctcgtatggggaaaaaggcgtggaaagtttcactcaaatttccaaagaagcggggggcctgtgcatcgctcaatccgtgcgcatacctcaggaacggaaagaccgcactatagactttgacagaatcatcaaacagttattggacaccccgaattcaagggccgtggtcattttcgccaatgacgaggacattaagcagattctggccgctgctaagagggcagaccaagtgggacactttttgtgggtagggtcagacagctggggatctaagattaatcctttgcaccagcacgaggacatcgccgagggcgcaataaccattcagccgaaacgtgcgactgtggaagggtttgacgcatatttcacgtcaaggaccctggagaacaatcggcgtaatgtttggtttgccgaatactgggaagagaattttaactgcaaacttactatcagcggctccaagaaggaagatacagacagaaagtgtacgggtcaagagcggatcggcaaggacagtaattacgagcaggagggtaaagtccagttcgtgatcgacgctgtgtacgccatggcacatgcgctgcatcatatgaacaaagacctttgtgcagattaccggggagtgtgtccggagatggaacaagcaggcggtaagaaactgctgaagtatatcaggaacgtcaactttaatgggtccgccggtacacccgttatgttcaacaagaatggggacgcaccaggtcggtatgacattttccagtaccagaccacgaatacctctaatccggggtaccgcctgatcgggcagtggaccgatgagcttcaattaaacattgaagacatgcaatgggggaagggagtccgggagattccagcatcagtgtgtacactgccttgtaagccaggccagcgcaagaagacccaaaaagggaccccatgttgctggacttgcgaaccatgtgatgggtaccagtaccagttcgatgagatgacctgccaacattgtccctatgatcagaggccaaacgaaaaccgaacagggtgtcaggatatccccatcatcaagctagaatggcacagcccctgggccgttattccggtgttcctggccatgctcggaattattgctaccatcttcgtgatggccacatttataagatataacgacacacctatagtgagggcctctggtagagagttgtcatacgtgctgctgactggaatttttttatgctatattattaccttcctaatgattgctaagccagacgtggcggtgtgttctttccggcgcgtcttccttgggctggggatgtgtatatcatatgccgctctcctgacaaaaactaaccggatctacaggatatttgaacaaggaaagaagtcggtcacggctccaagactcatcagtcccacctcccagcttgctataaccagctcattaatttcagtgcagctgttaggcgtcttcatctggttcggtgtggatccccccaacattatcatcgactatgacgagcataagaccatgaatcctgagcaggctcgcggagttctcaaatgtgatatcaccgacctgcaaatcatctgttcgcttggctactctattctactgatggtcacctgcaccgtgtacgccataaaaaccaggggagtgcctgaaaatttcaatgaggcaaagccaatcggtttcaccatgtacacaacatgcattgtgtggcttgcattcattccgatcttttttggtaccgctcagtccgcggagaaactgtatatccagacgacaaccctcaccatctcaatgaacctctccgcgtctgtggctctcggaatgttgtatatgccgaaagtctatatcattatcttccacccagagctcaatgtccagaaacgcaagagatcattcaaggccgtcgttacagctgctaccatgagcagcaggctgtctcataaaccgtcagaccgtcctaacggcgaggccaagactgaactctgcgagaacgttgacccaaacaattgtattccacccgtgaggaagtctgttcaaaaatccgttacctggtataccatcccccccacagtctag

SEQ ID NO: 255893 - DNA, 2769 bp, Artificial Sequence
  derived and/or modified sequence
atggtgcagctgcggaagctgctgcgggtgctgaccctgatgaagtttccttgttgtgtcctggaggtactgctgtgcgccctggccgccgccgcgaggggtcaggagatgtacgcccctcactcaatccgcattgagggtgatgtaactttgggcggactatttcccgtccacgctaaaggcccatcaggcgtcccttgcggagacataaagagggaaaacgggatacacaggctggaggccatgctctacgcactggaccagatcaactctgatcccaatctcctgccaaatgtgacactaggagcccggatccttgacacctgtagtcgtgacacttacgctctcgagcagtctcttactttcgttcaagctttaatacagaaggatacttctgatgtcaggtgcactaacggggagcccccggtttttgttaaacctgagaaggtcgtaggagtgatcggggcatcgggtagcagcgtatccatcatggtagccaatatcctgaggctgtttcaaattccgcagatatcatatgcctctactgcccctgagctaagcgacgatagaaggtacgatttcttctcacgagtggttccccctgactccttccaggcccaggcgatggttgatatagtaaaagccctggggtggaactatgtgagtacgctcgctagcgaggggtcatacggagaaaagggggtggaatctttcactcagattagcaaggaggcagggggcctctgcatcgcccaaagtgtccgcattcctcaggaacgcaaggacagaacgatcgattttgataggattatcaagcagcttctggatacaccgaactcacgagcagtagtaatctttgccaacgatgaagatatcaagcagatcctggccgctgcaaaacgagcggaccaagtcgggcactttctatgggtcgggagtgattcttgggggagcaagattaacccccttcatcagcatgaagatatcgccgagggcgccattaccatccaacccaagagagccaccgtcgagggcttcgatgcttattttaccagcaggaccctcgaaaataaccggcggaacgtctggtttgcagaatactgggaagagaacttcaactgcaaactcacaatcagtggttctaagaaagaagacactgatcgaaaatgcaccggacaggagcgcattggtaaggactctaactacgagcaggaaggaaaggtgcaattcgtgatcgacgcagtctatgccatggctcatgcacttcaccacatgaacaaagacttatgtgccgactatagaggggtgtgtccagagatggagcaggcgggcggaaagaaactcctgaaatacatcaggaacgtcaatttcaacggctccgctggcacacccgtgatgtttaataaaaacggcgatgctcccggtcgctacgacatcttccagtaccagacaacaaataccagtaacccaggataccgcctgatcggccagtggacagatgagttgcaactgaacatcgaggatatgcagtggggtaagggggtccgcgagatccccgccagcgtctgcacactgccctgcaagccagggcagcggaagaagacccagaagggcacgccttgttgctggacatgtgaaccttgcgacgggtatcaatatcagttcgatgaaatgacttgtcaacactgtccttacgatcaaaggccaaacgaaaataggactggctgtcaggacatcccaatcataaagctggaatggcattccccctgggccgtaattccggttttcttggccatgctgggcatcattgccaccatttttgtgatggcaacctttatcaggtacaacgatacacccattgtcagggcctccggcagagaactgtcatacgtcctgttgacagggatattcttgtgttacattattacatttttgatgatcgcgaagcctgatgtggccgtgtgctcgttcagaagggtgtttttaggactggggatgtgtataagctatgccgcactgctgaccaaaaccaatcggatatacagaatcttcgaacagggaaagaaaagcgtgactgcccctcggctgatcagccccacctctcagctcgcgatcactagctctcttatttcagttcagctcctaggagtctttatctggttcggggtggaccccccaaatatcattattgattacgacgagcataagactatgaacccagagcaagctcggggagtgttgaaatgtgacattacagatttgcagataatttgctccctgggctacagcattctcttaatggtgacctgcacagtctacgcaatcaagactcgcggcgtacctgaaaatttcaacgaggccaagcccatcggtttcacaatgtataccacttgtattgtttggctggcctttattccgatcttcttcgggacagctcagagtgcagaaaaactctacatccagacaactaccttgacgatctccatgaatctttcagcatctgtcgcccttggaatgttatatatgccaaaggtttatataatcatcttccaccccgagctgaatgtgcagaagaggaagcggagctttaaggcagtggtcactgctgctaccatgagtagcaggctatcccacaagccctccgatcgacctaacggcgaggcgaagactgagctgtgcgagaatgtggatccaaataattgtatcccaccagtgagaaagtcagtgcaaaaaagcgtcacctggtatactatccctccaacggtttag

SEQ ID NO: 255894 - DNA, 2736 bp, Artificial Sequence
  derived and/or modified sequence
atggtgcagctgcggaagctgctgcgggtgctgaccctgatgaagttcccctgttgcgtgcttgaggtgttgttatgtgcactggcggctgctgctcgcggtcaagagatgtatgcgccacactcaatcaggatcgagggagacgtgacactcgggggtctgttccccgttcacgctaaagggccctctggagtgccttgtggcgatatcaaacgcgaaaatgggatccatcgccttgaggccatgctctacgcacttgatcaaatcaacagtgaccctaacctgctaccaaacgtgaccctgggggcacgaattctggacacatgctctagagacacctacgccttagaacagtctctgacatttgtgcaggccttaattcaaaaggatactagtgacgtgaggtgcaccaacggagaaccccctgtatttgtcaaaccagagaaggtggttggggtgatcggggcttcaggctcaagcgtgagcatcatggtggccaacatcctgaggcttttccagattccccagatctcatacgcatcaacggctcccgaactatctgatgataggagatacgatttcttctcgagggttgtcccccccgattctttccaggcccaggctatggtcgacatagtgaaggctctgggatggaactacgtctcgacattggcctcggagggctcctatggcgagaaaggcgtagagagtttcacccaaatttccaaggaggccggtgggctgtgtatcgcccagagtgtccgcatcccgcaggagaggaaagacaggacgattgatttcgatagaattattaaacagctcctggacacaccaaacagcagagccgtcgtcatctttgccaacgacgaagacatcaagcagatactggccgccgccaaaagagccgatcaggttgggcatttcctttgggtcgggagcgattcttggggatcaaaaatcaatcccctacatcagcatgaagacattgccgagggtgccattactatccagcccaaacgggcaaccgtggagggctttgacgcatatttcacctcccgtactctcgagaacaaccgccgaaatgtgtggtttgctgagtactgggaagagaacttcaactgcaagttaaccatctcggggtcaaaaaaagaggacactgatcggaagtgtaccggccaggagcgtatcggaaaggatagcaattatgaacaagagggtaaagtgcaatttgtgattgatgccgtgtacgctatggctcatgccttgcaccatatgaacaaagacctctgtgccgattatcggggcgtttgccccgagatggagcaggccggcggcaaaaagctgctgaagtacattagaaatgtcaactttaacgggtccgccggcacaccagtgatgttcaataagaatggcgacgcacccggtcgctacgacatattccaatatcagacaacaaatactagtaacccagggtacagactaatcggacaatggacagatgaactccagcttaatatcgaagacatgcagtggggcaaaggggttagggaaatacctgcatccgtctgtaccctgccctgtaaacctggccaacgcaaaaagacccagaaaggtactccttgttgttggacctgcgagccatgtgatggatatcagtaccaatttgacgagatgacctgtcagcattgcccctatgatcaacgcccaaacgaaaaccgcactgggtgtcaagatatacctattataaagttggagtggcattctccatgggctgtgatccccgtgttcctcgcgatgctcgggataatcgctacaatttttgtgatggccactttcattcgttataacgatactcctatagtgcgcgcctccggtcgagaactgagttacgtcctgctgactggaatcttcctttgttacattatcacattcctgatgatcgccaaaccagatgtcgcagtttgcagttttaggagggttttcctgggattaggaatgtgtatctcctatgcagcacttctgaccaagactaatcggatctaccgtatctttgagcaaggcaaaaagtcggtaactgccccacgtctgatttcccctacctcacaacttgcaattactagtagcctgatttcagtgcagctcttgggggtctttatttggtttggcgtcgacccacctaatatcatcatcgattacgacgagcacaagaccatgaaccccgaacaggcaagaggcgtcttgaaatgcgatatcacagacctgcagattatttgctctctcggctatagtatacttctgatggttacctgtactgtgtatgccattaaaaccagaggcgttcctgaaaattttaacgaggcaaagccaattggatttacgatgtacacaacttgtatagtgtggctggctttcatccccattttttttggaactgctcagtcggcagaaaagctctacatccaaaccaccaccttgactattagtatgaacctgtccgcgagtgtggcgctgggaatgctttacatgcccaaagtttacatcattatttttcaccccgaactgaatgtgcaaaaaagaaagcgaagcttcaaagctgtcgtaacggctgccacaatgtcctctcggctgtcccacaagcccagcgatcgtccaaacggcgaagcaaagacagagctctgcgagaatgttgatccgaatatcaccagtgaagatttgagccttcataaggaagattag

SEQ ID NO: 255895 - DNA, 2475 bp, Artificial Sequence
  derived and/or modified sequence
atggtgcagctgcggaagctgctgcgggtgctgaccctgatgaagttcccttgttgcgtgctggaggtcctactgtgcgccttagccgctgcggctagaggtcaggagatgtacgctccccattctattcgtatcgagggggacgtgacactcggtgggttatttcccgtgcatgccaagggtccgagcggagttccgtgtggcgatattaaacgtgagaacggtattcataggctggaagcaatgttgtatgccctggatcaaatcaactcagatccaaatcttttacctaacgtcacactaggggcccgcatcctcgacacatgctcacgagacacctatgccttagaacagagtctaacctttgtgcaggccctaattcagaaagacacttccgatgttcgctgtaccaatggcgaaccgcccgttttcgtgaaaccagagaaagttgttggagtcattggagcctcgggatctagcgtgtctattatggtggctaatattctgagacttttccagataccacagatctcctacgctagtaccgcccctgaactgtctgacgatagacgttatgattttttctcaagagtggtgccacccgactccttccaggcacaggcaatggtcgacatcgtaaaagctctcgggtggaattatgtatccacgttagcttcagaaggttcctatggggagaagggtgtagaaagcttcacgcagatttccaaggaagccggcggcctctgtatagcccagtcggtgcggattccccaggaacggaaagatagaaccatagactttgaccgcatcatcaagcaactgctggatactcccaattcccgcgcagtggtgattttcgccaacgacgaggacattaagcagattcttgccgccgcaaagcgcgctgatcaagtgggtcacttcctgtgggtgggaagtgacagttggggatcaaagattaaccctttacaccagcacgaggacatcgccgaaggcgccataaccattcaacctaaacgcgccacagtagagggcttcgatgcctacttcacgtctagaacattggagaataatagacgcaatgtctggtttgccgagtactgggaggaaaattttaattgtaaactgaccatatccggatctaagaaggaggacaccgaccggaagtgtaccgggcaggagagaatcggaaaggacagcaattatgaacaggaagggaaggtacaatttgttatagatgccgtgtatgcgatggcacacgccctccatcatatgaataaggacctgtgcgcagattacaggggcgtttgccccgagatggagcaggcaggcgggaagaaactgcttaaatatattaggaacgtgaatttcaatggagatgccgggactcctgttatgttcaataagaatggggatgctccaggtcggtacgacatctttcagtaccagaccaccaacaccagtaaccctggttatcggctgatcgggcaatggaccgatgagctccagctgaatatagaggacatgcagtggggtaaaggcgtacgcgagatccctgcctctgtgtgcaccctcccatgcaaacccggacagcgaaaaaagacccagaaggggaccccctgttgctggacctgtgaaccctgcgacggataccaatatcagtttgatgaaatgacttgtcagcattgtccatacgaccagaggcctaatgagaataggacgggttgccaggatatccctatcataaagctggagtggcattcaccatgggctgtaatcccagtcttcctagcaatgctaggaatcatcgccactatcttcgttatggctacttttatccgatataatgacaccccgatcgtgcgagcctccggcagagaactctcgtatgtgctgctaaccggaatattcctctgctacataattacgttcctgatgatcgccaaaccagatgttgcagtatgcagctttcgtagagtcttccttggccttggcatgtgtatatcttacgcagcattactgacgaagaccaacaggatttatagaatcttcgagcaggggaagaagtccgttacagctccacggttgatcagccctacctcacagctggcaattacttcttccttgattagcgtgcaactcttgggagttttcatatggtttggggtggaccctcccaatatcatcatcgactacgatgagcataaaacaatgaaccctgagcaggcacgcggggtgttgaagtgtgacatcaccgatctccagataatctgcagtctgggctactcaattctcctcatggtaacatgtacggtctatgcaattaagaccaggggcgttccggaaaacttcaacgaggccaaacccatcggctttaccatgtatacaacatgcattgtgtggctcgctttcatcccaatctttttcggaaccgcacagtccgccgaaaaagttattctctgctgtatcagctag

SEQ ID NO: 255896 - DNA, 2775 bp, Artificial Sequence
  derived and/or modified sequence
atggtgcagctgcggaagctgctgcgggtgctgaccctgatgaagtttccttgttgtgttcttgaagtgctactctgcgcgcttgccgctgcggcacgcggccaggagatgtatgcaccccatagtataagaatcgaaggagatgtcaccttaggaggcctctttcccgttcatgcaaagggcccttctggcgtcccctgcggggacattaagcgcgaaaacgggatccaccgactggaggctatgctttatgctttggaccagatcaattctgacccaaatttgctacccaatgtgacgctgggcgctcgaattttggatacgtgctctagagatacgtatgcgctagagcagagcctgacttttgtgcaggcgttaattcaaaaagacacttccgatgtcaggtgcacaaacggagagccgcctgtgtttgtcaaacccgagaaggtggtcggcgtgattggagccagcggctccagcgtgtccataatggtagctaacattctcagactgtttcagatccctcaaattagctacgccagcacagcaccagaacttagtgatgatcgtcgatacgatttcttctctagggttgtgccccccgattcgttccaagcccaggccatggtggacattgtcaaagcccttggatggaattacgtctccactctagctagcgagggaagctatggagagaaaggggttgagagttttacgcagataagcaaagaggccggggggctctgtattgctcagtcagtgcggataccacaagagcgcaaagaccggaccattgacttcgaccgaattatcaagcagcttctagacacaccaaatagccgggccgtggttattttcgccaatgacgaggatatcaaacagattctagcagcagccaagagggccgaccaggtcggccatttcctctgggtgggctcagacagctgggggagcaagatcaaccccctccaccaacacgaggacatcgccgagggagccataacaatccaaccaaagcgggctacggtcgagggtttcgatgcttatttcacctctcgcactttagagaacaataggcgcaacgtctggtttgccgaatattgggaagagaattttaattgtaaactgactatctccggcagtaaaaaggaggatacggatagaaaatgtaccggacaagagcgtataggcaaagactccaattatgaacaggaagggaaggtccaatttgtcatagatgccgtctacgctatggctcacgccctgcatcacatgaacaaggatttatgcgctgactaccgcggcgtgtgcccagagatggagcaggctggaggtaaaaagttgctgaaatacattcgtaatgtgaattttaacggatctgccggcacgccggtgatgttcaacaagaacggggatgcgcccgggcgatatgatatttttcagtatcagactacaaatacttccaacccagggtaccgactgataggtcaatggaccgacgaattacagttgaatatcgaggacatgcaatggggcaaaggggttcgagagattccagcttctgtgtgcactctgccatgcaaacccgggcagcgcaaaaagacccagaaaggaaccccttgttgttggacttgtgagccctgtgatggttaccagtaccagttcgacgagatgacatgccagcattgtccatacgaccagcgtcccaacgagaataggactggctgccaggatatcccaatcatcaagctggagtggcattccccctgggccgtgataccagtcttcctggctatgctgggaattatcgctaccatattcgtgatggctactttcatacgttacaacgacacccccatagtaagagctagcggccgagagctttcgtacgtgttactgactggcattttcctgtgctatataatcaccttcctcatgattgcaaagccagacgtggctgtgtgttcctttcgccgtgtattcctgggacttgggatgtgcatcagctatgccgcactcttgacaaaaacaaacaggatctaccggattttcgagcagggcaagaaatcggtgaccgcgcccagactgatctctcccacttctcaacttgccatcacgtctagcctcattagcgttcagctgctgggtgtgttcatctggtttggtgtcgacccaccaaacattatcatcgattacgacgagcataagaccatgaaccccgagcaggccaggggagtgctcaaatgcgacattaccgatttgcaaatcatatgctccctgggatacagcattctcctgatggtgacatgcacagtttacgcaatcaagacacgtggagtgccagagaatttcaacgaggctaagccaattggcttcacaatgtatactacgtgtatcgtgtggctggccttcattccgattttttttggcacggcacagtctgcagaaaagctgtacatccagaccactactcttactatctccatgaacctgagcgccagtgtcgctcttgggatgctctacatgccaaaggtgtatataatcatctttcatcccgagctgaacgtgcagaaacgtaagagatcgttcaaagccgtggtcactgctgccactatgtcaagtagactgtcccataagccctcggaccggccaaacggtgaggctaagaccgagctttgcgaaaacgttgatccaaacatctttttttttgggtgcacagtggagctgggcctccactttaaactcacatttagcagaaaccagagcaatctgtag

SEQ ID NO: 255897 - DNA, 2769 bp, Artificial Sequence
  derived and/or modified sequence
atggttcagttgcgaaaacttcttagagtcttaacactcatgaaatttccgtgctgtgtactggaagtgctcttgtgcgcacttgcagccgctgctaggggtcaggagatgtacgctcctcactcaatacgcatcgaaggcgacgtcaccctgggaggactgttcccagtacatgctaaagggccatcaggcgtgccctgcggggacatcaaacgcgaaaacggcattcacaggctggaggccatgctttacgctttggatcagatcaactccgatcctaatctcttacctaacgtgaccttaggtgctaggatcctagacacgtgctctagagacacctacgcattggagcagtccctgactttcgttcaagccctcatccagaaggacacttcagatgtcaggtgtacaaacggagaacccccagtgttcgtcaaacccgaaaaggttgtgggagtgatcggggctagcggttcctcagtgtctattatggtcgccaatatcttacgcttgttccagatcccccagatttcttacgcatcaaccgcccctgagctctcagacgacaggaggtatgatttcttcagccgggtcgtccctcccgattcttttcaagcacaggccatggtcgacattgtgaaggccctcggctggaattacgtgtcgacactggccagtgaaggaagttacggggaaaaaggtgttgaatcattcacacagataagcaaagaggccggaggtctgtgcattgcccagtctgtgcgaatcccccaggaacggaaagacaggacgatcgacttcgacaggataatcaaacagctgctggacacccccaattctagagccgtggtcattttcgccaatgacgaagacatcaaacagattctggcggctgccaaaagggccgaccaggtaggtcattttctttgggtggggtcggattcttggggatctaagattaatcccctgcaccagcacgaggatattgcagaaggtgcgattactatccaacccaaacgagcaacagtggagggcttcgatgcttacttcacatccagaactctcgaaaataatagacggaacgtctggttcgccgagtattgggaagaaaatttcaactgcaaattgacaatatcaggatccaaaaaagaagacacagacaggaaatgcactggccaggagcggattggcaaggactctaactatgagcaggaaggtaaagtccagttcgtcatagacgcagtgtacgctatggcccacgccctccaccatatgaataaagacttgtgcgccgactacaggggagtgtgcccggaaatggagcaagcaggagggaaaaaactgctgaagtatattaggaacgtaaactttaatggctccgcgggtactcctgtgatgttcaacaaaaatggcgatgcccctggtcggtacgacatttttcagtatcagaccactaatactagtaaccccggatacaggctcatcggccagtggactgatgagctgcagctcaacatcgaggatatgcagtgggggaaaggtgtgagagaaatcccagcctccgtatgcacgctgccctgcaaaccaggacaacgaaaaaagactcaaaaggggacgccttgctgttggacatgtgagccctgtgatggctaccagtatcaatttgacgagatgacatgtcagcactgcccgtacgatcagcgtcctaatgagaacaggaccggatgccaggatattcctatcatcaaactcgagtggcacagtccttgggccgtcatcccagtattcctggcgatgcttgggatcatagctaccattttcgtgatggcaaccttcatccggtacaatgatacacccatcgttagagcttccggaagagagctgtcatacgtgctcttaaccggaatatttctgtgttacattattactttcctgatgatagcgaaaccagatgtggcggtttgcagcttccggagggtgtttcttggcctgggcatgtgcatttcctatgccgctctcttgacaaagacaaatcgaatctatagaattttcgagcagggaaaaaagtctgtaactgccccaaggcttatttcaccaacctcacaactcgccattacctctagcctcatctccgttcagcttctgggtgtgttcatatggtttggcgttgatccccctaatatcattatcgattacgatgaacacaaaacgatgaaccctgagcaggcgcgtggcgtcctcaagtgcgacatcacggacctgcaaatcatctgcagcctgggatatagtattctactcatggttacatgtacggtatatgctattaagacccgcggtgtaccagagaattttaatgaggccaagcccataggattcacgatgtatactacttgcattgtgtggctggctttcattcccatctttttcggtacagcacagagcgccgagaagctctacatccaaactacaacgctgaccatctcaatgaacctgagcgcttctgtcgcattaggtatgctgtacatgcctaaggtgtatatcatcattttccaccccgagctcaacgtgcagaagcgtaaaagatctttcaaggctgttgtgactgcagccacgatgagttccagactgtcccacaaaccatcagacaggcctaacggggaagctaagaccgagttgtgtgaaaatgtggaccctaacaattgtatcccgccagtaaggaagtccgttcagaaatccgttacatggtacacgatcccccctactgtgtag

SEQ ID NO: 255898 - DNA, 2769 bp, Artificial Sequence
  derived and/or modified sequence
atggttcagctgcgtaaactgctaagggtgttgaccctcatgaagtttccctgctgcgtgctcgaggttctgttgtgcgcattggcggctgccgctagaggtcaggagatgtacgcaccccattctatcaggatcgaaggcgatgttacgcttggagggctgttccccgtgcacgccaagggccctagtggcgtgccatgcggggacatcaaaagagagaatggcattcatcggctggaggctatgctttatgccttagaccagatcaatagcgacccaaacctattgccgaatgtgactctgggggcacgcatcctggatacatgctctcgcgacacatatgccctcgagcaaagtctcacattcgtgcaggctctgatccaaaaggacacaagcgatgttagatgcactaacggtgaacctcccgtttttgtcaaaccggaaaaagtggtgggagtcatcggcgcaagtggctcttcagtttccataatggtggcaaacatcctgcgcttatttcagattccacagatatcttatgccagcactgccccagaactgtcagacgacaggcggtatgattttttctctcgggtcgtgcctccagactctttccaagcacaggcgatggtggacattgtgaaggccctgggatggaactacgtgagcactctggcctccgagggcagctacggtgaaaagggggttgaaagtttcacacagatcagtaaggaggctgggggtctgtgtatagctcagagcgtcaggattccgcaggagcgcaaggacagaacaatcgatttcgaccggatcataaagcagctgctggacacccctaactcgagagccgtggtcattttcgcaaatgatgaggatattaagcaaattctggcagccgctaagagggccgaccaggtggggcattttctctgggtagggagcgacagctgggggagcaagatcaaccctctacaccagcatgaagatattgcggaaggagcaatcacgattcagccaaaacgggctacagtcgaaggcttcgatgcctactttacatctcggaccctggagaacaatcgcagaaacgtttggtttgcggaatattgggaagagaactttaattgtaagctcaccattagtggctccaaaaaagaagatacggaccggaagtgtaccggccaggaacggattgggaaggacagcaactacgagcaggaagggaaggttcagttcgtaatcgatgcggtctacgcaatggcccacgcccttcaccatatgaacaaggacctgtgcgccgattacaggggtgtttgccctgaaatggaacaagccggtggtaaaaagctgttaaagtatattcgcaatgtcaatttcaacggcagcgctgggacccccgttatgttcaacaaaaacggagacgctcccggacggtacgatatctttcagtatcagaccacaaacacttcaaacccgggttaccgccttatcggacaatggacagacgagctgcagctgaatatcgaagacatgcagtgggggaaaggcgtcagagagatacccgcatctgtctgtacactgccatgtaaacctgggcagaggaagaaaacccagaaagggacaccgtgctgttggacttgtgaaccttgtgatggttaccagtatcagttcgacgagatgacatgtcagcattgcccatatgatcaacgcccaaacgaaaatagaactggctgccaagacatccccattatcaagctggaatggcattctccatgggccgttatcccagtcttcctcgccatgctgggcataatcgccaccatctttgtgatggcgacgtttataaggtacaatgacacccccatcgttagagcaagcggcagggagttgagttacgtcctgttgactggcatctttctgtgctacattattaccttcttaatgattgctaagccagatgtggccgtctgcagttttagacgggtgtttctgggcttggggatgtgcatttcctacgccgcactccttacgaagaccaatcgtatctaccggatttttgaacagggcaaaaagtcagtcactgctcccagactgattagcccgacatcccagctggccattacctcaagtctgatctctgtccagttgctgggcgttttcatttggtttggagttgacccacctaatatcattatcgattatgatgaacataaaacgatgaatccggaacaagcccgaggcgtgctgaagtgcgacatcaccgatcttcagatcatctgctctctggggtattctatactcttaatggtcacctgtaccgtttacgccatcaaaacacgtggcgtgccagagaacttcaatgaagcgaagcctattggttttaccatgtacactacgtgtatcgtgtggttagcctttattcccatatttttcggtactgcccagtccgcggaaaagctgtacattcagacgacaacacttaccatctccatgaacctctctgcaagcgttgcccttggcatgctgtacatgcctaaggtctatataattatctttcaccccgaactgaacgtgcagaagagaaaaagaagcttcaaagcagtggtaacagctgctactatgtcaagccgcctgagccacaaaccttcagatcggcctaacggagaagccaagacagagttgtgcgagaatgtcgatccaaataactgtatccctcctgtgcggaagagtgtgcagaagtcggttacatggtataccataccccctacagtgtag

SEQ ID NO: 255899 - DNA, 2736 bp, Artificial Sequence
  derived and/or modified sequence
atggtccagctgcgcaagttactccgtgttcttaccttgatgaagttcccatgttgcgttttggaagtgctgttgtgcgcactggcggctgctgcccgtggacaggagatgtacgctccccattcaatcaggatcgagggggacgtaacgttgggcggactgttccctgtacacgctaaaggaccaagtggtgtcccctgtggggatattaagagagagaacggcatccatcggctagaggccatgctgtatgcactggatcagattaatagcgacccgaaccttctccccaatgtaaccttgggagcgcgaatcctggacacttgctcccgggatacatatgctttagaacaaagcttgacgttcgtgcaagcactaatccagaaggataccagtgatgttcgctgcaccaatggggaaccccctgtgttcgtcaaacctgagaaggtcgtcggggttatcggagcctcaggctcctccgtgagcattatggtggctaacattctgaggctcttccagattcctcaaataagctatgcctccactgcgcctgagttgtccgacgatcgacgatacgactttttttccagggtcgtaccgcctgactcttttcaggcccaggccatggtggacatcgtaaaggccttgggctggaactatgtttccactctggctagcgagggctcatatggcgagaagggcgtggaatccttcacccaaatatcgaaggaagccggaggtctgtgtattgcccaatccgtccggataccccaagaacggaaggatagaacgattgacttcgatagaatcatcaaacaactcttggacacgcctaacagccgcgcagtggttatcttcgcgaatgacgaggacatcaaacagattctagcggcagccaagagagccgatcaggtgggacattttctatgggtagggagcgattcttggggcagtaagataaatcctctacatcagcatgaagacattgctgaaggcgcaatcaccattcagcccaagagagctacagttgagggttttgacgcctacttcaccagccgcacactcgagaacaaccggaggaatgtgtggtttgccgagtattgggaggaaaacttcaactgtaagctgacgatctctggaagcaagaaagaggataccgaccgaaaatgtacaggccaggagagaattgggaaggacagcaactatgagcaggaggggaaggtgcagttcgtcatcgacgcggtgtacgcgatggctcacgcactgcaccatatgaataaagatttgtgtgccgattacagaggggtgtgccccgagatggagcaggctggtggaaagaaactgctcaagtacatcagaaacgtgaactttaacggaagtgccggtactcccgtaatgtttaacaagaatggagacgccccagggcgatacgatatctttcagtaccagactactaatacctctaatccagggtacaggcttatcgggcagtggacggatgagctgcaacttaatattgaggacatgcagtggggcaaaggggtacgggagatacccgcatctgtgtgtactctcccttgtaaacccggtcagcggaaaaagacacagaaaggtaccccatgttgctggacctgcgagccatgcgacggctaccaataccaattcgacgaaatgacatgtcagcactgtccctacgaccaaagacccaacgagaataggaccggctgccaagacatccctattattaagttagagtggcattctccatgggccgtaatcccagtctttctggccatgcttggtatcattgccacaatctttgtgatggcaacttttatccgatacaatgacaccccaattgttcgtgcttccgggcgtgagttgagttacgttctgcttaccggcatttttctgtgttacataataacctttctgatgatagccaaaccagacgtcgctgtttgtagtttccgccgtgtgtttctgggccttggaatgtgtattagctatgcagcattgttgaccaaaaccaatcgcatctatagaatttttgagcagggtaaaaaaagtgtgacagcccctcgtctgatcagccctaccagccagctggcaatcacctcctctttaatttccgtccaacttctaggcgtgttcatttggtttggtgtggatccccctaacatcatcatcgactacgacgagcacaagaccatgaatcctgaacaggctcggggtgtactgaaatgtgacattacagacctccagattatttgtagtttaggttatagtattctacttatggttacctgtacggtgtacgccatcaaaacgcgcggagtgcccgaaaattttaacgaagccaagcccatagggttcaccatgtacacaacctgcattgtctggttggcgttcatacccatttttttcggaacagcccagtctgcagaaaaattatatatccagaccacaaccctgactatctccatgaatctatctgcctcggtcgcgctgggcatgctgtacatgccaaaggtttatatcataatcttccaccccgagctgaatgtgcagaagcgaaagcgctcattcaaggccgtggtcaccgccgctactatgtcctccaggctcagccacaagcccagcgaccgaccgaacggggaagccaagacagagctctgcgagaacgtcgaccccaacattacctcggaggacctgagcctgcataaagaggactag

SEQ ID NO: 255900 - DNA, 2475 bp, Artificial Sequence
  derived and/or modified sequence
atggtccagctaagaaaattattgcgagtgctgacacttatgaaatttccctgttgtgttctggaggtgctcctctgcgccttggccgctgcagcccgagggcaagagatgtacgcgcctcacagcatccgcatcgagggggatgtgacccttggcggactgttccctgtacacgccaagggcccaagcggggtgccatgtggagatattaagagagaaaacggaatccaccggttagaagccatgttgtacgccctggatcaaatcaatagtgaccctaaccttttgccgaacgtcaccctcggggcaaggatactggatacttgctctcgcgacacttacgccctggagcagtcgctgacgtttgtgcaggccctgattcaaaaggatacctccgacgtccggtgcaccaatggcgagccacctgtgtttgttaagccagagaaagtggtcggcgtgatcggggcttccgggtctagtgtaagtattatggtggccaatattctgagactgttccaaatccctcagatctcctatgccagcacggcaccggaactgtctgacgacaggagatatgattttttttccagagtcgtcccacccgatagcttccaggcccaggctatggttgacatcgtgaaagcactggggtggaattatgtttcaactctggcctctgagggaagctacggtgaaaagggagtggagtcttttacccagataagcaaggaggccggtggtttgtgtattgcacagagcgtgcgcattcctcaggaaagaaaggatcgaactatcgactttgatcgtattatcaaacagctcctggatacccctaatagcagagccgtggtgattttcgcgaatgatgaggatattaagcagattctggcggcagcgaagagggctgatcaagtcggccacttcctgtgggtcggctcagactcctggggaagtaaaatcaaccctttacatcagcacgaagatatcgcagaaggcgcaatcactatccagccgaagcgagcgaccgtggaaggttttgacgcttactttacaagcagaaccctggagaataaccgcaggaacgtctggttcgcagagtattgggaagagaacttcaattgtaaactgactatcagcgggtccaagaaggaagacacagaccgcaagtgtaccggtcaggagcggattggtaaagattctaactatgagcaggagggtaaggtccagtttgtgattgacgctgtctacgccatggcccacgcgctacatcacatgaacaaggatctttgcgcggattatcggggtgtatgcccagaaatggaacaggccggaggcaagaagctgctcaagtacattcgaaacgtgaacttcaatggggacgccggtacccccgtgatgtttaataagaacggcgatgcgcctggaaggtacgatatctttcagtatcaaaccacgaacacatcaaaccccggatatagactcatcggacaatggaccgacgagcttcagctcaacattgaagatatgcagtggggcaagggcgtccgtgaaatccctgcttcggtgtgtactctgccttgcaaacccggtcagcgaaagaagacccaaaaaggaaccccctgctgttggacctgtgaaccatgcgacggctatcaatatcagtttgacgaaatgacctgccagcactgcccctacgaccagcggcctaatgaaaacagaaccggatgccaggacatccctataatcaagctcgaatggcactctccgtgggcggtgattccagtttttcttgctatgttaggcattattgccacaatcttcgtcatggccacttttatcagatataacgacacccctatcgtgcgagctagcgggagagaactaagctatgtgctgctgacaggcatctttttgtgttacatcataacgttcctgatgatcgcaaaacccgatgtggccgtgtgttcatttaggcgggtgtttttgggactgggtatgtgtatctcgtatgcagcactgttaacgaagacaaatcgtatataccgcatttttgaacaaggtaagaaatccgtgacagcgcctcgcctgattagtcccacctcacagctggcaattacatctagtttgatcagtgtccagttgctaggcgtgtttatctggtttggggtggatcccccaaatataattatcgattacgacgagcataaaaccatgaacccagaacaagccagaggagtactgaagtgcgacattaccgatctgcaaataatctgttcgttaggctacagtatcctactcatggtcacctgcaccgtatacgctatcaagaccaggggcgtccccgagaatttcaatgaggcaaaacctatcgggttcaccatgtacactacttgcattgtctggctggcctttattccaatctttttcggaacagctcaatccgccgagaaagtgatcttgtgctgcatctcttag

SEQ ID NO: 255901 - DNA, 2775 bp, Artificial Sequence
  derived and/or modified sequence
atggtgcagttgagaaagttgctcagagttctgacactgatgaagtttccatgttgtgttctggaggtgctgctgtgtgcccttgccgctgccgcaaggggacaagagatgtacgcaccgcacagtatccgaattgaaggagatgtcactctgggcggactgttccccgtgcatgctaaaggcccatcaggggttccatgcggcgacatcaagagagagaatggcattcaccgtctggaagcaatgctctacgccctggaccaaataaactctgaccccaacctactgccaaatgtgacactgggggcaaggattctggatacctgtagcagggatacctatgcactggaacagagtcttactttcgtccaagctcttatccagaaggacacatccgacgtccgctgcaccaacggggaaccccctgtgttcgtcaaacctgaaaaagtcgtcggagtgataggagcctcgggctcctcagtgtctataatggtggccaatatcttgaggttattccagatccctcaaatctcttatgcttctacagctccagagctgagtgacgataggcggtatgatttcttcagtagggtcgtccctcccgattcctttcaagcacaggcgatggtggatattgtgaaagcattgggctggaactacgtgtctacgctcgctagcgaaggaagctacggcgagaagggggtggaatctttcacccagatatcgaaagaggccggtggtctgtgtatcgctcagagtgtcaggatcccacaggaaagaaaggacaggaccatcgatttcgacagaattatcaaacagctgctagacactcctaatagcagagccgtagtcatctttgcgaatgacgaagatattaagcagattctcgccgctgcgaaacgggcagaccaagtcggacattttctgtgggttggctcagacagctggggttctaagatcaatccgctgcaccagcacgaagatatagctgaaggggcaatcacaatccagcctaagagagcaaccgtggagggatttgacgcctacttcactagccgaactctggagaataatcggagaaatgtctggtttgccgaatactgggaggagaatttcaattgcaagctgactatctcaggctctaagaaagaggatacagacagaaaatgtacaggccaggaacgaattgggaaggattccaactacgagcaggaaggcaaggtgcagtttgtgatcgatgccgtgtacgccatggcgcacgccttgcatcatatgaataaagacttatgtgccgactatcggggagtctgcccagaaatggaacaggccggtgggaagaagctgcttaaatacatcagaaatgtcaactttaatgggagtgccggaaccccggtgatgttcaacaaaaatggtgacgcccctggaagatatgatatttttcagtatcagaccaccaatacctctaaccctgggtatagattgattggccaatggaccgatgagctccagttgaatatcgaggacatgcagtggggaaaaggggtgagggaaattcctgcatcagtgtgcactttgccctgtaaaccaggccagaggaagaagacccagaagggtaccccttgctgctggacttgcgaaccttgcgacgggtaccagtatcagtttgacgagatgacctgtcagcactgcccctatgatcagcgtcccaatgaaaatcgtaccggctgtcaggacatccccattatcaagctggagtggcattctccctgggccgtgatcccggtgttcctggcaatgctgggaattatagccacaatctttgtgatggcaacgttcattcggtataatgacactcctatcgttcgcgctagcggacgagagctttcctacgtcctgttgaccggtatcttcctgtgctatatcattacctttttaatgatagccaaacccgacgtagctgtttgctcattccgcagagtcttcctgggcctaggaatgtgcatatcatacgcagcgttattgacaaagacaaaccgtatttacaggatcttcgagcaaggaaagaagtccgtcacagcccctagactaatttcaccaacctcccagctggcaatcacgtccagtttaatctctgttcaactgctaggcgtgtttatttggtttggtgttgatcccccaaatattatcatcgactacgacgagcacaagacaatgaatcccgagcaggcacgcggtgtcctgaagtgtgatatcacggatctccagattatctgtagtctcggatactcgatccttcttatggtaacttgcaccgtatatgctatcaaaacccgcggtgtcccggaaaacttcaacgaggctaagccaataggattcactatgtacacaacatgtattgtatggttggccttcatccctatcttcttcggcaccgcccagtctgccgaaaaactctatattcagaccaccaccctaaccatcagtatgaatctgagtgcctctgttgccctgggaatgttatacatgcctaaagtgtacattattatcttccacccagaacttaacgtgcagaagagaaaaaggtcatttaaggctgtggtgaccgcagccaccatgtcttctcgactgagccacaaaccatctgaccgcccaaatggagaggctaagacggaattgtgcgaaaacgttgacccaaacattttttttttcgggtgtactgttgagctcggcctgcactttaagctgacctttagccggaaccagtccaacctgtag

SEQ ID NO: 255902 - DNA, 2769 bp, Artificial Sequence
  derived and/or modified sequence
atggtgcagctgagaaagctgctgagagtgctgaccctgatgaagttcccctgctgcgtgctggaggtgctgctgtgcgccctggccgccgccgccagaggccaggagatgtacgccccccacagcatcagaatcgagggcgacgtgaccctgggcggcctgttccccgtgcacgccaagggccccagcggcgtgccctgcggcgacatcaagagagagaacggcatccacagactggaggccatgctgtacgccctggaccagatcaacagcgaccccaacctgctgcccaacgtgaccctgggcgccagaatcctggacacctgcagcagagacacctacgccctggagcagagcctgaccttcgtgcaggccctgatccagaaggacaccagcgacgtgagatgcaccaacggcgagccccccgtgttcgtgaagcccgagaaggtggtgggcgtgatcggcgccagcggcagcagcgtgagcatcatggtggccaacatcctgagactgttccagatcccccagatcagctacgccagcaccgcccccgagctgagcgacgacagaagatacgacttcttcagcagagtggtgccccccgacagcttccaggcccaggccatggtggacatcgtgaaggccctgggctggaactacgtgagcaccctggccagcgagggcagctacggcgagaagggcgtggagagcttcacccagatcagcaaggaggccggcggcctgtgcatcgcccagagcgtgagaatcccccaggagagaaaggacagaaccatcgacttcgacagaatcatcaagcagctgctggacacccccaacagcagagccgtggtgatcttcgccaacgacgaggacatcaagcagatcctggccgccgccaagagagccgaccaggtgggccacttcctgtgggtgggcagcgacagctggggcagcaagatcaaccccctgcaccagcacgaggacatcgccgagggcgccatcaccatccagcccaagagagccaccgtggagggcttcgacgcctacttcaccagcagaaccctggagaacaacagaagaaacgtgtggttcgccgagtactgggaggagaacttcaactgcaagctgaccatcagcggcagcaagaaggaggacaccgacagaaagtgcaccggccaggagagaatcggcaaggacagcaactacgagcaggagggcaaggtgcagttcgtgatcgacgccgtgtacgccatggcccacgccctgcaccacatgaacaaggacctgtgcgccgactacagaggcgtgtgccccgagatggagcaggccggcggcaagaagctgctgaagtacatcagaaacgtgaacttcaacggcagcgccggcacccccgtgatgttcaacaagaacggcgacgcccccggcagatacgacatcttccagtaccagaccaccaacaccagcaaccccggctacagactgatcggccagtggaccgacgagctgcagctgaacatcgaggacatgcagtggggcaagggcgtgagagagatccccgccagcgtgtgcaccctgccctgcaagcccggccagagaaagaagacccagaagggcaccccctgctgctggacctgcgagccctgcgacggctaccagtaccagttcgacgagatgacctgccagcactgcccctacgaccagagacccaacgagaacagaaccggctgccaggacatccccatcatcaagctggagtggcacagcccctgggccgtgatccccgtgttcctggccatgctgggcatcatcgccaccatcttcgtgatggccaccttcatcagatacaacgacacccccatcgtgagagccagcggcagagagctgagctacgtgctgctgaccggcatcttcctgtgctacatcatcaccttcctgatgatcgccaagcccgacgtggccgtgtgcagcttcagaagagtgttcctgggcctgggcatgtgcatcagctacgccgccctgctgaccaagaccaacagaatctacagaatcttcgagcagggcaagaagagcgtgaccgcccccagactgatcagccccaccagccagctggccatcaccagcagcctgatcagcgtgcagctgctgggcgtgttcatctggttcggcgtggacccccccaacatcatcatcgactacgacgagcacaagaccatgaaccccgagcaggccagaggcgtgctgaagtgcgacatcaccgacctgcagatcatctgcagcctgggctacagcatcctgctgatggtgacctgcaccgtgtacgccatcaagaccagaggcgtgcccgagaacttcaacgaggccaagcccatcggcttcaccatgtacaccacctgcatcgtgtggctggccttcatccccatcttcttcggcaccgcccagagcgccgagaagctgtacatccagaccaccaccctgaccatcagcatgaacctgagcgccagcgtggccctgggcatgctgtacatgcccaaggtgtacatcatcatcttccaccccgagctgaacgtgcagaagagaaagagaagcttcaaggccgtggtgaccgccgccaccatgagcagcagactgagccacaagcccagcgacagacccaacggcgaggccaagaccgagctgtgcgagaacgtggaccccaacaactgcatcccccccgtgagaaagagcgtgcagaagagcgtgacctggtacaccatcccccccaccgtgtag

SEQ ID NO: 255903 - DNA, 2736 bp, Artificial Sequence
  derived and/or modified sequence
atggtgcagctgagaaagctgctgagagtgctgaccctgatgaagttcccctgctgcgtgctggaggtgctgctgtgcgccctggccgccgccgccagaggccaggagatgtacgccccccacagcatcagaatcgagggcgacgtgaccctgggcggcctgttccccgtgcacgccaagggccccagcggcgtgccctgcggcgacatcaagagagagaacggcatccacagactggaggccatgctgtacgccctggaccagatcaacagcgaccccaacctgctgcccaacgtgaccctgggcgccagaatcctggacacctgcagcagagacacctacgccctggagcagagcctgaccttcgtgcaggccctgatccagaaggacaccagcgacgtgagatgcaccaacggcgagccccccgtgttcgtgaagcccgagaaggtggtgggcgtgatcggcgccagcggcagcagcgtgagcatcatggtggccaacatcctgagactgttccagatcccccagatcagctacgccagcaccgcccccgagctgagcgacgacagaagatacgacttcttcagcagagtggtgccccccgacagcttccaggcccaggccatggtggacatcgtgaaggccctgggctggaactacgtgagcaccctggccagcgagggcagctacggcgagaagggcgtggagagcttcacccagatcagcaaggaggccggcggcctgtgcatcgcccagagcgtgagaatcccccaggagagaaaggacagaaccatcgacttcgacagaatcatcaagcagctgctggacacccccaacagcagagccgtggtgatcttcgccaacgacgaggacatcaagcagatcctggccgccgccaagagagccgaccaggtgggccacttcctgtgggtgggcagcgacagctggggcagcaagatcaaccccctgcaccagcacgaggacatcgccgagggcgccatcaccatccagcccaagagagccaccgtggagggcttcgacgcctacttcaccagcagaaccctggagaacaacagaagaaacgtgtggttcgccgagtactgggaggagaacttcaactgcaagctgaccatcagcggcagcaagaaggaggacaccgacagaaagtgcaccggccaggagagaatcggcaaggacagcaactacgagcaggagggcaaggtgcagttcgtgatcgacgccgtgtacgccatggcccacgccctgcaccacatgaacaaggacctgtgcgccgactacagaggcgtgtgccccgagatggagcaggccggcggcaagaagctgctgaagtacatcagaaacgtgaacttcaacggcagcgccggcacccccgtgatgttcaacaagaacggcgacgcccccggcagatacgacatcttccagtaccagaccaccaacaccagcaaccccggctacagactgatcggccagtggaccgacgagctgcagctgaacatcgaggacatgcagtggggcaagggcgtgagagagatccccgccagcgtgtgcaccctgccctgcaagcccggccagagaaagaagacccagaagggcaccccctgctgctggacctgcgagccctgcgacggctaccagtaccagttcgacgagatgacctgccagcactgcccctacgaccagagacccaacgagaacagaaccggctgccaggacatccccatcatcaagctggagtggcacagcccctgggccgtgatccccgtgttcctggccatgctgggcatcatcgccaccatcttcgtgatggccaccttcatcagatacaacgacacccccatcgtgagagccagcggcagagagctgagctacgtgctgctgaccggcatcttcctgtgctacatcatcaccttcctgatgatcgccaagcccgacgtggccgtgtgcagcttcagaagagtgttcctgggcctgggcatgtgcatcagctacgccgccctgctgaccaagaccaacagaatctacagaatcttcgagcagggcaagaagagcgtgaccgcccccagactgatcagccccaccagccagctggccatcaccagcagcctgatcagcgtgcagctgctgggcgtgttcatctggttcggcgtggacccccccaacatcatcatcgactacgacgagcacaagaccatgaaccccgagcaggccagaggcgtgctgaagtgcgacatcaccgacctgcagatcatctgcagcctgggctacagcatcctgctgatggtgacctgcaccgtgtacgccatcaagaccagaggcgtgcccgagaacttcaacgaggccaagcccatcggcttcaccatgtacaccacctgcatcgtgtggctggccttcatccccatcttcttcggcaccgcccagagcgccgagaagctgtacatccagaccaccaccctgaccatcagcatgaacctgagcgccagcgtggccctgggcatgctgtacatgcccaaggtgtacatcatcatcttccaccccgagctgaacgtgcagaagagaaagagaagcttcaaggccgtggtgaccgccgccaccatgagcagcagactgagccacaagcccagcgacagacccaacggcgaggccaagaccgagctgtgcgagaacgtggaccccaacatcaccagcgaggacctgagcctgcacaaggaggactag

SEQ ID NO: 255904 - DNA, 2475 bp, Artificial Sequence
  derived and/or modified sequence
atggtgcagctgagaaagctgctgagagtgctgaccctgatgaagttcccctgctgcgtgctggaggtgctgctgtgcgccctggccgccgccgccagaggccaggagatgtacgccccccacagcatcagaatcgagggcgacgtgaccctgggcggcctgttccccgtgcacgccaagggccccagcggcgtgccctgcggcgacatcaagagagagaacggcatccacagactggaggccatgctgtacgccctggaccagatcaacagcgaccccaacctgctgcccaacgtgaccctgggcgccagaatcctggacacctgcagcagagacacctacgccctggagcagagcctgaccttcgtgcaggccctgatccagaaggacaccagcgacgtgagatgcaccaacggcgagccccccgtgttcgtgaagcccgagaaggtggtgggcgtgatcggcgccagcggcagcagcgtgagcatcatggtggccaacatcctgagactgttccagatcccccagatcagctacgccagcaccgcccccgagctgagcgacgacagaagatacgacttcttcagcagagtggtgccccccgacagcttccaggcccaggccatggtggacatcgtgaaggccctgggctggaactacgtgagcaccctggccagcgagggcagctacggcgagaagggcgtggagagcttcacccagatcagcaaggaggccggcggcctgtgcatcgcccagagcgtgagaatcccccaggagagaaaggacagaaccatcgacttcgacagaatcatcaagcagctgctggacacccccaacagcagagccgtggtgatcttcgccaacgacgaggacatcaagcagatcctggccgccgccaagagagccgaccaggtgggccacttcctgtgggtgggcagcgacagctggggcagcaagatcaaccccctgcaccagcacgaggacatcgccgagggcgccatcaccatccagcccaagagagccaccgtggagggcttcgacgcctacttcaccagcagaaccctggagaacaacagaagaaacgtgtggttcgccgagtactgggaggagaacttcaactgcaagctgaccatcagcggcagcaagaaggaggacaccgacagaaagtgcaccggccaggagagaatcggcaaggacagcaactacgagcaggagggcaaggtgcagttcgtgatcgacgccgtgtacgccatggcccacgccctgcaccacatgaacaaggacctgtgcgccgactacagaggcgtgtgccccgagatggagcaggccggcggcaagaagctgctgaagtacatcagaaacgtgaacttcaacggcgacgccggcacccccgtgatgttcaacaagaacggcgacgcccccggcagatacgacatcttccagtaccagaccaccaacaccagcaaccccggctacagactgatcggccagtggaccgacgagctgcagctgaacatcgaggacatgcagtggggcaagggcgtgagagagatccccgccagcgtgtgcaccctgccctgcaagcccggccagagaaagaagacccagaagggcaccccctgctgctggacctgcgagccctgcgacggctaccagtaccagttcgacgagatgacctgccagcactgcccctacgaccagagacccaacgagaacagaaccggctgccaggacatccccatcatcaagctggagtggcacagcccctgggccgtgatccccgtgttcctggccatgctgggcatcatcgccaccatcttcgtgatggccaccttcatcagatacaacgacacccccatcgtgagagccagcggcagagagctgagctacgtgctgctgaccggcatcttcctgtgctacatcatcaccttcctgatgatcgccaagcccgacgtggccgtgtgcagcttcagaagagtgttcctgggcctgggcatgtgcatcagctacgccgccctgctgaccaagaccaacagaatctacagaatcttcgagcagggcaagaagagcgtgaccgcccccagactgatcagccccaccagccagctggccatcaccagcagcctgatcagcgtgcagctgctgggcgtgttcatctggttcggcgtggacccccccaacatcatcatcgactacgacgagcacaagaccatgaaccccgagcaggccagaggcgtgctgaagtgcgacatcaccgacctgcagatcatctgcagcctgggctacagcatcctgctgatggtgacctgcaccgtgtacgccatcaagaccagaggcgtgcccgagaacttcaacgaggccaagcccatcggcttcaccatgtacaccacctgcatcgtgtggctggccttcatccccatcttcttcggcaccgcccagagcgccgagaaggtgatcctgtgctgcatcagctag

SEQ ID NO: 255905 - DNA, 2775 bp, Artificial Sequence
  derived and/or modified sequence
atggtgcagctgagaaagctgctgagagtgctgaccctgatgaagttcccctgctgcgtgctggaggtgctgctgtgcgccctggccgccgccgccagaggccaggagatgtacgccccccacagcatcagaatcgagggcgacgtgaccctgggcggcctgttccccgtgcacgccaagggccccagcggcgtgccctgcggcgacatcaagagagagaacggcatccacagactggaggccatgctgtacgccctggaccagatcaacagcgaccccaacctgctgcccaacgtgaccctgggcgccagaatcctggacacctgcagcagagacacctacgccctggagcagagcctgaccttcgtgcaggccctgatccagaaggacaccagcgacgtgagatgcaccaacggcgagccccccgtgttcgtgaagcccgagaaggtggtgggcgtgatcggcgccagcggcagcagcgtgagcatcatggtggccaacatcctgagactgttccagatcccccagatcagctacgccagcaccgcccccgagctgagcgacgacagaagatacgacttcttcagcagagtggtgccccccgacagcttccaggcccaggccatggtggacatcgtgaaggccctgggctggaactacgtgagcaccctggccagcgagggcagctacggcgagaagggcgtggagagcttcacccagatcagcaaggaggccggcggcctgtgcatcgcccagagcgtgagaatcccccaggagagaaaggacagaaccatcgacttcgacagaatcatcaagcagctgctggacacccccaacagcagagccgtggtgatcttcgccaacgacgaggacatcaagcagatcctggccgccgccaagagagccgaccaggtgggccacttcctgtgggtgggcagcgacagctggggcagcaagatcaaccccctgcaccagcacgaggacatcgccgagggcgccatcaccatccagcccaagagagccaccgtggagggcttcgacgcctacttcaccagcagaaccctggagaacaacagaagaaacgtgtggttcgccgagtactgggaggagaacttcaactgcaagctgaccatcagcggcagcaagaaggaggacaccgacagaaagtgcaccggccaggagagaatcggcaaggacagcaactacgagcaggagggcaaggtgcagttcgtgatcgacgccgtgtacgccatggcccacgccctgcaccacatgaacaaggacctgtgcgccgactacagaggcgtgtgccccgagatggagcaggccggcggcaagaagctgctgaagtacatcagaaacgtgaacttcaacggcagcgccggcacccccgtgatgttcaacaagaacggcgacgcccccggcagatacgacatcttccagtaccagaccaccaacaccagcaaccccggctacagactgatcggccagtggaccgacgagctgcagctgaacatcgaggacatgcagtggggcaagggcgtgagagagatccccgccagcgtgtgcaccctgccctgcaagcccggccagagaaagaagacccagaagggcaccccctgctgctggacctgcgagccctgcgacggctaccagtaccagttcgacgagatgacctgccagcactgcccctacgaccagagacccaacgagaacagaaccggctgccaggacatccccatcatcaagctggagtggcacagcccctgggccgtgatccccgtgttcctggccatgctgggcatcatcgccaccatcttcgtgatggccaccttcatcagatacaacgacacccccatcgtgagagccagcggcagagagctgagctacgtgctgctgaccggcatcttcctgtgctacatcatcaccttcctgatgatcgccaagcccgacgtggccgtgtgcagcttcagaagagtgttcctgggcctgggcatgtgcatcagctacgccgccctgctgaccaagaccaacagaatctacagaatcttcgagcagggcaagaagagcgtgaccgcccccagactgatcagccccaccagccagctggccatcaccagcagcctgatcagcgtgcagctgctgggcgtgttcatctggttcggcgtggacccccccaacatcatcatcgactacgacgagcacaagaccatgaaccccgagcaggccagaggcgtgctgaagtgcgacatcaccgacctgcagatcatctgcagcctgggctacagcatcctgctgatggtgacctgcaccgtgtacgccatcaagaccagaggcgtgcccgagaacttcaacgaggccaagcccatcggcttcaccatgtacaccacctgcatcgtgtggctggccttcatccccatcttcttcggcaccgcccagagcgccgagaagctgtacatccagaccaccaccctgaccatcagcatgaacctgagcgccagcgtggccctgggcatgctgtacatgcccaaggtgtacatcatcatcttccaccccgagctgaacgtgcagaagagaaagagaagcttcaaggccgtggtgaccgccgccaccatgagcagcagactgagccacaagcccagcgacagacccaacggcgaggccaagaccgagctgtgcgagaacgtggaccccaacatcttcttcttcggctgcaccgtggagctgggcctgcacttcaagctgaccttcagcagaaaccagagcaacctgtag

SEQ ID NO: 255906 - protein, 447 aa, Artificial Sequence
  derived and/or modified sequence
MGLSFFSKHLPIQEGQPWALKTPADIISTVEFNHTGELLATGDKGGRVVIFQREPESKNAPHSQGEYDVYSTFQSHEPEFDYLKSLEIEEKINKIKWLPQQNAAHSLLSTNDKTIKLWKITERDKRPEGYNLKDEEGKLKDLSTVTSLQVPVLKPMDLMVEVSPRRIFANGHTYHINSISVNSDCETYMSADDLRINLWHLAITDRSFNIVDIKPANMEDLTEVITASEFHPHHCNLFVYSSSKGSLRLCDMRAAALCDKHSKLFEEPEDPSNRSFFSEIISSVSDVKFSHSGRYMLTRDYLTVKVWDLNMEARPIETYQVHDYLRSKLCSLYENDCIFDKFECAWNGSDSVIMTGAYNNFFRMFDRNTKRDVTLEASRESSKPRAVLKPRRVCVGGKRRRDDISVDSLDFTKKILHTAWHPAENIIAIAATNNLYIFQDKVNSDMH

SEQ ID NO: 255907 - DNA, 1344 bp, Artificial Sequence
  derived and/or modified sequence
atggggctgtctttcttttctaagcacctgcctatccaggaaggacagccatgggccctaaaaactcccgccgatatcatctcaaccgtggagttcaaccatacaggggaactgctagctacaggcgacaaaggtggcagggtggtgatcttccagagggagcctgagtcaaagaacgcccctcatagccagggggagtatgatgtttatagtacatttcaatcacacgaacccgaatttgactatctgaagtcgttagaaatcgaggagaagatcaacaagatcaagtggctcccccagcagaatgccgcccattctctccttagcaccaatgacaaaactatcaagctatggaagataacagaaagggataagagacccgaagggtacaacctcaaggatgaagaaggcaagctgaaggacctgtcaaccgtgactagtctgcaggtgcctgtgttgaagccaatggacctcatggtggaagtgtcccctcggcgcatcttcgcaaacgggcacacctaccacattaattccatttctgtcaactccgactgcgagacctacatgagtgctgatgacctccgaatcaacctgtggcatctggccattactgataggagctttaacattgtagacatcaagcccgccaacatggaggacctgactgaggtcatcactgccagcgaatttcacccacaccactgcaatcttttcgtctattcgagttcaaagggatctttgcgattgtgtgatatgagggccgcggctctttgcgacaaacactctaagcttttcgaggaacctgaagacccttctaatcgtagcttcttcagcgaaattatttcatcagtgtccgatgtgaagttttctcactccggtaggtacatgttgacacgggactatctgactgtgaaagtgtgggatttgaacatggaggccagacccattgagacttatcaggtgcacgactatctgcggagtaaactgtgcagtttatatgaaaatgattgcatctttgacaagttcgagtgcgcctggaacggctccgactctgtgattatgacaggcgcctacaacaacttcttccgaatgttcgatcggaacacgaagcgagatgtgacactggaagcatctagggagagttctaaaccacgcgccgtcctcaagccaaggcgcgtatgcgtgggcggaaagcggagaagggacgatatctcagtggactcactggatttcacgaagaagatccttcacaccgcttggcatcctgcagaaaatattatcgccattgctgctacgaacaatctgtatattttccaggacaaggtgaattccgatatgcattag

SEQ ID NO: 255908 - DNA, 1344 bp, Artificial Sequence
  derived and/or modified sequence
atgggcctgtccttcttcagcaagcacctgcccatccaggagggccagccctgggccctgaagaccccagctgacatcatcagcacagtggagttcaaccacactggagagctgctggccactggagacaagggcggccgggtggtgatcttccagcgggagcctgagagcaagaatgccccccacagccagggcgagtatgatgtgtacagcaccttccagagccatgagcctgagtttgactacctgaagagcctggagattgaggagaagatcaacaagatcaagtggctgccccagcagaatgctgcccacagcctgctgagcaccaatgacaagaccatcaagctgtggaagatcacagagcgggacaagaggcctgagggctacaacctgaaggatgaggagggcaagctgaaggacctgagcacagtgaccagcctgcaggtgcctgtgctgaagcccatggacctgatggtggaggtgagcccccggcgcatctttgccaacggccacacctaccacatcaacagcatctctgtgaacagcgactgtgagacctacatgtctgcagatgacctgcgcatcaacctgtggcacctggccatcacagaccgctccttcaacatcgtggacatcaagccagccaacatggaggacctgacagaggtgatcacagccagcgagttccacccccaccactgcaacctgtttgtgtacagcagcagcaagggcagcctgcggctgtgtgacatgagagctgctgccctgtgtgacaagcacagcaagctgtttgaggagcctgaggaccccagcaacagaagcttcttcagcgagatcatcagctctgtgtctgatgtgaagttcagccacagcggccgctacatgctgacccgggactacctgactgtgaaggtgtgggacctgaacatggaggcccggcccatcgagacctaccaggtgcatgactacctgcggagcaagctgtgcagcctgtatgaaaatgactgcatctttgacaagtttgaatgtgcctggaatggaagtgacagcgtcatcatgactggagcctacaacaacttcttcaggatgtttgacaggaacaccaagagagatgtgaccctggaggccagccgggagagcagcaagcccagggctgtgctgaagcccaggagagtgtgtgtgggcggcaagagaagaagagatgacatctctgtggacagcctggacttcaccaagaagatcctgcacacagcctggcaccctgctgagaacatcatcgccatcgccgccaccaacaacctgtacatcttccaggacaaggtgaacagcgacatgcactag

SEQ ID NO: 255909 - DNA, 1344 bp, Artificial Sequence
  derived and/or modified sequence
atgggcctgagcttcttcagcaagcacctgcccatccaggagggccaaccatgggccttgaagacaccagcggacatcatcagcacagtggagttcaatcacaccggagagctgctggccacgggagacaagggcggaagggttgtgatatttcagagagaacccgaatcaaaaaacgctccccacagtcaaggggagtatgatgtttattctacgttccagtcacatgagcccgagtttgattacctgaagtcgcttgagattgaggagaaaattaacaaaataaagtggctgccccaacagaatgcagctcattctttgctgagcacaaacgacaaaaccatcaagctttggaagattaccgaacgggataagagacctgagggatataacttaaaagacgaggaaggaaagctcaaggacctttcaacagtaaccagtctgcaggttccggtgcttaaacccatggacctgatggttgaggtgagcccaaggcgcatatttgctaatggacatacctatcacatcaactcaatctctgttaactcggactgcgaaacgtatatgtcagcagatgatctgagaatcaatctctggcatctggccatcaccgacagatcctttaacattgttgacataaaacccgctaacatggaggacctgactgaagtgattaccgcctctgagttccatccccaccactgcaatctgttcgtgtacagttcgagtaagggctccctcagactctgcgatatgagggccgccgccttgtgcgataagcactccaaactctttgaagagccagaggacccctcaaaccggagtttctttagtgagatcatcagttcagtaagtgacgtcaagttctctcattcgggacggtacatgctcacgagagactatctcacggtgaaggtttgggacctgaacatggaagctaggccaatagaaacctatcaggtccacgactaccttcgcagtaagttgtgctcactatacgaaaatgactgcattttcgacaaattcgaatgcgcatggaatggatctgatagtgtaataatgacaggtgcttataataacttttttagaatgttcgatcgcaacactaagagagacgtcacattggaggcctcaagagagagcagcaagcccagagctgtgctgaagccgcgcagggtctgtgttggagggaaacggaggagggacgacatctccgtggacagcctggacttcacaaagaagatcctccatacagcctggcaccccgcggagaatattatcgctatcgctgctactaacaacctctacatattccaggataaggtgaactccgacatgcactag

SEQ ID NO: 255910 - DNA, 1344 bp, Artificial Sequence
  derived and/or modified sequence
atgggtctgtccttcttctcaaagcaccttcccatacaggaggggcagccttgggcattgaaaacccccgctgacataatctcaacagtagagttcaaccatactggtgagctgctggccacaggtgacaagggaggtagggttgtcattttccagcgagagcccgagtctaaaaacgcacctcacagtcagggcgaatatgatgtctattctacattccagtcacacgagcctgagttcgactatttgaagagcttggagatagaggagaaaatcaacaagatcaagtggctaccccagcagaacgcagcacattccctgctaagtactaatgacaagacaatcaagttgtggaagatcactgaaagggacaagcgacccgaaggctacaacctaaaagacgaagagggcaagctgaaagatctgtctaccgtgacgtcactccaagtgcccgtgctcaagccgatggacttgatggttgaagtgtcgccacgtcgcatctttgccaatgggcatacataccacattaactccatttccgtcaatagcgattgtgaaacatacatgtccgcggacgatctaagaatcaatctctggcatctggcaataaccgaccgcagcttcaacattgtcgacatcaaaccagcgaacatggaggacctcaccgaagtaatcactgcatctgagtttcacccccaccactgtaacctgttcgtgtatagttcatccaagggctctctcaggctgtgtgatatgagagccgcagctctctgcgataagcacagtaagctgttcgaagaacccgaggatccctctaatcgcagtttcttttcggaaataatctcctctgtgtcagacgttaagttctcccactcagggaggtatatgcttactagagattacttaaccgtcaaggtttgggacctgaatatggaggcaaggccaatcgaaacataccaagtgcatgactatttgaggagtaagttatgcagtctctatgaaaatgactgcatttttgacaaattcgagtgcgcatggaacggatctgatagtgtaatcatgacaggagcatacaataacttcttcaggatgttcgaccggaatacaaagcgggacgtgaccttggaggcaagccgggaaagcagcaaaccgagagccgtactcaaacccaggcgcgtgtgcgtggggggaaaacgtaggcgagatgacatcagtgtggatagtctggacttcacaaaaaagatcctccacaccgcctggcaccctgccgaaaatatcatcgctattgccgcaactaacaacctgtacattttccaggacaaagtcaatagcgatatgcattag

SEQ ID NO: 255911 - DNA, 4092 bp, Artificial Sequence
  derived and/or modified sequence
acatgcaaaaagtggggcctggagatggggctgtcttttttctccaaacacttgcccatccaggaaggccagccctgggcattgaagactccagctgacatcatctctaccgttgagttcaaccacacgggagagctgctggccacaggtgacaagggcggccgggtcgtcatcttccagcgggaaccagagagtaaaaatgcgccccacagccagggcgaatacgacgtgtacagcactttccagagccacgagccggagtttgactatctcaagagcctggagatagaggagaagatcaacaagatcaagtggctcccacagcagaacgccgcccactcactcctgtccaccaacgataaaactatcaaattatggaagattaccgaacgagataaaaggcccgaaggatacaacctgaaggatgaagaggggaaacttaaggacctgtccacggtgacgtcactgcaggtgccagtgctgaagcccatggatctgatggtggaggtgagccctcggaggatctttgccaatggccacacctaccacatcaactccatctccgtcaacagtgactgcgagacctacatgtcggcggatgacctgcgcatcaacctctggcacctggccatcaccgacaggagcttcaacatcgtggacatcaagccggccaacatggaggaccttacggaggtgatcacagcatctgagttccatccgcaccactgcaacctcttcgtctacagcagcagcaagggctccctgcggctctgcgacatgcgggcagctgccctgtgtgacaagcattccaagctctttgaagagcctgaggaccccagtaaccgctcattcttctcggaaatcatctcctccgtgtccgacgtgaagttcagccacagcggccgctacatgctcacccgggactaccttacagtcaaggtctgggacctgaacatggaggcaagacccatagagacctaccaggtccatgactaccttcggagcaagctctgttccctgtacgagaacgactgcattttcgacaagtttgaatgtgcctggaacgggagcgacagcgtcatcatgaccggggcctacaacaacttcttccgcatgttcgatcggaacaccaagcgggacgtgaccctggaggcctcgagggaaagcagcaagccccgggctgtgctcaagccacggcgcgtgtgcgtggggggcaagcgccggcgtgatgacatcagtgtggacagcttggacttcaccaagaagatcctgcacacggcctggcacccggctgagaacatcattgccatcgccgccaccaacaacctgtacatcttccaggacaaggtaaactctgacatgcactaggtatgtgcagttcccggcccctgccacccagcctcatgcaagtcatccccgacatgaccttcacgaccgcaatgcaaggaggggaagaaagtcacagcactgatgaggacagctgcagaggtggcagtgtgtggacacaggaagtttgggccccctccctgccccagctttcctaggccagaattgtgtttggcagtaattgtctgtttaaaaaaataaaaaggaaaggaagcgttcaccgccacaaatcataaaatggacatgactgtggagtcttacagttcagggttctttcattcacgtcccttcctgtctcggtctgcggtctttaccacatcaataggactttttatgcgtccgggttaatttttcactccagtgcgtcctgttgcagggaccggagctgatgggagctgcttctcccccatgcctcactggtcccagatcagggctccagggacagatgatgagtctcaaacgagccagccaggggttcttttggttataaatggggcaattcgccctgtctcagagctgatgacctcaccgttgttttttggatggtgaattcatgctgagaatttgcagatgcaagctcctctcctaggtcttctgaatgtcttgaaacatcccaggtcccaggtctggtgcggtttcccgagaggagcggagtggggtttgtcttctgtgtgcctgtgtcctcatctgattcacctgccatttgctgagcctctgctgtgtaccaggcgtggtgctcagccctagaggcagttgacttaccctctgcagccctccctgccgcctcacccttcagcattcactgggcaccttcccggagcggacactgactcccatgcacgattttttggaatcttcctcctgactgtgaggtgggtgttcattcatttcctccataaacaccaacttctcgaagcgtgccaggctctgggctggatgctggggataagcgggaacccttaggatcccctctgtccacgagaagaagctgaggctctgagcggatgcacaggtcacccatggcaggtgccgtgcagtggtgtcaggaacccgtccgggtcttcacacaaggttctctccagtccatctcgtgggcggctcatgttagagcgacattcaaatggaaggtttggaaaggaatgcctctgtcttgtgaagtaggacatggcagacttggcgacgacaagggtccaggagaactgagacgcaggatggaagacagagaagaccccccggagctcctcgctctgcttggtggcttcaggagtgtggccctccccaggactccacttcatcctgggcttgcaccctccttgagccaatgcactgaactgcctttgaaaggaaattgcatgttctgaccattttaggatacctttactttaaggaccacacagtcccagaggacacatccctcgggaactctgcccctctgacaatgagggccacagagaaggtggtgtttccatggtagatgctcctgttctggtgataccaaacctgcccacccctctgagtcgtctttgctcatggacttgcagcagagccacgtagtttggcattttgattcagaaagtggggagcagagacccagccaaatccaaactttttttttggttttgttttgttttgttttttacaagatataacataacccaggaaacagacccagctgaggttattctcagtggattacagtatacttttgtgtgtgtaaaagcacaaagtgcatgtgtactcacttctggccatataacatttacacagggaaatggatcattgatttttttttaatcaacgtgaatgaagaatgtttgtttatatatcactataaaatccagttgacctggacagtattatatgtacatatctattctaattaaatttaacaatcaaaggattggattacttttttcccccttgtaaagaggttcgagaatgtggtcaattgtatagatagcgtgttaaagccaaaacccagctctgagggccttacccattacttggatatttgctacgatccatctccctttgtgagtcaaatgttaagagaagaaacttgtatttgcagctagaggttactgtcacatcatagatttaacatttaccatcttcaaagtacaaatcttacatgtccttcaaaaggaggtcttaatacagttcctagttccttacttctgttttaaactttgggtaccaaaccaaaaagaagaaaaaagaaaggaaaagatcttctttgaagaaaagtatgtctctggatccctggaaaataatgatgtccaaagcaaattgtgaagatcaaatgtgtgttaagaaaaggtgtcgaggggagggacaaaaccagaaacggtggaaggaccagtgtaatagtcacagacttgcatcctggctctgcttacatttcctggtactctcgaatgtacgggcgttcacatagtcattgtgaagttgttggggtttttttggttttgtttttaatttagctcttctctgaggacgaagctgttggtggtggtggtggtgggggtggtggtgtgggatacatggtggtcaagttgtcagccctgatcagtttggactctgtaactcataggtgcattctttttttctttggtgtctcacaaattacccaattgttgaataaaactataaatatgttaataccagctttttccaataaaataacaaatgttacatcaaaaacga

SEQ ID NO: 255912 - DNA, 1344 bp, Artificial Sequence
  derived and/or modified sequence
atgggcctgagcttcttcagcaagcacctgcccatccaggagggccagccctgggccctgaagacccccgccgacatcatcagcaccgtggagttcaaccacaccggcgagctgctggccaccggcgacaagggcggcagagtggtgatcttccagagagagcccgagagcaagaacgccccccacagccagggcgagtacgacgtgtacagcaccttccagagccacgagcccgagttcgactacctgaagagcctggagatcgaggagaagatcaacaagatcaagtggctgccccagcagaacgccgcccacagcctgctgagcaccaacgacaagaccatcaagctgtggaagatcaccgagagagacaagagacccgagggctacaacctgaaggacgaggagggcaagctgaaggacctgagcaccgtgaccagcctgcaggtgcccgtgctgaagcccatggacctgatggtggaggtgagccccagaagaatcttcgccaacggccacacctaccacatcaacagcatcagcgtgaacagcgactgcgagacctacatgagcgccgacgacctgagaatcaacctgtggcacctggccatcaccgacagaagcttcaacatcgtggacatcaagcccgccaacatggaggacctgaccgaggtgatcaccgccagcgagttccacccccaccactgcaacctgttcgtgtacagcagcagcaagggcagcctgagactgtgcgacatgagagccgccgccctgtgcgacaagcacagcaagctgttcgaggagcccgaggaccccagcaacagaagcttcttcagcgagatcatcagcagcgtgagcgacgtgaagttcagccacagcggcagatacatgctgaccagagactacctgaccgtgaaggtgtgggacctgaacatggaggccagacccatcgagacctaccaggtgcacgactacctgagaagcaagctgtgcagcctgtacgagaacgactgcatcttcgacaagttcgagtgcgcctggaacggcagcgacagcgtgatcatgaccggcgcctacaacaacttcttcagaatgttcgacagaaacaccaagagagacgtgaccctggaggccagcagagagagcagcaagcccagagccgtgctgaagcccagaagagtgtgcgtgggcggcaagagaagaagagacgacatcagcgtggacagcctggacttcaccaagaagatcctgcacaccgcctggcaccccgccgagaacatcatcgccatcgccgccaccaacaacctgtacatcttccaggacaaggtgaacagcgacatgcactag

SEQ ID NO: 255913 - protein, 265 aa, Artificial Sequence
  derived and/or modified sequence
MAPWSHPSAQLQPVGGDAVSPALMVLLCLGLSLGPRTHVQAGNLSKATLWAEPGSVISRGNSVTIRCQGTLEAQEYRLVKEGSPEPWDTQNPLEPKNKARFSIPSMTEHHAGRYRCYYYSPAGWSEPSDPLELVVTGFYNKPTLSALPSPVVTSGENVTLQCGSRLRFDRFILTEEGDHKLSWTLDSQLTPSGQFQALFPVGPVTPSHRWMLRCYGSRRHILQVWSEPSDLLEIPVSGEEATVFSSTIQGSQTGCGELYRQGSPC

SEQ ID NO: 255914 - DNA, 798 bp, Artificial Sequence
  derived and/or modified sequence
atggcaccttggtcacatcccagtgcacagttgcagcctgtgggaggggatgccgtctctcccgcactgatggtgttgctgtgtctcggcttgtccctgggccctcgcacacacgtgcaagcgggaaatctgagcaaagcaacattatgggctgaacccggatctgtgatcagtagggggaactctgtgaccatcagatgccagggtactcttgaggcacaagaataccggctcgttaaagaaggaagccccgaaccttgggacacccagaatccactcgaaccaaagaataaggccagattctcgattccttcgatgaccgaacatcatgccggtcgctatagatgctattactactcccccgcaggctggtctgaaccttccgatcctttagagttagttgtgaccgggttctacaataaaccaaccctgtcagcacttccaagtccagtagtgacctcaggagaaaatgtgaccctgcagtgtggatcacgccttaggtttgatcggtttattcttacagaagagggggatcacaagctatcttggactctcgattcgcaactgactccctccgggcagttccaagccctgtttccggttggtccggtcacgccaagtcatcggtggatgctcagatgttatggatctagaaggcatatcctgcaggtctggtctgagccttctgacttgctggagatcccagtgtctggcgaggaggccacagtcttcagttctaccatccaaggaagtcagaccgggtgcggcgagttgtacagacaagggagtccgtgctag

SEQ ID NO: 255915 - DNA, 922 bp, Artificial Sequence
  derived and/or modified sequence
tctctgctgatctgagtctgcctgtggcatggacctgcatcttccctgaagcatctccagggctgaaaaatcactgaccatggcaccatggtctcatccatctgcacagctgcagccagtgggaggagacgccgtgagccctgccctcatggttctgctctgcctcgggctgagtctgggccccaggacccacgtgcaggcagggaacctctccaaagccaccctctgggctgagccaggctctgtgatcagccgggggaactctgtgaccatccggtgtcaggggaccctggaggcccaggaataccgtctggttaaagagggaagcccagaaccctgggacacacagaacccactggagcccaagaacaaggccagattctccatcccatccatgacagagcaccatgcagggagataccgctgttactactacagccctgcaggctggtcagagcccagcgaccccctggagctggtggtgacaggattctacaacaaacccaccctctcagccctgcccagtcctgtggtgacctcaggagagaacgtgaccctccagtgtggctcacggctgagattcgacaggttcattctgactgaggaaggagaccacaagctctcctggaccttggactcacagctgacccccagtgggcagttccaggccctgttccctgtgggccctgtgacccccagccacaggtggatgctcagatgctatggctctcgcaggcatatcctgcaggtatggtcagaacccagtgacctcctggagattccggtctcaggtgaggaagccacagtcttctctagtacaattcagggaagccagacaggttgtggagagctttacaggcagggcagcccctgctaagaaagacaaaaaggggaaggagaacacagaaatcctagggacaca

SEQ ID NO: 255916 - DNA, 798 bp, Artificial Sequence
  derived and/or modified sequence
atggccccatggtcccacccatccgctcagcttcaacctgtgggtggcgacgctgtctctccagctctcatggtacttctttgccttggcctgtcactgggcccgcgcactcacgttcaggctggtaatctgagtaaagcaaccctctgggcagagcccgggtccgtgatctcccggggaaattcagtcacaattagatgtcaaggtacgctggaagctcaggagtatcggctggtgaaagaggggtcgcccgaaccctgggatactcaaaatccactagagccaaaaaataaggcacgcttctcaattcccagcatgactgagcaccacgctgggcggtatcgctgctactactattccccagccggctggtctgaaccttccgacccattagagttggtggttacggggttttacaacaaaccaactctgagtgcattaccctcgcccgtggttacttccggcgaaaacgtgaccctgcagtgtggttccagactgaggtttgatcgctttatcttgacagaagaaggcgaccataaattgtcttggactctagattcacagctgacgccatcaggacagtttcaggccctatttccggtcggtcccgtcacaccctcacaccgctggatgctgcgttgctacggctctcgtcgccatattctccaagtttggagtgaacccagtgacctcctggaaataccggtgagcggcgaagaggccactgtattctccagcactatccagggctcgcagacaggttgcggagaactgtatcgtcaggggagcccttgttag

SEQ ID NO: 255917 - DNA, 798 bp, Artificial Sequence
  derived and/or modified sequence
atggcaccttggtctcatccatccgcccaactgcaacctgtgggaggagacgccgtctcacccgccctgatggtcctactctgtctgggactctccctgggaccccggacacatgtgcaggccgggaacctctccaaagcaaccttgtgggctgagcccggttctgttatctcccgcggtaacagcgttactatccgatgccagggtacactcgaagcacaggagtatcgattggtgaaagagggttcccctgaaccttgggatacccagaatcccctcgagccaaagaacaaagctcgttttagcatcccatcgatgacagagcaccacgcaggtcgttacagatgctactactactcccccgccggttggagtgaaccttcagaccccctggaactagttgtgacagggttctataacaaaccaacactttctgcactgcctagcccagtcgtcacttccggcgagaacgtaacattgcaatgcggctctagactgcggttcgatcgatttattctgactgaggagggtgatcataaattgtcctggactcttgactctcaactcaccccatcggggcagttccaagcgctttttcccgtgggtccagtgacaccgagccacagatggatgctccggtgctatggatcacgtcgccacattttacaggtttggtcggagccctcagacctattagaaatccccgtctccggcgaagaggccacagtgttttccagtacgattcagggaagtcagactggctgtggtgagctctacaggcaaggatccccatgttag

SEQ ID NO: 255918 - DNA, 798 bp, Artificial Sequence
  derived and/or modified sequence
atggccccctggagccaccccagcgcccagctgcagcccgtgggcggcgacgccgtgagccccgccctgatggtgctgctgtgcctgggcctgagcctgggccccagaacccacgtgcaggccggcaacctgagcaaggccaccctgtgggccgagcccggcagcgtgatcagcagaggcaacagcgtgaccatcagatgccagggcaccctggaggcccaggagtacagactggtgaaggagggcagccccgagccctgggacacccagaaccccctggagcccaagaacaaggccagattcagcatccccagcatgaccgagcaccacgccggcagatacagatgctactactacagccccgccggctggagcgagcccagcgaccccctggagctggtggtgaccggcttctacaacaagcccaccctgagcgccctgcccagccccgtggtgaccagcggcgagaacgtgaccctgcagtgcggcagcagactgagattcgacagattcatcctgaccgaggagggcgaccacaagctgagctggaccctggacagccagctgacccccagcggccagttccaggccctgttccccgtgggccccgtgacccccagccacagatggatgctgagatgctacggcagcagaagacacatcctgcaggtgtggagcgagcccagcgacctgctggagatccccgtgagcggcgaggaggccaccgtgttcagcagcaccatccagggcagccagaccggctgcggcgagctgtacagacagggcagcccctgctag

SEQ ID NO: 255919 - DNA, 798 bp, Artificial Sequence
  derived and/or modified sequence
atggcgccttggagtcacccatcagcccagctgcaacctgtcgggggtgatgcagtgtctcctgctttgatggttctgctgtgtcttgggctaagcttgggcccaagaacacacgtacaagcaggcaatctgagtaaagcaactctgtgggcagaaccaggctcagtaatttctcgaggaaacagtgttaccattagatgccaaggcacattagaggctcaggaatatcgactcgttaaggagggatcaccagagccctgggacacccaaaatcctctcgaaccaaaaaacaaagcccgattttccatcccatctatgactgaacatcatgccgggcgttacaggtgttattactactcccccgctggctggtccgagccaagcgatccgcttgaactcgtggtgaccggtttctataacaagccaaccctgtccgcacttccttcccccgtcgtcacctctggggaaaacgtaacgctgcagtgtggatccagacttcggttcgatcggttcatcctcactgaagaaggggaccacaagctgtcctggacgttagattctcagctcaccccgtcggggcagtttcaagctctgttccccgtgggccctgtgacaccatctcacagatggatgctaagatgttacggctcgcgccgccatattctccaggtctggtcagagccctctgatcttctcgagatcccggtctccggggaggaagccactgttttcagttctaccatacagggaagccagaccggatgcggggagctttatcgccaagggtcaccttgttag

SEQ ID NO: 255920 - DNA, 798 bp, Artificial Sequence
  derived and/or modified sequence
atggccccctggagccaccccagcgcccagctgcagcctgtgggcggagatgctgtgtccccagccctgatggtgctgctgtgcctgggcctgagcctgggccccaggacccacgtgcaggccggcaacctgagcaaggccaccctgtgggccgagcccggcagcgtcatcagccggggcaacagcgtgaccatccgctgccagggcaccctggaggcccaggagtaccgcctggtgaaggagggcagccctgagccctgggacacccagaaccccctggagcccaagaacaaggcccgcttcagcatccccagcatgacagagcaccacgccggccgctaccgctgctactactacagccctgctggctggagcgagcccagcgaccccctggagctggtggtgacaggcttctacaacaagcccaccctgagcgccctgcccagccctgtggtgaccagcggggagaatgtgaccctgcagtgtggcagccggctgcgctttgaccgcttcatcctgacagaggagggggaccacaagctgtcctggaccctggacagccagctgacccccagcggccagttccaggccctcttccctgtgggccctgtgacccccagccaccgctggatgctgcgctgctacggcagccgccgccacatcctgcaggtgtggagcgagcccagcgacctgctggagatccctgtgtctggagaggaggccaccgtcttcagcagcaccatccagggcagccagacaggctgtggggagctgtaccggcagggcagcccctgctag

SEQ ID NO: 255921 - DNA, 798 bp, Artificial Sequence
  derived and/or modified sequence
atggccccctggagccaccccagcgcccagctgcagcccgtgggcggcgacgcggtctccccagcactgatggttctgctgtgcctggggttaagtctgggtccaaggacgcatgttcaagccggaaacctcagcaaagctacgctgtgggcggaacctggttctgttatttctcggggaaacagcgtgacgatacggtgccagggaacactggaggcgcaagaatatcgcttggtcaaagagggctccccagagccatgggatactcagaatccacttgaaccaaagaataaggcaaggttctctattccatccatgactgaacatcatgcagggcgctacagatgttactactactcccctgctggctggtctgagcctagcgaccccctcgaacttgtcgtgaccggattctacaataagcctacattaagtgctctgccctcccccgtggtaacgtccggggaaaatgtgaccctgcagtgcgggtccagacttcgattcgaccggtttatcctaacagaagaaggcgaccacaagctgtcctggacactggattcccagcttacccctagcggccagttccaggcattgttcccagtgggaccagtcaccccaagccatcgttggatgcttagatgttacggctctcgcaggcacattttacaagtgtggagcgagcccagtgacttacttgaaattcctgtatcgggggaagaggcaaccgtgttcagttctaccatccagggcagtcaaaccggctgcggggagttgtaccgtcaggggtctccatgttag

SEQ ID NO: 255922 - RNA, 798 nt, Artificial Sequence
  derived and/or modified sequence
auggccccauggucccacccauccgcucagcuucaaccuguggguggcgacgcugucucuccagcucucaugguacuucuuugccuuggccugucacugggcccgcgcacucacguucaggcugguaaucugaguaaagcaacccucugggcagagcccggguccgugaucucccggggaaauucagucacaauuagaugucaagguacgcuggaagcucaggaguaucggcuggugaaagaggggucgcccgaacccugggauacucaaaauccacuagagccaaaaaauaaggcacgcuucucaauucccagcaugacugagcaccacgcugggcgguaucgcugcuacuacuauuccccagccggcuggucugaaccuuccgacccauuagaguuggugguuacgggguuuuacaacaaaccaacucugagugcauuacccucgcccgugguuacuuccggcgaaaacgugacccugcagugugguuccagacugagguuugaucgcuuuaucuugacagaagaaggcgaccauaaauugucuuggacucuagauucacagcugacgccaucaggacaguuucaggcccuauuuccggucggucccgucacacccucacaccgcuggaugcugcguugcuacggcucucgucgccauauucuccaaguuuggagugaacccagugaccuccuggaaauaccggugagcggcgaagaggccacuguauucuccagcacuauccagggcucgcagacagguugcggagaacuguaucgucaggggagcccuuguuag

SEQ ID NO: 255923 - RNA, 798 nt, Artificial Sequence
  derived and/or modified sequence
auggcaccuuggucucauccauccgcccaacugcaaccugugggaggagacgccgucucacccgcccugaugguccuacucugucugggacucucccugggaccccggacacaugugcaggccgggaaccucuccaaagcaaccuugugggcugagcccgguucuguuaucucccgcgguaacagcguuacuauccgaugccaggguacacucgaagcacaggaguaucgauuggugaaagaggguuccccugaaccuugggauacccagaauccccucgagccaaagaacaaagcucguuuuagcaucccaucgaugacagagcaccacgcaggucguuacagaugcuacuacuacucccccgccgguuggagugaaccuucagacccccuggaacuaguugugacaggguucuauaacaaaccaacacuuucugcacugccuagcccagucgucacuuccggcgagaacguaacauugcaaugcggcucuagacugcgguucgaucgauuuauucugacugaggagggugaucauaaauuguccuggacucuugacucucaacucaccccaucggggcaguuccaagcgcuuuuucccguggguccagugacaccgagccacagauggaugcuccggugcuauggaucacgucgccacauuuuacagguuuggucggagcccucagaccuauuagaaauccccgucuccggcgaagaggccacaguguuuuccaguacgauucagggaagucagacuggcuguggugagcucuacaggcaaggauccccauguuag

SEQ ID NO: 255924 - protein, 148 aa, Artificial Sequence
  derived and/or modified sequence
MALKRINKELSDLARDPPAQCSAGPVGDDMFHWQATIMGPNDSPYQGGVFFLTIHFPTDYPFKPPKVAFTTRIYHPNINSNGSICLDILRSQWSPALTISKVLLSICSLLCDPNPDDPLVPEIARIYKTDRDKYNRLAREWTEKYAML

SEQ ID NO: 255925 - protein, 78 aa, Artificial Sequence
  derived and/or modified sequence
MALKRINKELSDLARDPPAQCSAGPVGDDMFHWQATIMGPNDSPYQGGVFFLTIHFPTDYPFKPPKVAFTTRIYHPNI

SEQ ID NO: 255926 - protein, 96 aa, Artificial Sequence
  derived and/or modified sequence
MALKRINKELSDLARDPPAQCSAGPVGDDMFHWQATIMGPNDSPYQGGVFFLTIHFPTDYPFKPPKVAFTTRIYHPNINSNGSICLDILRSQWSPA

SEQ ID NO: 255927 - DNA, 447 bp, Artificial Sequence
  derived and/or modified sequence
atggccctgaagagaatcaacaaggagctgagcgacctggccagagacccccccgcccagtgcagcgccggccccgtgggcgacgacatgttccactggcaggccaccatcatgggccccaacgacagcccctaccagggcggcgtgttcttcctgaccatccacttccccaccgactaccccttcaagccccccaaggtggccttcaccaccagaatctaccaccccaacatcaacagcaacggcagcatctgcctggacatcctgagaagccagtggagccccgccctgaccatcagcaaggtgctgctgagcatctgcagcctgctgtgcgaccccaaccccgacgaccccctggtgcccgagatcgccagaatctacaagaccgacagagacaagtacaacagactggccagagagtggaccgagaagtacgccatgctgtag

SEQ ID NO: 255928 - DNA, 447 bp, Artificial Sequence
  derived and/or modified sequence
atggccctgaagcgtattaacaaggagctttcggatctcgcccgggacccaccagcgcagtgctcagccgggcccgtgggtgatgacatgttccattggcaggccaccataatggggccaaacgattccccttatcagggcggagtgttctttctgacaattcatttcccgacggattatccatttaagccaccaaaagtggcctttaccacccgtatctaccacccgaacataaactcgaatggcagtatttgtctagatatcctgcggagtcagtggagtccggctctgacaataagtaaggtcctgctgtccatctgctctttgctgtgtgacccaaacccagatgacccattggtgcccgagattgccaggatttataaaacagatagagataaatataataggctggcgcgggagtggactgaaaagtacgctatgctttag

SEQ ID NO: 255929 - DNA, 447 bp, Artificial Sequence
  derived and/or modified sequence
atggccctgaagaggatcaacaaggagctgagtgacctggcccgggaccccccagcccagtgcagcgctggccctgtgggagatgacatgttccactggcaggccaccatcatgggccccaatgacagcccctaccagggcggcgtcttcttcctgaccatccacttccccacagactaccccttcaagccacccaaggtggccttcaccacccgcatctaccaccccaacatcaacagcaatggcagcatctgcctggacatcctgcggagccagtggagccctgccctgaccatcagcaaggtgctgctgagcatctgcagcctgctgtgtgaccccaacccagatgaccccctggtgcctgagatcgcccgcatctacaagacagaccgggacaagtacaaccggctggcccgggagtggacagagaagtatgccatgctgtag

SEQ ID NO: 255930 - DNA, 447 bp, Artificial Sequence
  derived and/or modified sequence
atggccctgaagcggatcaacaaggagctgagcgacctggcccgggacccgcccgctcagtgttctgccggacctgtgggcgacgacatgtttcactggcaggcaaccatcatgggacccaatgattccccatatcaggggggcgtgtttttcttgactattcacttcccaaccgattacccatttaagccacccaaggtggccttcaccacaaggatttaccaccccaatatcaacagtaacggtagcatttgtctggatatcctgaggtcacagtggtcccccgcgttaacgatctctaaggtgctgctttctatttgcagcctgctgtgcgatccaaacccggacgatcccctggtgcctgagatcgcacggatctataaaaccgatagggacaaatataacagactggcccgcgagtggaccgagaagtacgccatgctctag

SEQ ID NO: 255931 - DNA, 447 bp, Artificial Sequence
  derived and/or modified sequence
atggctctcaagagaataaataaggaattgagcgacttggccagagacccgcctgcccagtgcagcgccggtcctgttggcgacgatatgttccattggcaagctactattatgggcccaaacgattctccctaccaaggcggtgtgttcttcctgacaattcacttccctaccgactaccccttcaagccccctaaagtcgcctttacaactaggatctaccaccctaacataaattccaacggatctatctgcctggacatcctccgctctcagtggagccctgctctcacaatcagcaaggtgctcctgtcaatctgtagcctgctatgcgatcctaaccctgatgacccactggttccggaaatcgccaggatatataaaacggaccgggacaagtataataggcttgccagagagtggaccgagaagtacgcaatgctctag

SEQ ID NO: 255932 - DNA, 2389 bp, Artificial Sequence
  derived and/or modified sequence
agaatagctcgctgcgaggatagcaatacacatcaagtctcccttcctttatttccttccttttcccggccgcacctttggacagaaaccgaaagcagcccggcgtccgtccggagtcttatgcttccccctccccccttgcctttctttgccctagtgacgccggtatagcgccgactaggccccggctcctcctctgctgggctccggaccctgccccgcacccacccctttctcctacgcctcttcctctcccacccgggtctcttcctttctagaggccgggaagttaaacttgtagccaccacctccgctcttcccgtcaccctcgcccccacttcgggccgaaagcacggtacagaggctgttggtggctttgccacgccaccccacccaccccggatcgcggctgtcttaagggacctggattcatcaggggctcttcggggcctgtgcgagtgctgatctgctccgtttttgcaaaaggcgcctgtgtctggcagagctggtgtgagacgagacaatcctgccccgccgccgggataatcaagagttttggccggacctttgagcatacaccgagagagtgaggagccagacgacaagcacacactatggcgctgaaacggattaataaggaacttagtgatttggcccgtgaccctccagcacaatgttctgcaggtccagttggggatgatatgtttcattggcaagccacaattatgggacctaatgacagcccatatcaaggcggtgtattctttttgacaattcattttcctacagactaccccttcaaaccacctaaggttgcatttacaacaagaatttatcatccaaatattaacagtaatggcagcatttgtctcgatattctaagatcacagtggtcgcctgctttaacaatttctaaagttcttttatccatttgttcactgctatgtgatccaaacccagatgaccccctagtgccagagattgcacggatctataaaacagacagagataagtacaataggttagcaagagagtggacagagaaatacgctatgttgtagggtacaacagaatatctcgggaatggactcagaagtatgccatgtgatgctaccttaaagtcagaataacctgcattatagctggaataaactttaaattactgttccttttttgattttcttatccggctgctcccctatcagacctcatcttttttaattttattttttgtttacctccctccattcattcacatgctcatctgagaagacttaagttcttccagctttggacaataactgcttttagaaactgtaaagtagttacaagagaacagttgcccaagactcagaatttttaaaaaaaaaaatggagcatgtgtattatgtggccaatgtcttcactctaacttggttatgagactaaaaccattcctcactgctctaacatgctgaagaaatcatctgagggggagggagatggatgctcagttgtcacatcaaaggatacagcattattctagcagcatccattcttgtttaagccttccactgttagagatttgaggttacatgatatgctttatgctcataactgatgtggctggagaattggtattgaatttatagcatcagcagaacagaaaatgtgatgtattttatgcatgtcaataaaggaatgacctgttcttgttctacagagaatggaaattggaagtcaaacaccctttgtattccaaaatagggtctcaaacattttgtaattttcatttaaattgttaggaggcttggagctattagttaatctatcttccaatacactgtttaatatagcactgaataaatgatgcaagttgtcaatggatgagtgatcaactaatagctctgctagtaattgatttatttttcttcaataaagttgcataaaccaatgagttagctgcctggattaatcagtatgggaaacaatcttttgtaaatgcaaagctgttttttgtatatactgttgggatttgcttcattgtttgacatcaaatgatgatgtaaagttcgaaagagtgaatattttgccatgttcagttaaagtgcacagtctgttacaggttgacacattgcttgacctgatttatgcagaattaataagctatttggatagtgtagctttaatgtgctgcacatgatactggcagccctagagttcatagatggacttttgggacccagcagttttgaaatgtgtttatggagtttaagaaatttattttccaggtgcagcccctgtctaactgaaatttctcttcaccttgtacacttgacagctgaaaaaaaacaacatgggagtaataatgggtcaaaatttgcaaaataaagtactgttttggtgtggg

SEQ ID NO: 255933 - protein, 149 aa, Artificial Sequence
  derived and/or modified sequence
MLSNRKCLSKELSDLARDPPAQCSAGPVGDDMFHWQATIMGPNDSPYQGGVFFLTIHFPTDYPFKPPKVAFTTRIYHPNINSNGSICLDILRSQWSPALTISKVLLSICSLLCDPNPDDPLVPEIARIYKTDRDKYNRISREWTQKYAM

SEQ ID NO: 255934 - DNA, 450 bp, Artificial Sequence
  derived and/or modified sequence
atgctgagcaacagaaagtgcctgagcaaggagctgagcgacctggccagagacccccccgcccagtgcagcgccggccccgtgggcgacgacatgttccactggcaggccaccatcatgggccccaacgacagcccctaccagggcggcgtgttcttcctgaccatccacttccccaccgactaccccttcaagccccccaaggtggccttcaccaccagaatctaccaccccaacatcaacagcaacggcagcatctgcctggacatcctgagaagccagtggagccccgccctgaccatcagcaaggtgctgctgagcatctgcagcctgctgtgcgaccccaaccccgacgaccccctggtgcccgagatcgccagaatctacaagaccgacagagacaagtacaacagaatcagcagagagtggacccagaagtacgccatgtag

SEQ ID NO: 255935 - DNA, 450 bp, Artificial Sequence
  derived and/or modified sequence
atgcttagcaaccggaaatgtctgtcgaaggagttatcggatttggctcgagatccccctgctcagtgttcagcaggccccgtcggcgacgacatgtttcactggcaggccactatcatgggcccaaatgattccccatatcagggaggtgtgttctttctgacaatacacttccccacagactatccatttaagccaccgaaggtcgcattcaccactagaatctaccacccaaatattaacagcaacgggagcatctgcctcgacatattgcggtcccaatggtctcctgccctgacaatctcaaaagtattactgtcaatctgttctctcctctgtgatccaaaccccgatgatccattagtccccgaaatagcccgaatatataagacagatcgggacaagtataataggatttcacgcgaatggacccagaaatatgccatgtag

SEQ ID NO: 255936 - DNA, 450 bp, Artificial Sequence
  derived and/or modified sequence
atgctgagcaacaggaagtgcctgagcaaggagctgagtgacctggcccgggaccccccagcccagtgcagcgctggccctgtgggagatgacatgttccactggcaggccaccatcatgggccccaatgacagcccctaccagggcggcgtcttcttcctgaccatccacttccccacagactaccccttcaagccacccaaggtggccttcaccacccgcatctaccaccccaacatcaacagcaatggcagcatctgcctggacatcctgcggagccagtggagccctgccctgaccatcagcaaggtgctgctgagcatctgcagcctgctgtgtgaccccaacccagatgaccccctggtgcctgagatcgcccgcatctacaagacagaccgggacaagtacaaccgcatcagccgggagtggacccagaagtatgccatgtag

SEQ ID NO: 255937 - DNA, 450 bp, Artificial Sequence
  derived and/or modified sequence
atgctgagcaaccggaagtgcctgagcaaggagctgagcgacctggcccgtgacccacccgctcagtgctccgctggtccggttggcgatgacatgttccattggcaggcaaccattatgggccctaacgatagcccttaccagggaggcgtgttttttctgacaatccatttccccactgattaccccttcaaaccaccaaaggtggcgtttacaacgcgaatttaccacccaaatataaattccaatggctctatctgtctggacatcttgcgcagtcagtggtctccagccctgacgatttccaaagttctgctgtcaatttgctcccttctttgcgacccaaatccagatgacccccttgttccagagatcgctcggatttacaaaaccgatcgtgacaagtataacagaatctcacgtgagtggacacagaaatatgctatgtag

SEQ ID NO: 255938 - DNA, 450 bp, Artificial Sequence
  derived and/or modified sequence
atgttgtcaaatcggaagtgtctcagcaaagaactttccgacctggctcgcgacccacctgcacagtgcagcgccggaccagtgggcgatgatatgttccactggcaggccaccatcatggggccaaatgacagcccctatcagggtggcgtgttttttctgaccatccacttcccaacagattatcctttcaagcctcccaaggttgcattcaccacacggatttatcatcccaatatcaattctaacggatcaatctgcctggatatcttaaggagccagtggagtccagccttgacgatatcaaaagtgctcctctccatctgttcgctgctgtgcgacccaaatcctgatgatccactggtaccagagatcgccagaatttacaaaacggaccgggataaatataatcggattagcagggaatggacacaaaagtacgcaatgtag

SEQ ID NO: 255939 - DNA, 660 bp, Artificial Sequence
  derived and/or modified sequence
cgcggcggactgccgaggcgcgggaactggcgggtagcgaggccctcctcggaatctcgtgtgaaggtggccctcctcttgggcctttaacgtctgtagatgctggagaccagcagaaaggatactgtgtgcgatgagataagcatgtgagaatgctttctaaccgaaagtgcctttcaaaagaacttagtgatttggcccgtgaccctccagcacaatgttctgcaggtccagttggggatgatatgtttcattggcaagccacaattatgggacctaatgacagcccatatcaaggcggtgtattctttttgacaattcattttcctacagactaccccttcaaaccacctaaggttgcatttacaacaagaatttatcatccaaatattaacagtaatggcagcatttgtctcgatattctaagatcacagtggtcgcctgctttaacaatttctaaagttcttttatccatttgttcactgctatgtgatccaaacccagatgaccccctagtgccagagattgcacggatctataaaacagacagagataagtacaacagaatatctcgggaatggactcagaagtatgccatgtgatgctaccttaaagtcagaataacctgcattatagctggaataaactttaaattactgt

SEQ ID NO: 255940 - protein, 529 aa, Artificial Sequence
  derived and/or modified sequence
MMIKETSLRRDPDLRGELAFLARGCDFVLPSRFKKRLKSFQQTQIQNKPEKKPGTPLPPPATSPSSPRPLSPVPHVNNVVNAPLSINIPRFYFPEGLPDTCSNHEQTLSRIETAFMDIEEQKADIYEMGKIAKVCGCPLYWKAPMFRAAGGEKTGFVTAQSFIAMWRKLLNNHHDDASKFICLLAKPNCSSLEQEDFIPLLQDVVDTHPGLTFLKDAPEFHSRYITTVIQRIFYTVNRSWSGKITSTEIRKSNFLQTLALLEEEEDINQITDYFSYEHFYVIYCKFWELDTDHDLYISQADLSRYNDQASSSRIIERIFSGAVTRGKTIQKEGRMSYADFVWFLISEEDKRNPTSIEYWFRCMDVDGDGVLSMYELEYFYEEQCERMEAMGIEPLPFHDLLCQMLDLVKPAVDGKITLRDLKRCRMAHIFYDTFFNLEKYLDHEQRDPFAVQKDVENDGPEPSDWDRFAAEEYETLVAEESAQAQFQEGFEDYETDEPASPSEFGNKSNKILSASLPEKCGKLQSVDEE

SEQ ID NO: 255941 - DNA, 1590 bp, Artificial Sequence
  derived and/or modified sequence
atgatgatcaaggagaccagcctgagaagagaccccgacctgagaggcgagctggccttcctggccagaggctgcgacttcgtgctgcccagcagattcaagaagagactgaagagcttccagcagacccagatccagaacaagcccgagaagaagcccggcacccccctgcccccccccgccaccagccccagcagccccagacccctgagccccgtgccccacgtgaacaacgtggtgaacgcccccctgagcatcaacatccccagattctacttccccgagggcctgcccgacacctgcagcaaccacgagcagaccctgagcagaatcgagaccgccttcatggacatcgaggagcagaaggccgacatctacgagatgggcaagatcgccaaggtgtgcggctgccccctgtactggaaggcccccatgttcagagccgccggcggcgagaagaccggcttcgtgaccgcccagagcttcatcgccatgtggagaaagctgctgaacaaccaccacgacgacgccagcaagttcatctgcctgctggccaagcccaactgcagcagcctggagcaggaggacttcatccccctgctgcaggacgtggtggacacccaccccggcctgaccttcctgaaggacgcccccgagttccacagcagatacatcaccaccgtgatccagagaatcttctacaccgtgaacagaagctggagcggcaagatcaccagcaccgagatcagaaagagcaacttcctgcagaccctggccctgctggaggaggaggaggacatcaaccagatcaccgactacttcagctacgagcacttctacgtgatctactgcaagttctgggagctggacaccgaccacgacctgtacatcagccaggccgacctgagcagatacaacgaccaggccagcagcagcagaatcatcgagagaatcttcagcggcgccgtgaccagaggcaagaccatccagaaggagggcagaatgagctacgccgacttcgtgtggttcctgatcagcgaggaggacaagagaaaccccaccagcatcgagtactggttcagatgcatggacgtggacggcgacggcgtgctgagcatgtacgagctggagtacttctacgaggagcagtgcgagagaatggaggccatgggcatcgagcccctgcccttccacgacctgctgtgccagatgctggacctggtgaagcccgccgtggacggcaagatcaccctgagagacctgaagagatgcagaatggcccacatcttctacgacaccttcttcaacctggagaagtacctggaccacgagcagagagaccccttcgccgtgcagaaggacgtggagaacgacggccccgagcccagcgactgggacagattcgccgccgaggagtacgagaccctggtggccgaggagagcgcccaggcccagttccaggagggcttcgaggactacgagaccgacgagcccgccagccccagcgagttcggcaacaagagcaacaagatcctgagcgccagcctgcccgagaagtgcggcaagctgcagagcgtggacgaggagtag

SEQ ID NO: 255942 - DNA, 1590 bp, Artificial Sequence
  derived and/or modified sequence
atgatgatcaaagaaaccagtctcagaagagatccggacctgcggggcgagctggccttcctcgccagaggctgtgactttgtgctccctagtcggtttaaaaagaggttaaaaagctttcagcagacgcagatacagaataaaccggagaagaagcctggtacccctctgcccccccctgccacgtcacccagttcaccaagaccgctgagtcccgtcccacatgtgaataatgtcgtcaacgcccctctttctatcaatattccacggttctatttccccgaaggcctgcctgatacatgttctaatcatgagcaaactctatcgagaatcgaaaccgccttcatggatattgaagagcagaaggctgatatatacgagatgggcaagatcgccaaggtctgcgggtgtccactctattggaaggcgcctatgttccgggctgccggaggtgagaaaacaggcttcgttaccgcacaatcctttatcgccatgtggcgtaagctgctgaacaatcaccacgacgatgcatccaagttcatttgcctgctggccaagcctaactgcagttctttagagcaggaagattttatccccctgcttcaggacgtcgtggacacccacccaggacttacttttttaaaagacgcacctgaattccattcccgctacataactaccgtcatccagcgcatcttttacaccgtgaatcggtcttggtccggaaagattacctctaccgagattcgtaaatctaattttctacagaccctcgcacttctggaagaagaagaagacattaaccagataactgactatttctcctacgaacacttctatgtcatctattgcaagttctgggagctggatacggatcatgacctatatatctcacaggcagatttaagtcgttataatgatcaagcctcaagttctcgaataatcgaacggattttctccggagctgtcacacgtggcaaaaccatccagaaagaggggcgcatgtcgtatgcagattttgtttggttcttaatctcagaagaggataaaaggaatccaacatcgatcgaatactggttccggtgcatggacgtcgatggggacggcgtcctttctatgtacgaactcgaatatttctacgaagagcaatgtgagcgaatggaggctatgggtatagagcctctgcctttccatgatcttctgtgccagatgcttgatctggtaaagccagcagtagatgggaaaataacactcagagatctgaaacgatgcaggatggcccatatcttctatgacactttctttaatctggaaaaatatttagaccacgaacagcgggacccattcgctgtccagaaggatgtggaaaatgacggcccggaacctagtgattgggacaggtttgccgctgaggaatatgagactttggtcgctgaggagagtgctcaggctcagtttcaagagggcttcgaagattatgagaccgacgagccagcaagtccatcagaatttgggaacaaaagtaataaaatcctgtccgcaagcctacccgaaaagtgcggtaaactgcagagcgtcgatgaagaatag

SEQ ID NO: 255943 - DNA, 1590 bp, Artificial Sequence
  derived and/or modified sequence
atgatgatcaaggagaccagcctgcggcgggaccctgacctgcggggggagctggccttcctggcccggggctgtgactttgtgctgcccagccgcttcaagaagaggctgaagagcttccagcagacccagatccagaacaagccagagaagaagccaggcacccccctgcccccaccagccaccagccccagcagcccccggcccctgagccctgtgccccacgtgaacaacgtggtgaatgcccccctgagcatcaacatcccccgcttctacttccctgagggcctgcctgacacctgcagcaaccacgagcagaccctgagcagaattgaaacagccttcatggacatcgaggagcagaaggctgacatctatgagatgggcaagatcgccaaggtgtgtggctgccccctgtactggaaggcccccatgttccgggctgctggaggagagaagacaggctttgtgacagcccagagcttcatcgccatgtggaggaagctgctgaacaaccaccatgatgatgccagcaagttcatctgcctgctggccaagcccaactgcagcagcctggagcaggaggacttcatccccctgctgcaggatgtggtggacacccaccctggcctgaccttcctgaaggatgcccctgagttccacagccgctacatcaccaccgtcatccagaggatcttctacacagtgaacagatcctggagcggcaagatcaccagcacagagatcaggaagagcaacttcctgcagaccctggccctgctggaggaggaggaggacatcaaccagatcacagactacttctcctatgagcacttctacgtgatctactgcaagttctgggagctggacacagaccatgacctgtacatcagccaggccgacctgagccgctacaatgaccaggccagcagcagccgcatcatcgagcgcatcttcagcggggctgtgacccggggcaagaccatccagaaggagggccgcatgtcctatgctgactttgtgtggttcctgatcagcgaggaggacaagaggaaccccaccagcattgagtactggttccgctgcatggatgtggatggagatggagtgctgtccatgtatgagctggagtacttctatgaggagcagtgtgagaggatggaggccatgggcatcgagcccctgcccttccatgacctgctgtgccagatgctggacctggtgaagccagctgtggatggcaagatcaccctgcgggacctgaagcgctgcaggatggcccacatcttctatgacaccttcttcaacctggagaagtacctggaccacgagcagagggacccctttgctgtgcagaaggatgtggagaatgatggccctgagcccagcgactgggacagatttgctgctgaggagtatgagaccctggtggccgaggagagcgcccaggcccagttccaggagggctttgaagattatgaaacagatgagcccgccagccccagcgagtttggaaacaagagcaacaagatcctgagcgccagcctgcctgagaagtgtgggaagctgcagagcgtggatgaggagtag

SEQ ID NO: 255944 - DNA, 1590 bp, Artificial Sequence
  derived and/or modified sequence
atgatgatcaaggagaccagcctgcggcgggaccccgacctgcggggagagctggccttcttggcccgggggtgcgattttgtgttaccaagtagatttaagaagcgcctgaagagttttcagcagactcagatccaaaataaacccgaaaagaagcctggcactcccctcccacccccagctacatctccttctagccctagaccattgtcaccagtcccccacgtgaacaacgttgtcaatgcacccctgagtattaatatcccacgattctattttccagagggtctgccggacacctgctcaaaccacgaacagaccctctccaggattgagacagccttcatggacattgaagaacagaaggctgacatatacgagatgggtaagatcgctaaagtgtgcggctgtcccctgtactggaaagctccgatgttccgtgccgctggaggggaaaaaactgggtttgtgactgctcagtccttcattgcaatgtggaggaagcttcttaataaccaccacgacgatgcaagtaagttcatctgtctgctggcaaagccaaactgcagcagccttgagcaggaggacttcatacccctacttcaggatgttgtggacacacaccctgggctcacctttctaaaggacgcccctgaattccactcgcgatacattaccactgtcatccagcgaatcttctatacggtaaaccggtcatggtctggtaagattacctcaacagaaattagaaagtccaattttctgcaaaccctcgcgctgctggaggaagaggaggatatcaatcagattaccgactattttagctatgagcacttctacgtaatatactgcaaattctgggaactggacaccgatcacgacctatacatttcccaggctgatctatctcgatacaacgaccaggcaagctcatccaggattatcgagcgaatattcagcggagcagtcacgaggggcaagaccattcagaaggaaggcaggatgtcttacgctgactttgtttggttcttgatctctgaggaggacaagcgcaatccaacctctatagagtactggtttcgctgtatggatgtcgatggcgacggagtcctctccatgtacgaactggaatacttctacgaagaacagtgcgaaaggatggaagccatgggaatagagcctctgccctttcacgacctgctgtgccaaatgttggacctggttaagccggctgtggacggcaagattacactccgagacctgaaacgctgtagaatggcacatattttttatgatacattttttaacctagaaaaatacctggatcatgagcaacgcgatcctttcgccgttcagaaagacgtagagaatgacggacccgaacccagtgattgggatcgattcgccgccgaggagtatgaaaccctggtggctgaagaaagcgctcaggctcaattccaggaaggatttgaggactacgagaccgacgaacccgcctcccctagtgaattcgggaacaagtccaacaagatactgtccgcttctctgcctgagaagtgcggtaaattacagtctgttgacgaagaatag

SEQ ID NO: 255945 - DNA, 1590 bp, Artificial Sequence
  derived and/or modified sequence
atgatgatcaaggaaacaagcctgcgcagagatcccgacctgcggggagagctggctttcttggccagggggtgcgattttgtgttgccctcaagatttaaaaaacgtttaaagagtttccaacagacccagattcagaacaagccagaaaaaaaaccaggcacacccttgccaccacctgccactagcccgtcttctcccagacccctatctcccgtccctcatgtgaacaatgtggtgaatgcaccacttagtattaacatccctagattttacttcccagaaggcctccccgacacttgttcaaaccatgagcagacgctgtctaggattgagaccgccttcatggatatagaggaacaaaaagccgacatctacgaaatgggaaagatcgccaaggtgtgcggctgtcccctgtactggaaagcacctatgttcagggcagctggaggggaaaaaaccggttttgtgacagcacagtcttttatagctatgtggcgcaaattgttgaataatcaccatgatgatgctagcaaatttatctgcctgctcgccaagcctaattgcagctccctggaacaggaggacttcattcctctcctgcaggacgtagtcgacacacatcccggattaacttttctgaaagacgctcccgaatttcatagccggtatattactaccgtgatccagcggatcttctacaccgtgaacagatcatggagtgggaagattacgtccactgagattcgcaagtccaattttctacagacactggcactgctcgaggaagaggaagatatcaaccagataaccgactatttctcctacgagcacttttacgtgatttactgtaagttttgggagttggacactgatcacgatctgtatatctcccaagccgatctctcaagatataacgatcaggccagcagtagcaggattatcgaacgaatctttagtggagcggtcacacggggaaaaaccattcaaaaagagggtaggatgtcctacgcagacttcgtatggtttctgataagcgaagaggacaaaaggaatcccacgtcaattgaatattggtttaggtgtatggatgttgatggggacggcgtgctctcaatgtatgagcttgaatatttctacgaagaacaatgtgagcggatggaggcaatgggaatcgagcctcttccctttcacgatctcctctgccaaatgttggatctcgtcaaacctgccgtggatggcaagatcactctgagggacctgaagcgatgccggatggcacacatcttttacgacaccttttttaacctggagaaatatttagaccatgaacaaagggacccttttgccgtgcagaaggatgttgagaacgatggacccgagccaagcgactgggatcggttcgccgctgaggaatatgagacactggtagcggaagagagcgcgcaggctcaattccaggagggcttcgaagattatgagactgacgagccagctagccctagcgaattcgggaataaatccaataagattctgagcgcctcattgcccgaaaagtgcggaaagcttcagagcgtggatgaagaatag

SEQ ID NO: 255946 - DNA, 2196 bp, Artificial Sequence
  derived and/or modified sequence
ctttcccagaaggctccatattctcaacatgtgcaggtcaatttgacataaagctaccaacaaggagcaacaggcccactgcaggctgtgtttataacttgaaaattatgagcaggtattgggagccacagactgtatttgggaaccagctgcatgtcaggacaagcatagattgtggtctgtggaggctgggagagcacaatgcttgaatttcatttctttgggagataagaagaaaaaataccttcctacctgacaagattgacaacttgctaaatctgattatcttcagaagtgtgctggacagttgcgaagtaaacatttacttttcaaagatgatgatcaaggaaacatctctacgaagggacccggatttaaggggagagctagctttcctggcaaggggctgtgattttgttctcccttcacggtttaagaagcggctgaagtcatttcagcagacacagattcaaaataaaccagaaaagaaacctggaacaccactcccacctccagccacctctccaagtagtccccgacctctctccccggttccccatgtgaataatgttgtgaatgcgccattgtccataaacattccacggttctactttcctgaaggactcccagatacctgtagtaatcatgaacaaactctaagcagaattgaaactgctttcatggatattgaagaacagaaagcagacatttatgaaatggggaaaattgcaaaggtctgtggctgtcctctctattggaaagcccccatgttcagggctgcagggggagagaagacaggatttgtgacagcacagtcattcattgccatgtggagaaagttgctgaataaccatcatgatgatgcctctaaattcatctgtcttctagcaaagcccaactgcagctctctagaacaggaggatttcatccctctacttcaggatgtggtggatacccaccctggtctcacgttcctgaaagatgctccagaattccactcccgctacatcaccacggttattcagagaatattctacacagtcaacagatcttggagtggaaaaattacttcgacagagataagaaaaagcaactttttgcaaaccctagcacttttggaagaagaggaagatataaaccaaattacagattacttctcctatgaacatttctatgttatttattgtaaattctgggaactagatactgatcacgacctctacatcagccaggccgatctgtctcgatacaatgaccaggcttcatcaagcaggattattgaaaggatattctctggtgcagtaacaaggggaaaaacaatacagaaagagggaagaatgagctatgcagattttgtttggtttttgatctctgaagaagacaaaaggaatcctaccagcattgagtattggttccgctgcatggatgtggatggagacggtgtactctccatgtatgagctggagtacttctatgaggagcagtgtgaacggatggaagccatgggaattgagcccttgccattccatgatttactgtgccagatgcttgacctagtgaagccagctgttgatggcaaaataactctaagagatctgaagaggtgcagaatggctcacatcttctatgacactttctttaatctggagaaatacttagaccatgaacagagagatccctttgcggtccagaaggatgttgagaacgatgggcctgagccctcagactgggaccggtttgccgctgaggagtatgagacgcttgttgcagaggaatctgcccaagcacaattccaggaaggctttgaagattatgaaacagatgaacctgcctctccctctgaatttggaaacaaaagcaataaaatattaagtgcaagccttccagagaaatgtggaaagcttcaatcagtggatgaagaatagctgccggtgtctacaatgaaacgaagatgtgtattttaaatgtttctttcttgtgaagagatgttctcgtttgcatactgctttttaaagactttgatttctccaagtgtgtatcatctgcactaggaactttgtttttaagcaataggtctggatacacatttaacttaggaggctcctccaatttgcctcaaacctcttacggagcttctcctcagaagtggtaccatcgccttccaaagtcagcactctacactcttgaatgtaccaa

SEQ ID NO: 255947 - protein, 213 aa, Artificial Sequence
  derived and/or modified sequence
MDPALAAQMSEAVAEKMLQYRRDTAGWKICREGNGVSVSWRPSVEFPGNLYRGEGIVYGTLEEVWDCVKPAVGGLRVKWDENVTGFEIIQSITDTLCVSRTSTPSAAMKLISPRDFVDLVLVKRYEDGTISSNATHVEHPLCPPKPGFVRGFNHPCGCFCEPLPGEPTKTNLVTFFHTDLSGYLPQNVVDSFFPRSMTRFYANLQKAVKQFHE

SEQ ID NO: 255948 - DNA, 642 bp, Artificial Sequence
  derived and/or modified sequence
atggaccccgccctggccgcccagatgagcgaggccgtggccgagaagatgctgcagtacagaagagacaccgccggctggaagatctgcagagagggcaacggcgtgagcgtgagctggagacccagcgtggagttccccggcaacctgtacagaggcgagggcatcgtgtacggcaccctggaggaggtgtgggactgcgtgaagcccgccgtgggcggcctgagagtgaagtgggacgagaacgtgaccggcttcgagatcatccagagcatcaccgacaccctgtgcgtgagcagaaccagcacccccagcgccgccatgaagctgatcagccccagagacttcgtggacctggtgctggtgaagagatacgaggacggcaccatcagcagcaacgccacccacgtggagcaccccctgtgcccccccaagcccggcttcgtgagaggcttcaaccacccctgcggctgcttctgcgagcccctgcccggcgagcccaccaagaccaacctggtgaccttcttccacaccgacctgagcggctacctgccccagaacgtggtggacagcttcttccccagaagcatgaccagattctacgccaacctgcagaaggccgtgaagcagttccacgagtag

SEQ ID NO: 255949 - DNA, 642 bp, Artificial Sequence
  derived and/or modified sequence
atggatccagctctggccgcccagatgtctgaggccgtcgcggaaaaaatgcttcagtataggcgcgataccgccggatggaagatctgtcgcgagggtaacggcgtgtccgtttcttggcgaccgtctgtcgagttccctggtaacctgtatcggggtgaaggtatcgtctacgggacactggaggaggtgtgggactgcgtcaaacctgccgtaggagggctccgggtcaagtgggacgagaacgtgaccgggttcgagattattcagagtatcaccgacaccctatgtgtgtcccggaccagtaccccatctgccgctatgaagctgatatcgcctcgagattttgtagatctggtcctcgtaaaaaggtatgaagatgggaccatatcctcgaatgcgacacatgtggagcaccctctttgcccccctaaacctggctttgtgagaggcttcaatcatccctgtggatgtttctgtgaacctctcccaggtgagccaacaaagacaaatctcgtcaccttcttccacaccgatctgtcaggttacttgcctcagaacgtggtggacagcttcttccctcgttcgatgacccgcttttacgctaatttacagaaagctgtgaagcaattccacgagtag

SEQ ID NO: 255950 - DNA, 642 bp, Artificial Sequence
  derived and/or modified sequence
atggaccctgccctggccgcccagatgtctgaggccgtggccgagaagatgctgcagtacagaagagacacagctggctggaagatctgccgggagggcaatggagtgtctgtgtcctggaggccttctgtggagttccctggcaacctgtacagaggagagggcatcgtgtatggcaccctggaggaggtgtgggactgtgtgaagccagctgtgggcggcctgcgggtgaagtgggatgaaaatgtgacaggctttgagatcatccagagcatcacagacaccctgtgtgtgtccaggaccagcaccccatctgctgccatgaagctgatcagcccccgggactttgtggacctggtgctggtgaagagatatgaagatggcaccatcagcagcaatgccacccacgtggagcaccccctgtgcccccccaagccaggctttgtgcggggcttcaaccacccctgtggctgcttctgtgagcccctgcccggggagcccaccaagaccaacctggtgaccttcttccacacagacctgagcggctacctgccccagaatgtggtggacagcttcttccccaggtccatgacccgcttctacgccaacctgcagaaggctgtgaagcagttccacgagtag

SEQ ID NO: 255951 - DNA, 642 bp, Artificial Sequence
  derived and/or modified sequence
atggaccccgccctggccgcccagatgagcgaggccgtggccgagaagatgctgcagtacaggagggatactgcaggatggaaaatatgtagagaaggaaacggcgtctccgtgagttggagaccaagcgtggaattcccaggaaacctgtaccgcggagaaggaatcgtgtatggcacgctagaggaggtgtgggactgcgttaagcccgctgtcgggggactccgggtcaagtgggatgagaacgttacgggcttcgagattattcagtcaattacggacaccctctgcgtaagtcggacctccacaccctccgccgctatgaaattaatttctccccgggactttgttgacctcgtgttagttaaacggtacgaggatgggacaatttctagcaatgctacacacgtcgagcatcctttgtgcccccccaaaccgggatttgtccgcggattcaatcacccttgcgggtgcttctgcgaaccactccctggtgagccaaccaagacgaatctggttaccttttttcacacggatctgagcggatatctcccacaaaatgtggtggacagtttcttccccagaagcatgacccggttttacgccaacctgcagaaggcggtcaagcagttccatgagtag

SEQ ID NO: 255952 - DNA, 642 bp, Artificial Sequence
  derived and/or modified sequence
atggaccctgcacttgccgctcagatgtccgaagccgtcgccgagaagatgctgcaataccgtcgggatactgccggatggaaaatctgcagagaagggaatggggtgagtgtctcctggcggccttccgtggaattcccaggaaatctctaccgaggcgaaggcatagtatacggaaccctggaagaagtgtgggactgcgttaagcctgctgtggggggtctgagagtgaagtgggacgagaatgtgactggcttcgagatcattcagtccatcacagacacgctgtgcgtgtcccgaacctccacaccatccgcagcaatgaagctgatctcaccacgggatttcgtggatctagtgttagtcaaaagatacgaggatggcactatatccagcaatgccacacacgtcgaacacccactctgcccccctaagcctggtttcgtccgaggtttcaatcatccttgtggttgtttctgcgagccgctgcccggtgagcccacgaagacaaatcttgtcaccttctttcatacagatctgtccggctacctcccccaaaatgtggtggacagcttttttccacggagcatgactcgcttttatgccaatctacagaaagcagttaaacagttccacgaatag

SEQ ID NO: 255953 - DNA, 4871 bp, Artificial Sequence
  derived and/or modified sequence
cgcagctaagcgcagctcccgacgcaatggacccggcgctggcagcccagatgagcgaggctgtggccgagaagatgctccagtaccggcgggacacagcaggctggaagatttgccgggaaggcaatggagtttcagtttcctggaggccatctgtggagtttccagggaacctgtaccgaggagaaggcattgtatatgggacactagaggaggtgtgggactgtgtgaagccagctgttggaggcctacgagtgaagtgggatgagaatgtgaccggttttgaaattatccaaagcatcactgacaccctgtgtgtaagcagaacctccactccctccgctgccatgaagctcatttctcccagagattttgtggacttggtgctagtcaagagatatgaggatgggaccatcagttccaacgccacccatgtggagcatccgttatgtcccccgaagccaggttttgtgagaggatttaaccatccttgtggttgcttctgtgaacctcttccaggggaacccaccaagaccaacctggtcacattcttccataccgacctcagcggttacctcccacagaacgtggtggactccttcttcccccgcagcatgacccggttttatgccaaccttcagaaagcagtgaagcaattccatgagtaatgctatcgttacttcttggcaaagaactcccgtgactcatcgaggagctccagctgttgggacaccaaggagcctgggagcacgcagaggcctgtgttcactctttggaacaagctgatggactgcgcatctctgagaatgccaaccagaggcggcagcccacccttcctgcctcctgccccactcagggttggcgtgtgatgagccattcatgtgttccaaactccatctgcctgttacccaaacacgcctctcctggcagggtagacccaggcctctaaccatctgacagagactcggcctggacaccatgcgatgcactctggcaccaaggctttatgtgcccatcactctcagagaccacgtttccctgactgtcatagagaatcatcatcgccactgaaaaccaggccctgttgccttttaagcatgtaccgctccctcagtcctgtgctgcagccccccaaatatatttttctgatatagaccttgtatatggctttaatgccgcaaaatatttatttttccttaaaaaaggtgtcaacttggaaataatggtttaaaaacaggataagcattaaggaaaaacactttcaatgtgtcttccatttgatgaatttgtttttctctctttatccccgcaaggtggagtttcatgtcctcggtgaaaccagacagtgtgaatctgttccagcccaaatctgcagcattagggatgagttctcagaagtgattctgaactgagcacgcactcatgtctgcatggggaactctggggagaagagccttccttttctttcccttgggcatttgcctttccttgtcgtcttactgaggcggaggcaggaggtctctgtcttccaggccctggccaggccatcctgccatcaggaaagatggaagagtaggcctccgtctagcagccctggctggaaatcccccctctagatcctgctgcaagactgtacaaactcacaggggccatgtccacccaggcacatcatcagaaccagggagcacagccttgccacctagaaggggcctcagcagccgtgcaactttctttccctatctccaatccagagagggatcctctaacattctctagcaacctcatctgcacccccaccaccttccttgtaagaaagaccacgtgtgactaaaatcccttcacgctgcatttacccaggttactattgtgcgcgcaaaatgttttcacagtgttctcagcctttgctcctccaaacagaaaacgtttcccctgcgttactgttacttccctatttttgagtcctggggtgactgtctcttaaatgtgccaagatgtgagcaagctttaaaacatgacagctcagtgttaaggagacagaaagcttcctctttctctgttctattgcaactacaaattctacagtcatgcctaagatcctttagctaacacccttttcaagaaatcatcagactcttggattgacttagaattcattcattcattaagtgcttaccgagtccccgctctgtggcaagcactgttctatatcaacttctcatgagttcagccaattctaggtgcaccagccaaggaaacttcatgcctgccctctctgagctccatactctgaggtggtggtcttatcaagatgggatcgccttgtacatccctgtgtagccaagtggaaggccagccaaccaagaatgcatctcactgggcctatgggacatactgtgcctgcactgctcctccacgtgactgcatcaggttaaactggtcagagccctggatgaggagctggaaaacatgcatccagtccaagctctgccacttgggccaagtgtgctcttgaacagtcacttaatatatctgctttgatttgtcttttaaagaaaatatggaggcaggaataccagtgtcagtgtagcctgcttcttgagtgttggcacaagtgagataatgtatgaatcagtaaaatgctgggcaaagcaaagaagtagggctgcctgggagtggattcctttttatggtgagttaagacgacttcacaattgttagctgtgatgcctgcagtgtttgaggatggcattgccttcatcctgtgtcagctctgaagaagttggcagagcaaagctaagcctcaagtgtaaatcccagcatcatggaacgcaaatggatgagcttttgttttaggatcttcttgctgattcctacccagaggacttccccagcctagagaccagaaacctgggcaatagttatatcttcagtggccctaggagttgttgtgtctccttggggaggagagaaccttctaaaacaggccagagacaggaggtactgggagggccatgggctcacctgcatctatgcccagataacctgggacagataacctctgtcccaatcacttgctttgcctggtctctcaaggagtctcttggtaccccaggcccacggccagctccatgctcatccctgtccccaccttccagtcttgatgaaaacccaccttctctttcatcccttggctgcttgataagacttaaaacaattccctgattttagggaaggccactgcgtgcacagatggtgagtttgtgcaggcaaggaatgtgccctccacatcacgtggcctccttgcccagcctgggtcatgggaagggagtgttgaattgaatcacgtctttcgttggtagattatgttcatcttcaatgtttctattaagtctaaaaagtggatacaaatggtgcctccaagttcttgtctaattgcttgtctactgcttgacaaaatccagaatggaataggccaaacaagttaaccagcaggacagaaactgctctaagcccattattccttgagatgaatagaacagtgagctgaacgcctgctctaatgaagccactaaaggggtttacaggaaggttaggagcccagatgggttttgagtccactgctgggaaacagattcttcacttcctgtggaccctggagaagccatcagattacattaacatggctccactgatgatggcctgagaattactattgtttgtgtttcatctgtgtccttgccaggtcttcccccacatccttacttcacaggatcaggggctgagaggagaccaatactctggcccaggcctggtcaagggatgctggttgttgctgatgcaaagtcacattgcctggtcctgagcttggcaatcaggcatccagagatggccaaaccaaatatccctttggccaggcactcaggcattccctgtaatgttgtgcacttaaagcatcttgggctgatagtctccaccgaatcacagaagaaaactcaatctgccgcatcactcaccagctggataagccatttactgtacacagtgtgtgccctcttatcaatacattggcacagaaccatacaccgtagaagctgctgtgatcactaaaggcaatgcccgtttagccctgagcacagtgcttggcatgtggtaggtaagtagtagcaattttatttgataccctcatatacacgctggttccttctgtcggcacacctgtccacgctttgagcttggtgcttcacctgtactcctctgtttactggctccaccacccttccctaggattacttctccaatccaaccaaaaacaattttgcaaatgtttcatgtgacaaactgtatttttcataaatgaccccagcaatatttcctctccccttaaacccaggcaggtttgtgtcagctctaactgatggagtatggtggaggtgatgccatgcaacttccaaggcaaaggtataaacaagatgcagcttctacatggctcttgcgatcctgggatgctcatcctgggaatccagacaccatgttgtgaggaggcccaggccacaaggagaggccacctataagcattcaggccagcagccccaggtgagttcccagccaacatcaacggccagatgtatgagtgaatgatctcacgtggtcccagcctttgcatgactttgcatgacgccagctgatgccaagtgggacagagatgagctgcccattccaatctctgcccacattgcagattcatgagaaaaataaatgtcactgtttgggggtgaatcatgacacagttacagtacttgaaacattttgcgaagccaggcatgaatgtcatatgaaattctaataaatccattttatttgtggcaccacaa

SEQ ID NO: 255954 - protein, 287 aa, Artificial Sequence
  derived and/or modified sequence
MAPWSHPSAQLQPVGGDAVSPALMVLLCLGNLSKATLWAEPGSVISRGNSVTIRCQGTLEAQEYRLVKEGSPEPWDTQNPLEPKNKARFSIPSMTEHHAGRYRCYYYSPAGWSEPSDPLELVVTGFYNKPTLSALPSPVVTSGENVTLQCGSRLRFDRFILTEEGDHKLSWTLDSQLTPSGQFQALFPVGPVTPSHRWMLRCYGSRRHILQVWSEPSDLLEIPVSGAADNLSPSQNKSDSGTASHLQDYAVENLIRMGMAGLILVVLGILIFQDWHSQRSPQAAAGR

SEQ ID NO: 255955 - DNA, 864 bp, Artificial Sequence
  derived and/or modified sequence
atggctccttggtcacacccaagcgctcaactgcagccggtggggggagacgctgtgtcacctgcactcatggtgctgctctgtttgggcaatctcagcaaggcgaccctttgggctgagccaggctccgtcatctcccgtggcaattccgtgactatccggtgtcaagggacactggaggctcaggaataccgacttgtgaaggaaggctcccccgagccatgggacacccagaacccccttgaacctaaaaataaggcaagattcagtatcccatccatgacggaacatcacgctggcaggtaccggtgctattattacagccccgcaggatggagcgaaccatcagaccctttggaattggtggttactggcttctataataaacctacactgagtgcattaccgtctcctgtggtgacttctggcgagaatgtgaccctccagtgtggatctcgcctgagattcgacaggtttatcctcaccgaggagggcgaccacaaactgtcctggaccctcgactcgcaattgaccccctcggggcagtttcaggccctcttcccagttggtcctgtcacacccagccaccgctggatgctgcgctgctacggctctcgcagacacatacttcaagtctggagcgaacccagtgaccttctcgagatccctgtctcaggagcagccgacaatctcagtccaagtcagaacaaatcagacagcggtactgcatcacacttgcaggattacgcagtcgaaaacctaatacgcatgggtatggctggtttgattttagtcgtcctgggaatactgatcttccaggattggcattcccagcggtcaccccaggcagcggcaggccgttag

SEQ ID NO: 255956 - DNA, 864 bp, Artificial Sequence
  derived and/or modified sequence
atggcaccctggtcccacccttccgctcagttacaaccagtgggaggcgatgcagttagccccgccctgatggtgttactgtgcctaggaaacctgtcgaaagctactctgtgggccgaaccaggctcagtgatttcacggggaaactccgtcactatccgatgccaaggcaccctcgaagcccaggaatacagattagtcaaggaggggtccccagaaccatgggacacccaaaatcctctggaaccaaaaaacaaagcacggtttagcattcctagcatgactgagcaccatgcaggccgctataggtgttattattattcccccgccggctggagcgaaccaagtgatcctttagagctcgtggtgacgggattttacaacaaacctacacttagcgcgctcccatcaccggtagtgacttcaggagagaacgtaaccctccaatgcggatcgcgcctgagattcgatcggttcatcctgacagaggaaggtgaccacaagctttcgtggacattggattcgcaacttacaccctctggacaattccaggcacttttccctgtcggtcccgtcacacccagtcatcggtggatgctaaggtgctacggctcccggagacatatcttgcaagtttggtcagagccttcggacctgctcgaaataccagttagtggagcagccgacaatctgtccccaagccagaacaaaagtgactccgggactgccagtcaccttcaagactatgccgtggaaaatctgattagaatgggtatggccggacttattctggtagttctgggtattttgatcttccaggactggcatagccagcgctcaccacaggctgctgccggcagatag

SEQ ID NO: 255957 - DNA, 864 bp, Artificial Sequence
  derived and/or modified sequence
atggctccctggtcccacccctctgcgcaattacagccggttggaggagacgcggtgtctcccgcactcatggttctgctatgcttgggcaatctcagtaaggctacactctgggctgagcctgggagtgttatctcccgcggcaattcagttactattagatgccagggcactctcgaagcgcaggaatacagactggttaaagagggatctcccgaaccttgggacactcaaaacccccttgaaccaaagaataaagcccgtttttctatcccttcaatgactgaacatcatgcaggccggtatcgatgctattattactcgccggcaggatggtccgaaccttctgatcctctggaactcgtggtcacaggattttataataagcctacactatccgccctgccaagccccgtcgtgacgtctggtgagaacgtaacacttcagtgtggtagtaggctgagatttgaccggtttatcctgaccgaagagggcgatcacaaactgtcttggactcttgactcacagctgacaccctccggacagttccaagcactgtttcccgtcgggcccgtaactccctcacaccgatggatgctcaggtgctatgggagtagacggcacattctccaggtgtggtcagaaccaagcgatctacttgagatcccagtaagcggagccgcagataatctctccccttcccagaataaatctgacagtggcactgcttcacatctccaggactatgccgtcgagaatctgatcaggatgggaatggctggcctcatccttgtcgtacttggcatcttgatctttcaagattggcattcacaaagaagtccacaagcagccgccggacgctag

SEQ ID NO: 255958 - DNA, 864 bp, Artificial Sequence
  derived and/or modified sequence
atggccccctggagccaccccagcgcccagctgcagcccgtgggcggcgacgccgtgagccccgccctgatggtgctgctgtgcctgggcaacctgagcaaggccaccctgtgggccgagcccggcagcgtgatcagcagaggcaacagcgtgaccatcagatgccagggcaccctggaggcccaggagtacagactggtgaaggagggcagccccgagccctgggacacccagaaccccctggagcccaagaacaaggccagattcagcatccccagcatgaccgagcaccacgccggcagatacagatgctactactacagccccgccggctggagcgagcccagcgaccccctggagctggtggtgaccggcttctacaacaagcccaccctgagcgccctgcccagccccgtggtgaccagcggcgagaacgtgaccctgcagtgcggcagcagactgagattcgacagattcatcctgaccgaggagggcgaccacaagctgagctggaccctggacagccagctgacccccagcggccagttccaggccctgttccccgtgggccccgtgacccccagccacagatggatgctgagatgctacggcagcagaagacacatcctgcaggtgtggagcgagcccagcgacctgctggagatccccgtgagcggcgccgccgacaacctgagccccagccagaacaagagcgacagcggcaccgccagccacctgcaggactacgccgtggagaacctgatcagaatgggcatggccggcctgatcctggtggtgctgggcatcctgatcttccaggactggcacagccagagaagcccccaggccgccgccggcagatag

SEQ ID NO: 255959 - DNA, 864 bp, Artificial Sequence
  derived and/or modified sequence
atggccccttggagccacccttccgctcagctgcaaccagtgggtggggacgccgtctctccggccctcatggtgctgctgtgcctgggtaacctcagtaaagctaccttatgggctgaaccgggcagcgtcatctcgaggggtaactctgtgaccattcgttgtcaagggacactcgaggcccaggagtaccgtctggtgaaggaagggagcccagagccctgggacacccagaacccgctggagcccaagaacaaagcccgcttttctattccgtccatgacagagcatcacgctgggagataccggtgttattattactcaccggccggctggagtgagccaagcgatccactggagttggttgtgaccgggttctacaataaaccaaccctgtcagcactgccgtccccggtagtgacctccggggagaacgtcacgttgcagtgtggttctcggctgagatttgatagattcatcctcacagaagagggagaccacaaattgtcatggacactggactcccaactaacacctagcggccaattccaggctttgttcccggttggtcctgtgacacctagccaccgctggatgttgcgatgctacgggtctaggcgccacatcctgcaagtctggagtgaaccaagcgacctcctggaaatccctgtatctggtgccgcagataatctcagtccttctcaaaacaagtctgattcaggtaccgccagtcacctccaggactacgcggtggagaatctgatcagaatgggaatggcaggactgatcctagtggtcctgggtatcctgatttttcaggactggcattcacagcgatccccgcaggctgctgcaggccgatag

SEQ ID NO: 255960 - DNA, 1080 bp, Artificial Sequence
  derived and/or modified sequence
tggcatggacctgcatcttccctgaagcatctccagggctgaaaaatcactgaccatggcaccatggtctcatccatctgcacagctgcagccagtgggaggagacgccgtgagccctgccctcatggttctgctctgcctcgggaacctctccaaagccaccctctgggctgagccaggctctgtgatcagccgggggaactctgtgaccatccggtgtcaggggaccctggaggcccaggaataccgtctggttaaagagggaagcccagaaccctgggacacacagaacccactggagcccaagaacaaggccagattctccatcccatccatgacagagcaccatgcagggagataccgctgttactactacagccctgcaggctggtcagagcccagcgaccccctggagctggtggtgacaggattctacaacaaacccaccctctcagccctgcccagtcctgtggtgacctcaggagagaacgtgaccctccagtgtggctcacggctgagattcgacaggttcattctgactgaggaaggagaccacaagctctcctggaccttggactcacagctgacccccagtgggcagttccaggccctgttccctgtgggccctgtgacccccagccacaggtggatgctcagatgctatggctctcgcaggcatatcctgcaggtatggtcagaacccagtgacctcctggagattccggtctcaggagcagctgataacctcagtccgtcacaaaacaagtctgactctgggactgcctcacaccttcaggattacgcagtagagaatctcatccgcatgggcatggccggcttgatcctggtggtccttgggattctgatatttcaggattggcacagccagagaagcccccaagctgcagctggaaggtgaacagaagagagaacaatgcaccattgaatgctggagccttggaagcgaatctgatggtcctaggaggttcgggaagaccatctgaggcctatgccatctggactgtctgctggcaatttctttttttctttcttttcttttctttcttttttttttttttt

SEQ ID NO: 255961 - DNA, 864 bp, Artificial Sequence
  derived and/or modified sequence
atggccccctggagccaccccagcgcccagctgcagcctgtgggcggagatgctgtgtccccagccctgatggtgctgctgtgcctgggcaacctgagcaaggccaccctgtgggccgagcccggcagcgtcatcagccggggcaacagcgtgaccatccgctgccagggcaccctggaggcccaggagtaccgcctggtgaaggagggcagccctgagccctgggacacccagaaccccctggagcccaagaacaaggcccgcttcagcatccccagcatgacagagcaccacgccggccgctaccgctgctactactacagccctgctggctggagcgagcccagcgaccccctggagctggtggtgacaggcttctacaacaagcccaccctgagcgccctgcccagccctgtggtgaccagcggggagaatgtgaccctgcagtgtggcagccggctgcgctttgaccgcttcatcctgacagaggagggggaccacaagctgtcctggaccctggacagccagctgacccccagcggccagttccaggccctcttccctgtgggccctgtgacccccagccaccgctggatgctgcgctgctacggcagccgccgccacatcctgcaggtgtggagcgagcccagcgacctgctggagatccctgtgtctggagctgctgacaacctgagccccagccagaacaagagtgacagcggcacagccagccacctgcaggactatgctgtggagaacctgatccgcatgggcatggccggcctcatcctggtggtgctgggcatcctgatcttccaggactggcacagccagaggagcccccaggccgctgctggaagatag

SEQ ID NO: 255962 - DNA, 864 bp, Artificial Sequence
  derived and/or modified sequence
atggccccctggagccaccccagcgcccagctgcagcccgtgggcggagacgccgtttctcctgctctgatggtcctgctgtgcttgggaaatttgtcgaaagccactctatgggccgagcctggatctgtgatttctagaggtaattcagttacaattaggtgtcaaggaacactggaggctcaggaataccgccttgttaaggaaggctctcccgagccatgggacacccagaatcctctcgaacctaagaacaaggcacggttctcaattccttccatgaccgagcaccacgcgggcaggtatcgctgctactactactccccagccggttggtctgagccatcagatcctcttgagttggttgtgaccgggttctataacaagcccacattgagcgctttgccatctccagtggtgacgtctggggaaaacgtgacgctccaatgcggtagcagactgcgctttgataggtttatcctaacagaagaaggcgaccacaaattgagttggaccctggacagtcagctgactccgtcaggacaatttcaggccctgttccctgtggggcccgtgaccccgagccaccgctggatgctgaggtgctatggctcacggcgccatatactgcaggtatggtcggaaccctcagaccttctggaaatacccgtctcaggtgccgctgacaatctgagcccaagtcagaataaatccgattccgggacggcaagccacctgcaggactatgctgtggaaaatcttattagaatgggcatggctggactgattctcgtggtgcttggcatcctcatctttcaggattggcattcacagcgctccccccaggccgccgccggccggtag

SEQ ID NO: 255963 - RNA, 864 nt, Artificial Sequence
  derived and/or modified sequence
auggcacccuggucccacccuuccgcucaguuacaaccagugggaggcgaugcaguuagccccgcccugaugguguuacugugccuaggaaaccugucgaaagcuacucugugggccgaaccaggcucagugauuucacggggaaacuccgucacuauccgaugccaaggcacccucgaagcccaggaauacagauuagucaaggagggguccccagaaccaugggacacccaaaauccucuggaaccaaaaaacaaagcacgguuuagcauuccuagcaugacugagcaccaugcaggccgcuauagguguuauuauuauucccccgccggcuggagcgaaccaagugauccuuuagagcucguggugacgggauuuuacaacaaaccuacacuuagcgcgcucccaucaccgguagugacuucaggagagaacguaacccuccaaugcggaucgcgccugagauucgaucgguucauccugacagaggaaggugaccacaagcuuucguggacauuggauucgcaacuuacacccucuggacaauuccaggcacuuuucccugucggucccgucacacccagucaucgguggaugcuaaggugcuacggcucccggagacauaucuugcaaguuuggucagagccuucggaccugcucgaaauaccaguuaguggagcagccgacaaucuguccccaagccagaacaaaagugacuccgggacugccagucaccuucaagacuaugccguggaaaaucugauuagaauggguauggccggacuuauucugguaguucuggguauuuugaucuuccaggacuggcauagccagcgcucaccacaggcugcugccggcagauag

SEQ ID NO: 255964 - RNA, 864 nt, Artificial Sequence
  derived and/or modified sequence
auggcucccuggucccaccccucugcgcaauuacagccgguuggaggagacgcggugucucccgcacucaugguucugcuaugcuugggcaaucucaguaaggcuacacucugggcugagccugggaguguuaucucccgcggcaauucaguuacuauuagaugccagggcacucucgaagcgcaggaauacagacugguuaaagagggaucucccgaaccuugggacacucaaaacccccuugaaccaaagaauaaagcccguuuuucuaucccuucaaugacugaacaucaugcaggccgguaucgaugcuauuauuacucgccggcaggaugguccgaaccuucugauccucuggaacucguggucacaggauuuuauaauaagccuacacuauccgcccugccaagccccgucgugacgucuggugagaacguaacacuucagugugguaguaggcugagauuugaccgguuuauccugaccgaagagggcgaucacaaacugucuuggacucuugacucacagcugacacccuccggacaguuccaagcacuguuucccgucgggcccguaacucccucacaccgauggaugcucaggugcuaugggaguagacggcacauucuccagguguggucagaaccaagcgaucuacuugagaucccaguaagcggagccgcagauaaucucuccccuucccagaauaaaucugacaguggcacugcuucacaucuccaggacuaugccgucgagaaucugaucaggaugggaauggcuggccucauccuugucguacuuggcaucuugaucuuucaagauuggcauucacaaagaaguccacaagcagccgccggacgcuag

SEQ ID NO: 255965 - protein, 253 aa, Artificial Sequence
  derived and/or modified sequence
MAPWSHPSAQLQPVGGDAVSPALMVLLCLGNLSKATLWAEPGSVISRGNSVTIRCQGTLEAQEYRLVKEGSPEPWDTQNPLEPKNKARFSIPSMTEHHAGRYRCYYYSPAGWSEPSDPLELVVTGFYNKPTLSALPSPVVTSGENVTLQCGSRLRFDRFILTEEGDHKLSWTLDSQLTPSGQFQALFPVGPVTPSHRWMLRCYGSRRHILQVWSEPSDLLEIPVSGEEATVFSSTIQGSQTGCGELYRQGSPC

SEQ ID NO: 255966 - DNA, 762 bp, Artificial Sequence
  derived and/or modified sequence
atggccccttggtctcaccccagcgctcagctccagcctgttggaggcgacgccgttagtccggctctgatggtactgctgtgcttaggaaacctgagtaaagccaccctctgggcggagcccggatccgtgatctcgcggggaaactctgtgaccattagatgtcagggaactctggaagcccaggaatataggcttgtgaaggagggcagccccgagccatgggatactcagaatcccctggagccaaaaaacaaggccaggttttcgattccaagcatgactgagcatcacgctgggagataccggtgctactattatagtcccgctggatggagtgagcctagcgaccccttggagctggtggtgaccgggttctataacaagcctacactgtctgctctcccatctccggttgtgaccagcggcgaaaacgtcaccctccagtgcgggtcccggctaagatttgacagatttatcctaacagaagagggcgatcataagcttagctggactctcgatagccagttgaccccctcggggcagtttcaggctcttttccctgtgggacctgttactccttcacataggtggatgctgcggtgttacggctctaggcgccacatccttcaggtgtggagcgaaccctctgacctgttggaaatccccgttagtggagaggaggcgaccgtcttttcaagtaccatccaaggaagccagacagggtgcggcgagctgtacagacagggtagcccttgctag

SEQ ID NO: 255967 - DNA, 762 bp, Artificial Sequence
  derived and/or modified sequence
atggccccttggtcccacccgagcgcacagctgcagcccgtgggcggtgacgcagtatcgcctgcgcttatggtgctgctttgcctgggcaatctgagtaaggccaccctatgggctgaaccagggagtgtcatctcaagaggtaatagtgtgaccatacggtgccaagggaccctcgaggctcaggaataccggttggttaaagagggatccccagaaccgtgggacacacagaaccccctggaacctaagaataaggcacgcttctcaattccttcaatgactgaacatcacgccggcaggtaccgatgttactattactctcccgctggatggtcagagcctagcgaccccttggaactcgtcgttacaggcttttacaataaaccaacactttcagccctcccatcacccgtggtcactagcggagagaatgtaactttgcagtgtgggagcaggcttagatttgatcgattcattcttacagaggagggggatcacaaactatcttggactctggattcacaactcacacctagtgggcagtttcaggcactgtttcctgtagggccagttacaccatctcaccgatggatgcttagatgctacggtagccgcagacatatcctacaggtctggagcgagccttcagatttgctcgaaatcccggtgtcaggcgaagaggccacggtcttcagctcaaccatccagggcagccagaccggctgcggagaactgtatcgtcaaggctcaccatgctag

SEQ ID NO: 255968 - DNA, 1004 bp, Artificial Sequence
  derived and/or modified sequence
tctctgctgatctgagtctgcctgtggcatggacctgcatcttccctgaagcatctccagggctgaaaaatcactgaccatggcaccatggtctcatccatctgcacagctgcagccagtgggaggagacgccgtgagccctgccctcatggttctgctctgcctcgggaacctctccaaagccaccctctgggctgagccaggctctgtgatcagccgggggaactctgtgaccatccggtgtcaggggaccctggaggcccaggaataccgtctggttaaagagggaagcccagaaccctgggacacacagaacccactggagcccaagaacaaggccagattctccatcccatccatgacagagcaccatgcagggagataccgctgttactactacagccctgcaggctggtcagagcccagcgaccccctggagctggtggtgacaggattctacaacaaacccaccctctcagccctgcccagtcctgtggtgacctcaggagagaacgtgaccctccagtgtggctcacggctgagattcgacaggttcattctgactgaggaaggagaccacaagctctcctggaccttggactcacagctgacccccagtgggcagttccaggccctgttccctgtgggccctgtgacccccagccacaggtggatgctcagatgctatggctctcgcaggcatatcctgcaggtatggtcagaacccagtgacctcctggagattccggtctcaggtgaggaagccacagtcttctctagtacaattcagggaagccagacaggttgtggagagctttacaggcagggcagcccctgctaagaaagacaaaaaggggaaggagaacacagaaatcctagggacacaaattcagggtgaggaaaacaaagcaagggctgggcacagtggctcacacgtgtaatctcagcactttgggaggccgaggcaggtggatcacctgatgtcaggagttcaagaccagcct

SEQ ID NO: 255969 - DNA, 762 bp, Artificial Sequence
  derived and/or modified sequence
atggctccttggtcccacccatcagctcaactccagcccgtcggcggtgacgctgtctctcccgccctcatggttcttttgtgtctcggcaatctcagcaaggcaaccctgtgggcagagcccggttcagttatcagcaggggaaatagcgtaactataagatgtcagggcaccttagaggcgcaagagtacaggctggtcaaggaaggaagtcccgagccctgggacactcagaaccctctcgagcccaagaataaggcgagatttagcatcccatccatgactgaacatcatgccggaaggtaccggtgttactactacagccccgctggctggtccgagcccagtgacccacttgaactggtcgttaccggtttctacaataaacctaccctatctgccctgccgagtcccgtggttacaagcggcgaaaatgtaactctgcaatgtgggagccgtttacgatttgaccgatttattctaaccgaggaaggcgatcataaactgtcatggacactcgactcacagcttacaccatccggtcagttccaggcacttttccctgtaggcccagtcacaccgagccatcgctggatgttgcggtgctatggaagccgcagacacatcttacaagtatggagcgaaccctccgatcttttagaaattccagtaagcggagaagaagctaccgtcttttcatctacaatacagggctctcagaccggatgtggcgagctctatcgccagggaagcccatgctag

SEQ ID NO: 255970 - DNA, 762 bp, Artificial Sequence
  derived and/or modified sequence
atggccccctggagccaccccagcgcccagctgcagcccgtgggcggcgacgccgtgagccccgccctgatggtgctgctgtgcctgggcaacctgagcaaggccaccctgtgggccgagcccggcagcgtgatcagcagaggcaacagcgtgaccatcagatgccagggcaccctggaggcccaggagtacagactggtgaaggagggcagccccgagccctgggacacccagaaccccctggagcccaagaacaaggccagattcagcatccccagcatgaccgagcaccacgccggcagatacagatgctactactacagccccgccggctggagcgagcccagcgaccccctggagctggtggtgaccggcttctacaacaagcccaccctgagcgccctgcccagccccgtggtgaccagcggcgagaacgtgaccctgcagtgcggcagcagactgagattcgacagattcatcctgaccgaggagggcgaccacaagctgagctggaccctggacagccagctgacccccagcggccagttccaggccctgttccccgtgggccccgtgacccccagccacagatggatgctgagatgctacggcagcagaagacacatcctgcaggtgtggagcgagcccagcgacctgctggagatccccgtgagcggcgaggaggccaccgtgttcagcagcaccatccagggcagccagaccggctgcggcgagctgtacagacagggcagcccctgctag

SEQ ID NO: 255971 - DNA, 762 bp, Artificial Sequence
  derived and/or modified sequence
atggctccttggtctcaccccagcgctcagctccagcctgtgggaggcgacgccgtgagcccggccctgatggtgctcctctgtctgggtaatctgtcgaaagctacgttgtgggctgagcctgggagcgtcatttctaggggaaacagtgtgacgattagatgccagggtacgctcgaagctcaggagtacagattggtgaaggaaggcagtcctgaaccctgggacacccaaaacccactggaacctaagaataaggccagatttagcatcccatcaatgactgagcaccatgcaggcagataccggtgctactattactctcccgctggttggtcagagccctctgatccactggagctggttgtgaccggcttttataacaagccaactctctccgctcttcctagccctgtggtgaccagcggcgagaacgtcactctgcagtgcgggagcaggctccggtttgatcgcttcattctaactgaagaaggagaccacaagctgtcctggacactggactctcagctgacacccagtgggcaatttcaggccttgtttcctgtggggccagtcaccccgtcccacagatggatgctcaggtgctacggaagccgtaggcatattttgcaggtgtggagtgagccttccgacctgcttgaaatccccgtgagcggcgaggaggccacggtgttcagttccaccattcagggatctcagaccggctgtggcgaattatatcggcaggggtccccatgctag

SEQ ID NO: 255972 - DNA, 762 bp, Artificial Sequence
  derived and/or modified sequence
atggccccctggagccaccccagcgcccagctgcagcctgtgggcggagatgctgtgtccccagccctgatggtgctgctgtgcctgggcaacctgagcaaggccaccctgtgggccgagcccggcagcgtcatcagccggggcaacagcgtgaccatccgctgccagggcaccctggaggcccaggagtaccgcctggtgaaggagggcagccctgagccctgggacacccagaaccccctggagcccaagaacaaggcccgcttcagcatccccagcatgacagagcaccacgccggccgctaccgctgctactactacagccctgctggctggagcgagcccagcgaccccctggagctggtggtgacaggcttctacaacaagcccaccctgagcgccctgcccagccctgtggtgaccagcggggagaatgtgaccctgcagtgtggcagccggctgcgctttgaccgcttcatcctgacagaggagggggaccacaagctgtcctggaccctggacagccagctgacccccagcggccagttccaggccctcttccctgtgggccctgtgacccccagccaccgctggatgctgcgctgctacggcagccgccgccacatcctgcaggtgtggagcgagcccagcgacctgctggagatccctgtgtctggagaggaggccaccgtcttcagcagcaccatccagggcagccagacaggctgtggggagctgtaccggcagggcagcccctgctag

SEQ ID NO: 255973 - DNA, 762 bp, Artificial Sequence
  derived and/or modified sequence
atggccccctggagccaccccagcgcccagctgcagcccgtgggcggcgatgccgtgagccccgctctgatggttctgttgtgcttgggcaacctatctaaggcaaccctttgggcagagccaggctccgtgatctccagggggaacagcgtgaccatccgctgtcagggaacccttgaggcccaagagtaccggctagtaaaagaggggtctcccgagccatgggacacacagaacccgctcgaaccaaagaacaaagcgaggttcagcatccccagtatgaccgagcatcatgcagggagataccgctgttattactatagccccgctgggtggtctgagccgagtgacccgcttgagttggtggttacaggcttctacaacaagccgaccctctccgccctcccgtcacccgtggtgacatctggggagaatgtgaccttacagtgcggatctagactgcgctttgacaggttcatactcaccgaagagggggaccataagcttagttggactcttgatagtcagctgaccccatctgggcagtttcaggcgctgttccctgtgggcccagtgacaccctcacatcgttggatgctccgttgctatggtagccgacgtcacattctccaggtttggtctgaaccctcagatctacttgagatcccggtttctggcgaagaggccactgtgttttcctccacaatccagggctcacaaacgggctgtggggaactctacagacagggatctccatgctag

SEQ ID NO: 255974 - RNA, 762 nt, Artificial Sequence
  derived and/or modified sequence
auggccccuuggucccacccgagcgcacagcugcagcccgugggcggugacgcaguaucgccugcgcuuauggugcugcuuugccugggcaaucugaguaaggccacccuaugggcugaaccagggagugucaucucaagagguaauagugugaccauacggugccaagggacccucgaggcucaggaauaccgguugguuaaagagggauccccagaaccgugggacacacagaacccccuggaaccuaagaauaaggcacgcuucucaauuccuucaaugacugaacaucacgccggcagguaccgauguuacuauuacucucccgcuggauggucagagccuagcgaccccuuggaacucgucguuacaggcuuuuacaauaaaccaacacuuucagcccucccaucacccguggucacuagcggagagaauguaacuuugcagugugggagcaggcuuagauuugaucgauucauucuuacagaggagggggaucacaaacuaucuuggacucuggauucacaacucacaccuagugggcaguuucaggcacuguuuccuguagggccaguuacaccaucucaccgauggaugcuuagaugcuacgguagccgcagacauauccuacaggucuggagcgagccuucagauuugcucgaaaucccggugucaggcgaagaggccacggucuucagcucaaccauccagggcagccagaccggcugcggagaacuguaucgucaaggcucaccaugcuag

SEQ ID NO: 255975 - RNA, 762 nt, Artificial Sequence
  derived and/or modified sequence
auggcuccuuggucccacccaucagcucaacuccagcccgucggcggugacgcugucucucccgcccucaugguucuuuugugucucggcaaucucagcaaggcaacccugugggcagagcccgguucaguuaucagcaggggaaauagcguaacuauaagaugucagggcaccuuagaggcgcaagaguacaggcuggucaaggaaggaagucccgagcccugggacacucagaacccucucgagcccaagaauaaggcgagauuuagcaucccauccaugacugaacaucaugccggaagguaccgguguuacuacuacagccccgcuggcugguccgagcccagugacccacuugaacuggucguuaccgguuucuacaauaaaccuacccuaucugcccugccgagucccgugguuacaagcggcgaaaauguaacucugcaaugugggagccguuuacgauuugaccgauuuauucuaaccgaggaaggcgaucauaaacugucauggacacucgacucacagcuuacaccauccggucaguuccaggcacuuuucccuguaggcccagucacaccgagccaucgcuggauguugcggugcuauggaagccgcagacacaucuuacaaguauggagcgaacccuccgaucuuuuagaaauuccaguaagcggagaagaagcuaccgucuuuucaucuacaauacagggcucucagaccggauguggcgagcucuaucgccagggaagcccaugcuag

SEQ ID NO: 255976 - protein, 549 aa, Artificial Sequence
  derived and/or modified sequence
MEEEGGSSGGAAGTSADGGDGGEQLLTVKHELRTANLTGHAEKVGIENFELLKVLGTGAYGKVFLVRKISGHDTGKLYAMKVLKKATIVQKAKTTEHTRTERQVLEHIRQSPFLVTLHYAFQTETKLHLILDYINGGELFTHLSQRERFTEHEVQIYVGEIVLALEHLHKLGIIYRDIKLENILLDSNGHVVLTDFGLSKEFVADETERAYSFCGTIEYMAPDIVRGGDSGHDKAVDWWSLGVLMYELLTGASPFTVDGEKNSQAEISRRILKSEPPYPQEMSALAKDLIQRLLMKDPKKRLGCGPRDADEIKEHLFFQKINWDDLAAKKVPAPFKPVIRDELDVSNFAEEFTEMDPTYSPAALPQSSEKLFQGYSFVAPSILFKRNAAVIDPLQFHMGVERPGVTNVARSAMMKDSPFYQHYDLDLKDKPLGEGSFSICRKCVHKKSNQAFAVKIISKRMEANTQKEITALKLCEGHPNIVKLHEVFHDQLHTFLVMELLNGGELFERIKKKKHFSETEASYIMRKLVSAVSHMHDVGVVHRDLKPEV

SEQ ID NO: 255977 - DNA, 1650 bp, Artificial Sequence
  derived and/or modified sequence
atggaggaggagggcggcagcagcggcggcgccgccggcaccagcgccgacggcggcgacggcggcgagcagctgctgaccgtgaagcacgagctgagaaccgccaacctgaccggccacgccgagaaggtgggcatcgagaacttcgagctgctgaaggtgctgggcaccggcgcctacggcaaggtgttcctggtgagaaagatcagcggccacgacaccggcaagctgtacgccatgaaggtgctgaagaaggccaccatcgtgcagaaggccaagaccaccgagcacaccagaaccgagagacaggtgctggagcacatcagacagagccccttcctggtgaccctgcactacgccttccagaccgagaccaagctgcacctgatcctggactacatcaacggcggcgagctgttcacccacctgagccagagagagagattcaccgagcacgaggtgcagatctacgtgggcgagatcgtgctggccctggagcacctgcacaagctgggcatcatctacagagacatcaagctggagaacatcctgctggacagcaacggccacgtggtgctgaccgacttcggcctgagcaaggagttcgtggccgacgagaccgagagagcctacagcttctgcggcaccatcgagtacatggcccccgacatcgtgagaggcggcgacagcggccacgacaaggccgtggactggtggagcctgggcgtgctgatgtacgagctgctgaccggcgccagccccttcaccgtggacggcgagaagaacagccaggccgagatcagcagaagaatcctgaagagcgagcccccctacccccaggagatgagcgccctggccaaggacctgatccagagactgctgatgaaggaccccaagaagagactgggctgcggccccagagacgccgacgagatcaaggagcacctgttcttccagaagatcaactgggacgacctggccgccaagaaggtgcccgcccccttcaagcccgtgatcagagacgagctggacgtgagcaacttcgccgaggagttcaccgagatggaccccacctacagccccgccgccctgccccagagcagcgagaagctgttccagggctacagcttcgtggcccccagcatcctgttcaagagaaacgccgccgtgatcgaccccctgcagttccacatgggcgtggagagacccggcgtgaccaacgtggccagaagcgccatgatgaaggacagccccttctaccagcactacgacctggacctgaaggacaagcccctgggcgagggcagcttcagcatctgcagaaagtgcgtgcacaagaagagcaaccaggccttcgccgtgaagatcatcagcaagagaatggaggccaacacccagaaggagatcaccgccctgaagctgtgcgagggccaccccaacatcgtgaagctgcacgaggtgttccacgaccagctgcacaccttcctggtgatggagctgctgaacggcggcgagctgttcgagagaatcaagaagaagaagcacttcagcgagaccgaggccagctacatcatgagaaagctggtgagcgccgtgagccacatgcacgacgtgggcgtggtgcacagagacctgaagcccgaggtgtag

SEQ ID NO: 255978 - DNA, 1650 bp, Artificial Sequence
  derived and/or modified sequence
atggaagaggaggggggctcaagcggaggagccgcggggaccagcgcagacgggggggacggaggggaacaactgctcactgtgaagcacgaactgaggaccgcaaatctgactggtcacgctgaaaaggtgggaatcgaaaattttgaactgctgaaagtactgggaacgggggcatacgggaaggtcttcctggtgagaaaaataagtggccacgacactggaaagctgtatgctatgaaagtgctcaagaaagctaccatcgtgcagaaagcgaagactaccgaacacaccagaacggaaagacaggtactcgaacacattcgccagtccccctttttggtcacacttcactacgcattccagactgagactaagctgcatttgatcttggattatatcaatggcggagaactctttacccacctgtcccagagggaacgttttaccgagcatgaagtgcagatatacgtaggagagatcgtgctcgcgctcgagcatttgcacaaacttggcatcatttacagggatataaaattggagaacattctcctggattctaacggccacgtggtgcttaccgacttcggcctgagtaaagaattcgttgcggacgagactgagcgggcttattccttttgtggcacaatagaatatatggcacctgacatcgtaaggggaggtgattctggacacgataaagcagttgactggtggtccctgggcgtactgatgtacgagctccttacaggagcctctccatttacagtggacggcgagaagaactcacaagcggaaatatccagaaggattcttaagtctgagccgccttacccccaggagatgtccgccttggctaaagatctgatccaaagattgcttatgaaagaccccaagaaaagactcggctgtggcccccgggatgctgacgaaattaaggagcatctcttctttcagaagatcaattgggatgacctagctgctaagaaagtgccagctccctttaagccagtgatacgcgatgaactcgacgttagcaattttgccgaggaattcaccgaaatggatccaacctatagccctgctgcactgccgcagagttcggaaaagctgttccaaggttacagcttcgtggcaccgtccatcctcttcaagcgtaacgccgcagtaatcgatcccctgcagtttcacatgggtgtcgagcggccaggagtgactaacgtggccaggtcagccatgatgaaggacagccctttctatcagcattatgatttggacttgaaggacaaaccacttggcgagggctccttctccatctgccggaaatgtgtacacaagaagtccaaccaggccttcgcagtgaagattatctcaaagagaatggaagcaaacacacagaaggaaataacagcccttaaattgtgtgagggtcaccccaatatcgtcaagctccatgaagtgtttcacgaccagctccacaccttcttagtgatggagctgctaaacggaggggagctgtttgagcgcattaagaagaagaagcacttttccgagacagaagcatcttatattatgaggaaactggtgagtgccgtgtcgcacatgcatgatgtgggcgtggtgcacagggatctgaagcccgaagtctag

SEQ ID NO: 255979 - DNA, 1650 bp, Artificial Sequence
  derived and/or modified sequence
atggaggaggagggcggcagcagcggcggggccgccggcaccagcgcagatggaggagatggaggagagcagctgctgactgtgaagcatgagctgaggacagccaacctgaccggccatgctgagaaggtgggcattgaaaattttgagctgctgaaggtgctgggcactggagcctacggcaaggtgttcctggtgaggaagatcagcggccatgacaccgggaagctgtatgccatgaaggtgctgaagaaggccaccatcgtgcagaaggccaagaccacagagcacaccaggacagagcggcaggtgctggagcacatccggcagagccccttcctggtgaccctgcactacgccttccagacagagaccaagctgcacctgatcctggactacatcaatggaggagagctgttcacccacctgagccagcgggagcgcttcacagagcacgaggtgcagatctacgtgggggagatcgtgctggccctggagcacctgcacaagctgggcatcatctacagagacatcaagctggagaacatcctgctggacagcaatggccacgtggtgctgacagactttggcctgagcaaggagtttgtggctgatgaaacagagcgggcctacagcttctgtggcaccatcgagtacatggccccagacatcgtgcggggcggggacagcggccatgacaaggctgtggactggtggagcctgggcgtgctgatgtatgagctgctgaccggggccagccccttcaccgtggatggagagaagaacagccaggccgagatcagccgccgcatcctgaagtctgagcccccctacccccaggagatgtctgccctggccaaggacctgatccagaggctgctgatgaaggaccccaagaagaggctgggctgcggccccagagatgctgatgagatcaaggagcacctgttcttccagaagatcaactgggatgacctggccgccaagaaggtgcctgcccccttcaagcctgtgatcagagatgagctggatgtgagcaactttgctgaggagttcacagagatggaccccacctacagccctgctgccctgccccagagcagcgagaagctgttccagggctacagctttgtggcccccagcatcctcttcaagagaaatgctgctgtgattgaccccctgcagttccacatgggcgtggagaggcctggggtgaccaacgtggcccggagcgccatgatgaaggacagccccttctaccagcactatgacctggacctgaaggacaagcccctgggggagggcagcttcagcatctgcaggaaatgtgtgcacaagaagagcaaccaggcctttgctgtgaagatcatcagcaagaggatggaggccaacacccagaaggagatcacagccctgaagctgtgtgagggccaccccaacatcgtgaagctgcacgaggtgttccatgaccagctgcacaccttcctggtgatggagctgctgaatggaggagagctgtttgagcgcatcaagaagaagaagcacttcagcgagacagaggccagctacatcatgaggaagctggtgtctgctgtgagccacatgcatgatgtgggcgtggtgcaccgggacctgaagccagaggtgtag

SEQ ID NO: 255980 - DNA, 1650 bp, Artificial Sequence
  derived and/or modified sequence
atggaggaggagggcggcagcagcggcggcgccgccggcaccagcgcagacggcggggacggcggcgaacagttgctcacagtgaaacatgaactgcggaccgcgaacctcactgggcatgcagagaaagtgggcattgagaactttgagttactgaaggtccttggcacaggagcttacggcaaggtattcttagtgagaaagatctctggtcatgataccggcaagctgtatgccatgaaggtgctgaaaaaggctactatagtgcagaaggctaagacgacagagcatacccgtaccgaacggcaggtccttgagcatattagacagagcccatttcttgtgactctccattatgcttttcagacagaaaccaagctacatctaatcttggactatattaacggtggggaactgttcacacacctgagccagagggaacgcttcactgagcatgaggtccaaatctatgtaggggagatcgtgctggccctcgagcacctgcacaagcttggaataatatatcgggacatcaagcttgagaatatcttgctcgattcaaatggccacgttgtcctgaccgactttgggctgagcaaggagttcgtggccgacgaaactgaacgcgcatattccttctgcgggacaatagagtacatggccccagacatcgtgagaggcggcgatagtgggcacgataaagctgttgattggtggagtctgggagtgctaatgtatgagctacttacaggggcttcaccttttacagtggacggagagaaaaacagtcaggctgaaatttccagacgcattctgaaatccgaacctccttacccacaggagatgtccgctcttgcgaaagacctgatccagagactcctcatgaaagacccaaaaaagagacttggctgcggcccacgggacgccgacgaaattaaggagcacctgttcttccagaaaattaattgggacgatttagccgctaaaaaagtgcctgccccctttaagccagtgatccgagacgaactcgatgtgagcaacttcgccgaggaatttacagaaatggatcccacatactcccctgcagcgctaccacagtcaagcgaaaaactgttccagggatactcgtttgtggcacctagcatcctttttaagcggaacgctgcggtcattgacccactgcaatttcacatgggggtggagagacccggagtgacgaatgtggcccgcagcgctatgatgaaagatagtcccttttatcagcactacgacctcgatcttaaggacaagccacttggtgagggttcattcagtatttgccggaaatgtgtgcataagaaaagcaaccaagcttttgctgttaagataatatcgaagagaatggaggccaatacacagaaagagataactgcactgaaactctgtgaggggcatcctaacatcgtcaaattgcacgaagtgtttcatgatcagctccatacctttttggtgatggagctactcaacggaggcgagctttttgaacggattaagaagaaaaaacattttagtgagaccgaagcaagttacatcatgaggaaactggtttccgctgtgtctcacatgcatgacgtgggcgttgttcacagggacctaaagccagaggtttag

SEQ ID NO: 255981 - DNA, 1650 bp, Artificial Sequence
  derived and/or modified sequence
atggaggaggaaggagggagcagcggaggtgcagccggaaccagcgccgacggaggtgatgggggagaacagctgctaactgttaaacacgagctgcggactgctaatctgaccgggcacgctgagaaagtgggaatcgagaattttgagctgctgaaagtgctggggaccggagcttatggtaaagtgtttctggtccggaagatctctggccacgatacgggaaagttgtacgcaatgaaagttctgaaaaaggccacaatcgtccagaaagcaaagactacagaacatactcgaacagagcgccaggttctggagcatattcgacagtcccctttcctggtgaccctgcactacgcctttcagactgagaccaagctccatttaatcctcgattatatcaatgggggtgaattgttcactcacctttcccagcgtgagcgttttacagagcacgaagtgcagatttatgtgggcgagattgtcctggccttagagcacctgcacaagcttgggatcatctatcgggatatcaagctggaaaacattctgctggactcaaacggccacgtcgtgctcactgacttcggcctgagcaaagagttcgtcgccgatgagaccgaacgggcttactctttctgcggcaccatcgagtatatggcaccagacatcgtcagagggggtgactctggccacgacaaagcagtggattggtggagcctcggtgtgttaatgtatgagctgcttaccggggcatccccgttcaccgtggacggtgaaaagaattcccaggctgagataagcaggcgtatcttgaagagtgagcccccatacccccaagaaatgagcgccctcgctaaggatctcattcagagactgctgatgaaggacccaaagaaaaggctgggttgcggcccacgggacgcagacgagatcaaggaacatctattttttcagaagatcaattgggatgacttagccgcaaaaaaggtgcccgctcccttcaaacccgtcatcagggacgagctagatgtgtccaacttcgccgaggagttcacagagatggatcccacctactctccagcagctctaccacaatcttccgagaagctgttccaggggtattccttcgtagctccgagtattctcttcaagcgaaatgccgcagtcatagatccactccaattccatatgggcgttgagcgaccgggtgtcaccaatgtagctaggtcagccatgatgaaagattcaccattttaccaacattacgatcttgatctgaaggacaagcccctaggagagggttctttctctatctgcagaaaatgtgtccataaaaaaagtaaccaagccttcgcagttaagattatctccaagcgaatggaagctaacactcagaaagagatcaccgctcttaagttgtgtgaggggcaccccaacattgtaaagctgcacgaggtgttccacgatcagttgcatactttcctggtaatggaactgctgaacggaggagagctcttcgagcgaatcaaaaaaaaaaagcacttcagtgaaaccgaagcatcttatatcatgcgaaagctggttagcgccgtatcacacatgcacgatgtcggagtcgtgcacagagacctaaaaccagaggtctag

SEQ ID NO: 255982 - DNA, 2249 bp, Artificial Sequence
  derived and/or modified sequence
gcgagccgtgcggccagagcgggaaagagactcgtctttgcgtccgagttctggagccgccgcaccccgactcctggggccgcggcagcggctgcgaggggacgggcgtccgctgtctcctgggttcccctcgtagcgacccgcgggatcggaaaaaaaggagaagatggaggaggagggtggcagcagcggcggcgccgcggggaccagcgcggacggcggcgacggaggagagcagctcctcactgtcaagcacgagctgcggactgctaatttgacaggacatgctgagaaggtgggaatagaaaattttgagctcctgaaggtcctaggaactggagcttatggaaaagtatttctagttcgtaaaataagtggccatgatactggaaagctgtatgccatgaaagttttgaaaaaggcaacaatcgttcaaaaggccaaaaccacagagcatacaaggacagaacgacaagtcctggaacacattaggcagtcgccatttttggtaacattacattatgctttccagacagaaaccaaacttcatctcattttagattatataaatggtggtgaactttttactcatctttctcaaagagagcgtttcacagagcatgaggtgcagatttatgttggagagattgtgcttgccctcgaacatctccacaagttggggattatatatcgtgatattaagcttgagaatattctacttgattctaatggccatgtggtgctgacagattttggtctgagtaaggagtttgtggctgatgaaactgaaagagcatattccttttgtggaactattgaatacatggcaccagatattgtcagagggggagattcaggacatgacaaggcagttgactggtggagtttgggtgttctaatgtatgaattactaactggagcatctcctttcactgttgatggagaaaaaaattcccaagctgagatatctaggagaatattaaaaagtgagcctccatatccccaagaaatgagtgctttagcgaaagacctaattcagcgtcttttgatgaaagatcccaagaagagattgggatgtggtccacgtgatgcagatgaaatcaaagaacatctcttctttcagaaaataaattgggatgatttagccgccaaaaaagtgcctgcaccatttaagccagtcattcgagatgaattagatgtgagtaactttgcagaagagttcacagaaatggatcccacttattctcccgcagccctgccccagagttctgagaagctgtttcagggctattcctttgttgctccttccatcctattcaagcgtaatgcagctgtcatagaccctcttcagtttcacatgggagttgaacgtcctggagtgacaaatgttgccaggagtgcaatgatgaaggactctccattctatcaacactatgacctagatttgaaggacaaacccctgggagaaggtagtttttcaatttgtcgaaagtgtgtgcataaaaaaagtaaccaagcttttgcagtcaaaataatcagcaaaaggatggaagccaatactcaaaaggaaataacagctctgaaactctgtgaaggacaccccaatattgtgaagttgcatgaagtttttcatgatcagcttcacacgtttctagtgatggaacttctgaatggaggagaactgtttgagcgcattaagaaaaagaagcacttcagtgagacggaagccagctacatcatgaggaagcttgtttcagctgtaagccacatgcatgatgttggagtggtgcacagggatctgaaacctgaggtataaaatcactggatctcttacgtaattcagtctagcaccattattaaagatctcccaaacatgggggaagtttctggggaggtttccttatttttttacttttcaaggctgttaaatagataattgaaaatacgtttctttgatgttttttcttttatatttcagtctaaaataaatttgtctttgtttattttttgccagctgatcatcttgaggttatatttgtaagtgtgagaaccttttatggaaaaaatactttatgcaacagttgtggactaaaaatagcaatggaaatttttatagcagaaaataatatctcttacatataattttagagggttttttttccaaatgatgtattttgaaaacttattttttacatttgtaatcaaattggttagctcatgaataaaaatgtatataattctattctaaa

SEQ ID NO: 255983 - DNA, 1101 bp, Artificial Sequence
  derived and/or modified sequence
atgagtaagcctcactctgaagcaggtacagctttcatccagacccagcaactccacgcagcaatggctgacacgtttcttgagcacatgtgtaggctggatatcgactcacccccgattaaaaagggcgttaatcttccaggagccgctgtcgatttgccggccgtgagtgagaaggacattcaagacctgaaattcggggtggagcaggatgtggatatggtgtttgcctcatttatccgcaaggcttcagatgttcacgaggttagaaaagtgctcggagaaaaaggaaagaatattaaaattatctcaaaaattgagaatcatgaaggcgtaaggaggtttgacgaaatcctggaggcgtcagacggcataatggttgctcgaggcgacctgggtatcgaaattcccgccgaaaaggtgtttctcgcacagaaaatgatgattggcaggtgcaacagagccggaaagcctgtaatctgcgccacccaaatgctagagagtatgattaagaaacccaggcccactcgagcagagggatcagatgttgcaaatgccgtccttgatggagctgactgtatcatgctgtcaggagagacggccaaaggcgattaccccttggaggccgtaaggatgcagcacctcatagctcgagaggcagaggccgcaatgtttcataggaaactgttcgaggagctggtgcgagcctcatcccactccactgatctaatggaagcgatggcgatgggctcggtagaggcttcttacaagtgtctggcggccgctttgatcgtgttgacagagagcggccgaagcgcccaccaggtcgcgagataccggcctcgagctccaattatcgcggttacaagaaatcctcaaactgcacgccaggcgcacttgtataggggtatttttcctgtgctctgcaaggaccctgtgcaagaggcctgggctgaggatgttgatctgcgggtgaattttgctatgaatgtgggcaaagctcggggctttttcaagaagggcgatgttgtcattgtgctgaccggctggagacccggatcaggattcactaatacgatgagggtagtgccagtgccctag

SEQ ID NO: 255984 - DNA, 1101 bp, Artificial Sequence
  derived and/or modified sequence
atgagcaagccccacagcgaggccggcacagccttcatccagacccagcagctgcacgccgccatggctgacaccttcctggagcacatgtgccgcctggacatcgacagcccccccatcaagaagggcgtgaacctgcctggagctgctgtggacctgcctgctgtgtctgagaaggacatccaggacctgaagtttggagtggagcaggatgtggacatggtgtttgccagcttcatcaggaaggccagtgatgtgcatgaggtgaggaaggtgctgggggagaagggcaagaacatcaagatcatcagcaagattgaaaatcatgaaggagtgagaagatttgatgagatcctggaggccagtgatggcatcatggtggcccggggggacctgggcatcgagatcccagctgagaaggtgttcctggcccagaagatgatgattggccgctgcaacagagctgggaagcctgtgatctgtgccacccagatgctggagagcatgatcaagaagccccggcccaccagggctgagggcagtgatgtggccaatgctgtgctggatggagctgactgcatcatgctgtctggagaaacagccaagggggactaccccctggaggccgtgaggatgcagcacctgattgcccgggaggccgaggccgccatgttccacaggaagctgtttgaggagctggtgcgggccagcagccacagcacagacctgatggaggccatggccatgggctctgtggaggccagctacaagtgcctggccgccgccctgattgtgctgacagaaagtggccgcagcgcccaccaggtggcccgctaccggccccgggcccccatcatcgctgtgaccaggaacccccagacagcccggcaggcccacctgtaccggggcatcttccctgtgctgtgcaaggaccctgtgcaggaggcctgggccgaggatgtggacctgcgggtgaactttgccatgaatgtgggcaaggcccggggcttcttcaagaagggagatgtggtgattgtgctgaccggctggaggcctggcagcggcttcaccaacaccatgagggtggtgcctgtgccctag

SEQ ID NO: 255985 - DNA, 1101 bp, Artificial Sequence
  derived and/or modified sequence
atgagcaagccccacagcgaggccggcaccgccttcatccagacccagcagctccatgccgccatggccgacactttcctcgaacatatgtgcagactggacatcgatagtccacccatcaagaaaggtgtgaatctccccggagccgccgtcgacctcccggcagtgagcgaaaaggacattcaggatctgaagttcggagttgagcaagacgttgatatggtgtttgcctccttcataagaaaggcttctgatgtgcacgaagtgagaaaagttttgggagaaaaggggaaaaatattaagataatatctaagattgagaatcacgaaggagtacggagatttgacgagatcttagaagcttccgatgggatcatggtagcccggggtgatctgggaattgagatcccggcagagaaggtctttctggctcagaaaatgatgataggccgctgcaatcgggcggggaaacctgtgatatgcgcaactcaaatgcttgagagtatgatcaagaagccccgacccactcgagcggagggctccgatgtggccaacgctgtgttggacggcgctgattgcatcatgctcagtggggagaccgcaaagggcgattatccccttgaggctgtgcggatgcagcacttaatcgctcgtgaggcggaggccgctatgtttcatagaaaactgttcgaggagctggttcgggcgtctagtcactctacagacctaatggaggctatggcaatgggaagcgtggaggcctcttataaatgcctggccgcggctctgatcgtgctgaccgagtccggacggtcggcccatcaggtcgcaagatacaggccgagagcccctatcattgccgtcacccgaaacccacaaaccgcaaggcaggcccatctctaccgcggcatatttccagtcctctgcaaggacccggtccaggaagcctgggccgaggatgtggacctgcgtgttaattttgctatgaatgtgggaaaagcccggggctttttcaaaaaaggggatgtcgtgattgtactgacaggttggagacctggatctggtttcacaaataccatgcgggtggttcccgtcccttag

SEQ ID NO: 255986 - DNA, 1101 bp, Artificial Sequence
  derived and/or modified sequence
atgtctaaaccacactcagaagccggaactgcatttatccagacacaacagttgcacgccgctatggcagacacattcttggagcacatgtgccggcttgacatcgatagccctcccataaagaaaggcgttaacctccccggtgccgctgtggacctgccagctgtatctgaaaaggacattcaagacttaaagtttggcgtggaacaggacgtcgacatggtgttcgcttcattcatccgtaaagcctctgacgtccacgaggtgaggaaggttcttggcgagaagggcaagaatatcaagattatcagcaagatcgagaatcacgaaggcgtgaggcgcttcgacgaaatactggaagcctcagatgggattatggtagccaggggagaccttggaatcgagattcccgctgagaaagttttcctagcacagaaaatgatgatcggtcggtgtaatagggcaggcaagcctgtcatctgcgctacacaaatgctcgagtccatgatcaagaagccaaggcctactagggccgagggctcagacgttgcaaacgcggtgttggacggcgcagattgcatcatgctttccggcgagaccgccaaaggggactatccgctggaggctgtgcgaatgcaacacttgatcgcacgcgaggctgaagctgctatgttccatcgcaagttattcgaggaactggtacgagccagctcgcattccacagatctgatggaggccatggccatgggatccgttgaggcctcctataagtgtctggcagcagccctcatagtactcaccgagagcggcaggtccgctcatcaagtcgcacgctatcgaccacgtgccccaatcatagcagttacccgtaatccacagacagccagacaggcccatttataccgtgggatctttccggtcctatgcaaagatcccgtgcaggaggcctgggctgaggacgtagaccttagggtgaattttgcgatgaatgttgggaaagccagaggatttttcaagaagggagacgttgtgatagtgcttaccggctggcgacccggatccggatttactaacactatgagagttgtcccagtgccgtag

SEQ ID NO: 255987 - DNA, 1863 bp, Artificial Sequence
  derived and/or modified sequence
gcccacttcgcagtccctagttctccctactgccgctccagtgccagagcccctccgaaggcggccaggacctccaaccacgcacaagtctgcagctctccccaactttccgttcagctcagtctccgagggacctcagcagccatgtcgaagccccatagtgaagccgggactgccttcattcagacccagcagctgcacgcagccatggctgacacattcctggagcacatgtgccgcctggacattgattcaccacccatcaagaagggtgtgaaccttcctggggctgctgtggacttgcctgctgtgtcggagaaggacatccaggatctgaagtttggggtcgagcaggatgttgatatggtgtttgcgtcattcatccgcaaggcatctgatgtccatgaagttaggaaggtcctgggagagaagggaaagaacatcaagattatcagcaaaatcgagaatcatgagggggttcggaggtttgatgaaatcctggaggccagtgatgggatcatggtggctcgtggtgatctaggcattgagattcctgcagagaaggtcttccttgctcagaagatgatgattggacggtgcaaccgagctgggaagcctgtcatctgtgctactcagatgctggagagcatgatcaagaagccccgccccactcgggctgaaggcagtgatgtggccaatgcagtcctggatggagccgactgcatcatgctgtctggagaaacagccaaaggggactatcctctggaggctgtgcgcatgcagcacctgatagctcgtgaggctgaggcagccatgttccaccgcaagctgtttgaagaacttgtgcgagcctcaagtcactccacagacctcatggaagccatggccatgggcagcgtggaggcttcttataagtgtttagcagcagctttgatagttctgacggagtctggcaggtctgctcaccaggtggccagataccgcccacgtgcccccatcattgctgtgacccggaatccccagacagctcgtcaggcccacctgtaccgtggcatcttccctgtgctgtgcaaggacccagtccaggaggcctgggctgaggacgtggacctccgggtgaactttgccatgaatgttggcaaggcccgaggcttcttcaagaagggagatgtggtcattgtgctgaccggatggcgccctggctccggcttcaccaacaccatgcgtgttgttcctgtgccgtgatggaccccagagcccctcctccagcccctgtcccacccccttcccccagcccatccattaggccagcaacgcttgtagaactcactctgggctgtaacgtggcactggtaggttgggacaccagggaagaagatcaacgcctcactgaaacatggctgtgtttgcagcctgctctagtgggacagcccagagcctggctgcccatcatgtggccccacccaatcaagggaagaaggaggaatgctggactggaggcccctggagccagatggcaagagggtgacagcttcctttcctgtgtgtactctgtccagttcctttagaaaaaatggatgcccagaggactcccaaccctggcttggggtcaagaaacagccagcaagagttaggggccttagggcactgggctgttgttccattgaagccgactctggccctggcccttacttgcttctctagctctctaggcctctccagtttgcacctgtccccaccctccactcagctgtcctgcagcaaacactccaccctccaccttccattttcccccactactgcagcacctccaggcctgttgctatagagcctacctgtatgtcaataaacaacagctgaagc

SEQ ID NO: 255988 - DNA, 1101 bp, Artificial Sequence
  derived and/or modified sequence
atgagcaagccccacagcgaggccggcaccgccttcatccagacccagcagctgcacgccgccatggccgacaccttcctggagcacatgtgcagactggacatcgacagcccccccatcaagaagggcgtgaacctgcccggcgccgccgtggacctgcccgccgtgagcgagaaggacatccaggacctgaagttcggcgtggagcaggacgtggacatggtgttcgccagcttcatcagaaaggccagcgacgtgcacgaggtgagaaaggtgctgggcgagaagggcaagaacatcaagatcatcagcaagatcgagaaccacgagggcgtgagaagattcgacgagatcctggaggccagcgacggcatcatggtggccagaggcgacctgggcatcgagatccccgccgagaaggtgttcctggcccagaagatgatgatcggcagatgcaacagagccggcaagcccgtgatctgcgccacccagatgctggagagcatgatcaagaagcccagacccaccagagccgagggcagcgacgtggccaacgccgtgctggacggcgccgactgcatcatgctgagcggcgagaccgccaagggcgactaccccctggaggccgtgagaatgcagcacctgatcgccagagaggccgaggccgccatgttccacagaaagctgttcgaggagctggtgagagccagcagccacagcaccgacctgatggaggccatggccatgggcagcgtggaggccagctacaagtgcctggccgccgccctgatcgtgctgaccgagagcggcagaagcgcccaccaggtggccagatacagacccagagcccccatcatcgccgtgaccagaaacccccagaccgccagacaggcccacctgtacagaggcatcttccccgtgctgtgcaaggaccccgtgcaggaggcctgggccgaggacgtggacctgagagtgaacttcgccatgaacgtgggcaaggccagaggcttcttcaagaagggcgacgtggtgatcgtgctgaccggctggagacccggcagcggcttcaccaacaccatgagagtggtgcccgtgccctag

SEQ ID NO: 255989 - protein, 1015 aa, Artificial Sequence
  derived and/or modified sequence
MRGSGPRGAGRRRPPSGGGDTPITPASLAGCYSAPRRAPLWTCLLLCAALRTLLASPSNEVNLLDSRTVMGDLGWIAFPKNGWEEIGEVDENYAPIHTYQVCKVMEQNQNNWLLTSWISNEGASRIFIELKFTLRDCNSLPGGLGTCKETFNMYYFESDDQNGRNIKENQYIKIDTIAADESFTELDLGDRVMKLNTEVRDVGPLSKKGFYLAFQDVGACIALVSVRVYYKKCPSVVRHLAVFPDTITGADSSQLLEVSGSCVNHSVTDEPPKMHCSAEGEWLVPIGKCMCKAGYEEKNGTCQVCRPGFFKASPHIQSCGKCPPHSYTHEEASTSCVCEKDYFRRESDPPTMACTRPPSAPRNAISNVNETSVFLEWIPPADTGGRKDVSYYIACKKCNSHAGVCEECGGHVRYLPRQSGLKNTSVMMVDLLAHTNYTFEIEAVNGVSDLSPGARQYVSVNVTTNQAAPSPVTNVKKGKIAKNSISLSWQEPDRPNGIILEYEIKYFEKDQETSYTIIKSKETTITAEGLKPASVYVFQIRARTAAGYGVFSRRFEFETTPVFAASSDQSQIPVIAVSVTVGVILLAVVIGVLLSGRRCGYSKAKQDPEEEKMHFHNGHIKLPGVRTYIDPHTYEDPNQAVHEFAKEIEASCITIERVIGAGEFGEVCSGRLKLPGKRELPVAIKTLKVGYTEKQRRDFLGEASIMGQFDHPNIIHLEGVVTKSKPVMIVTEYMENGSLDTFLKKNDGQFTVIQLVGMLRGISAGMKYLSDMGYVHRDLAARNILINSNLVCKVSDFGLSRVLEDDPEAAYTTRGGKIPIRWTAPEAIAFRKFTSASDVWSYGIVMWEVVSYGERPYWEMTNQDVIKAVEEGYRLPSPMDCPAALYQLMLDCWQKERNSRPKFDEIVNMLDKLIRNPSSLKTLVNASCRVSNLLAEHSPLGSGAYRSVGEWLEAIKMGRYTEIFMENGYSSMDAVAQVTLEDLRRLGVTLVGHQKKIMNSLQEMKVQLVNGMVPL

SEQ ID NO: 255990 - DNA, 3048 bp, Artificial Sequence
  derived and/or modified sequence
atgcgcggatccggacccaggggggctgggcggcgccgccctcctagcggaggaggcgacaccccgatcactcctgccagtctggctggctgctactctgcgccccgccgtgcccccttgtggacttgcctcttactttgtgccgcccttcgaacattactggccagtcccagcaatgaggtgaatcttctggacagtcggacggtcatgggcgaccttggctggattgccttcccaaagaatggttgggaggaaatcggcgaggtagacgaaaattatgcccctatccacacttaccaggtgtgtaaggtcatggagcaaaaccagaataattggttacttacttcttggatctctaatgaaggggcatccaggatcttcatagaattgaagttcacattgcgcgattgcaacagcctgcccggaggcctggggacatgcaaggagactttcaacatgtattattttgagagtgacgaccagaacggacgtaacatcaaagaaaatcagtatattaaaattgatacaattgcagccgacgagagcttcactgagctagatctcggtgaccgggtgatgaagctgaacaccgaagtgcgggatgtgggccctctttccaagaagggattttacctggcattccaggacgtgggagcttgcattgcactcgtatcagtccgcgtgtattacaagaagtgtccatctgttgttcggcacctggccgtcttccccgacactattactggtgctgactcgagtcaattgctggaagtgtctggctcatgtgttaaccacagcgtcactgacgagccccctaagatgcattgctccgctgaaggagaatggctggtccccattggaaaatgcatgtgtaaggctggctacgaggagaaaaatggcacttgtcaagtctgccggcctggcttcttcaaagcctccccacacatccagagctgtggcaaatgtcctccgcactcatatacccatgaggaggctagtactagctgcgtctgtgaaaaagattatttcaggcgcgagtctgacccgcccaccatggcatgcacacggccaccttctgccccccgcaacgcgatatctaacgtaaatgagacttctgtcttcctcgagtggattcccccagctgataccggtgggcgcaaggatgtcagttattacatcgcttgcaaaaaatgtaattctcacgcaggagtatgtgaggagtgtggtggacatgtcagatacctcccaagacaatcaggcctcaagaatacgtccgtcatgatggtggatctcctagctcacacaaattatacatttgaaatagaggccgtgaatggggtatcagacttgtctcctggagcaaggcaatatgtgtccgtgaatgtaaccacaaaccaggccgcccctagcccagtgacgaatgttaaaaagggcaagatagctaagaacagcatctccctgtcttggcaggagcctgaccgccctaacggtattatcttggaatatgaaattaaatatttcgaaaaagaccaggaaaccagttacacaattatcaagtctaaggaaacgacaataacagcggaaggtcttaagcctgcaagtgtgtacgtctttcagatacgtgcaagaaccgccgcgggctatggggtttttagcagacgatttgaatttgaaactactcccgtcttcgctgcctcatcagaccagtcccagataccagttattgctgtaagtgtgactgtgggcgtcatccttctggcagtggtaattggggtgcttctttccggacgacgctgcggttacagcaaggctaaacaggaccctgaggaggaaaaaatgcattttcacaacggccatatcaaactaccaggcgtcaggacgtatatcgatccccatacctacgaggatcccaatcaggccgtgcacgagttcgccaaagagatcgaagcaagctgcattacaattgaaagagttataggggcaggcgagttcggcgaagtgtgctcaggtcggctgaagttgccagggaagagggagcttccagtcgcgataaagactctgaaggttggttacaccgaaaagcaacgacgcgactttctcggggaggccagtatcatggggcagttcgatcatcctaacattatccacctggagggcgttgtgaccaaatctaaacctgtaatgattgtcacagagtacatggagaatggttcactagacacattccttaaaaagaatgatggtcagttcaccgtgatccaattagtaggcatgttgaggggcatcagcgccggtatgaagtatctctctgacatggggtacgtccatagagatctggcggcgcgcaatatcttgatcaacagtaaccttgtatgcaaagtgtctgattttggtctctcacgggtcctggaagacgatcctgaggcagcatacaccacccgggggggtaagatcccgattagatggaccgccccagaggccatcgcgtttagaaaatttacctccgccagcgatgtgtggagctatgggatcgtcatgtgggaggtcgtgagctacggggagcgtccatactgggagatgaccaaccaggacgttatcaaggcagtggaggagggctatcgtttgccgtctcctatggattgtcccgcagccctgtaccagctcatgttagactgctggcaaaaagaacgtaactcaagacccaagtttgatgaaatcgtgaacatgctcgataaactcatccggaatccatcaagtctgaaaacattagtcaacgccagctgcagggtctccaatttactggctgaacactctcccctaggatcgggtgcttatcgctctgtgggagagtggcttgaagccatcaaaatgggcagatataccgagatcttcatggagaacggctacagttcgatggatgccgtagcccaggtaacgttggaggatctgcgacgcctcggagtgactctggtggggcaccaaaaaaagatcatgaatagtctccaagagatgaaggtacagctggttaatggaatggttccactttag

SEQ ID NO: 255991 - DNA, 3048 bp, Artificial Sequence
  derived and/or modified sequence
atgaggggcagcggccccagaggagctggaagaagaagaccacccagcggcggcggggacacccccatcaccccagccagcctggccggctgctacagcgccccccggcgggcccccctgtggacctgcctgctgctgtgtgccgccctgcggaccctgctggccagccccagcaatgaggtgaacctgctggacagcaggacagtgatgggagacctgggctggatcgccttccccaagaatggctgggaggagatcggggaggtggatgaaaattatgcccccatccacacctaccaggtgtgcaaggtgatggagcagaaccagaacaactggctgctgacctcctggatcagcaatgaaggagccagccgcatcttcatcgagctgaagttcaccctgcgggactgcaacagcctgcccggcggcctgggcacctgcaaggagaccttcaacatgtactactttgaaagtgatgaccagaatggaagaaacatcaaggagaaccagtacatcaagattgacaccatcgctgctgatgagagcttcacagagctggacctgggggacagagtgatgaagctgaacacagaggtgagagatgtgggccccctgagcaagaagggcttctacctggccttccaggatgtgggcgcctgcatcgccctggtgtctgtgcgggtgtactacaagaagtgccccagcgtggtgcgccacctggccgtgtttcctgacaccatcaccggggctgacagcagccagctgctggaggtgtctggcagctgtgtgaaccacagcgtgacagatgagccccccaagatgcactgcagcgctgagggggagtggctggtgcccatcggcaagtgcatgtgcaaggccggctatgaggagaagaatggcacctgccaggtgtgcaggcctggcttcttcaaggccagcccccacatccagagctgtgggaaatgtcctccccacagctacacccatgaggaggccagcaccagctgtgtgtgtgagaaggactacttccggcgggagagtgacccccccaccatggcctgcaccaggcctccttctgcccccagaaatgccatcagcaatgtgaatgagaccagcgtcttcctggagtggatccccccagctgacacaggaggcaggaaggatgtgtcctactacatcgcctgcaagaagtgcaacagccacgccggcgtgtgtgaagaatgtggcggccacgtgcgctacctgccccggcagagcggcctgaagaacacctctgtgatgatggtggacctgctggcccacaccaactacacctttgaaattgaagctgtgaatggagtgtctgacctgagccctggggcccggcagtatgtgtctgtgaatgtgaccaccaaccaggccgcccccagccctgtgaccaacgtgaagaagggcaagatcgccaagaacagcatcagcctgtcctggcaggagccagaccggcccaacggcatcatcctggagtatgagatcaagtactttgagaaggaccaggagaccagctacaccatcatcaagagcaaggagaccaccatcacagctgagggcctgaagccagcctctgtgtatgtgttccagatccgggccaggacagctgctggctacggcgtcttcagcagaagatttgaatttgagaccacccctgtgtttgctgccagcagtgaccagagccagatccctgtgattgctgtgtctgtgacagtgggcgtcatcctgctggccgtggtgattggagtgctgctgtctggaagaagatgtggctacagcaaggccaagcaggaccctgaggaggagaagatgcacttccacaacggccacatcaagctgcccggggtgaggacctacatcgacccccacacctatgaggaccccaaccaggccgtgcatgaatttgccaaggagattgaggccagctgcatcaccatcgagcgggtgattggagctggggagtttggagaggtgtgcagcggccgcctgaagctgcccgggaagcgggagctgcctgtggccatcaagaccctgaaggtgggctacacagagaagcagaggcgggacttcctgggggaggccagcatcatgggccagtttgaccaccccaacatcatccacctggagggcgtggtgaccaagagcaagcctgtgatgattgtgacagagtacatggagaatggcagcctggacaccttcctgaagaagaatgatggccagttcaccgtcatccagctggtgggcatgctgcggggcatctctgctggcatgaagtacctgagtgacatgggctacgtgcaccgggacctggccgccaggaacatcctgatcaacagcaacctggtgtgcaaggtgtctgactttggcctgagccgggtgctggaggatgatcctgaggccgcctacaccacccggggcggcaagatccccatccgctggacagcccctgaggccatcgccttcaggaagttcaccagcgccagtgatgtgtggagctatggcatcgtgatgtgggaggtggtgtcctatggagagcggccctactgggagatgaccaaccaggacgtcatcaaggctgtggaggagggctaccgcctgcccagccccatggactgcccagctgccctgtaccagctgatgctggactgctggcagaaggagaggaacagccggcccaagtttgatgagatcgtgaacatgctggacaagctgatccggaaccccagcagcctgaagaccctggtgaatgccagctgccgggtgagcaacctgctggccgagcacagccccctgggcagcggggcctacagatctgtgggggagtggctggaggccatcaagatgggccgctacacagagatcttcatggagaatggctacagctccatggatgctgtggcccaggtgaccctggaggacctgcggcggctgggcgtgaccctggtgggccaccagaagaagatcatgaacagcctgcaggagatgaaggtgcagctggtgaatggcatggtgcccctgtag

SEQ ID NO: 255992 - DNA, 3048 bp, Artificial Sequence
  derived and/or modified sequence
atgcggggcagcggcccccggggcgccggccggcggcggcccccctcaggcggcggagatacacctatcacccccgcctcactggcaggttgttactccgctccacgaagggcacctctgtggacatgcctgctgctgtgcgctgcgctacgcacgctgctggcctctccttccaacgaggtgaacctgctggacagcaggaccgtgatgggcgacttgggatggatagctttccccaagaacggctgggaagagattggcgaggtggatgagaactatgcgccgatccatacctaccaggtgtgcaaggttatggagcagaatcagaacaactggctgctgacttcctggattagtaacgagggagcttctcgtattttcattgaacttaagttcaccctgagagattgcaactccctacccggagggctcggcacttgcaaggaaactttcaacatgtattatttcgaaagcgacgatcaaaacggcaggaatataaaagaaaaccagtatatcaagatcgacaccattgccgctgacgaaagcttcacagagctggaccttggggacagagtcatgaaactcaatactgaggttagggacgtgggccccctgtctaaaaagggcttttatctggcgtttcaagacgttggggcatgcatcgctctggtgagcgtgcgcgtgtactacaaaaagtgcccctccgtggttcgccaccttgccgtgtttcccgacacaataactggggccgattcatcgcagttgcttgaggtgtctggatcctgcgtgaatcactccgtcactgacgaacccccaaagatgcactgcagtgctgaaggagaatggctggttcctatcggcaagtgcatgtgtaaggcagggtatgaggaaaaaaacggcacctgtcaggtgtgtcgtccaggcttttttaaggcgagcccgcacatccagtcctgcgggaagtgtcccccacatagctatacacacgaggaggcctctacatcctgtgtgtgtgaaaaagattacttcagacgcgagtcagatccacctacaatggcctgcactagaccgccctccgcacctcgaaatgccataagcaacgtcaacgaaacaagtgtcttcctcgagtggataccaccggccgataccggtgggaggaaggatgtgtcttattatattgcctgtaaaaagtgtaatagccatgccggagtgtgtgaagagtgcggaggacacgtccggtacttgccacggcaatctggcctgaagaacacctctgtgatgatggtagacttgctagcccacacaaattacacattcgagatagaggccgtgaatggggtgtccgatctcagcccaggggcgcgccagtacgtttcagtgaatgtcacaaccaaccaggcagctccgtcacctgttaccaacgtcaagaagggtaagatcgctaagaacagcatttccctgtcttggcaggagccggacagacccaatgggataatactggaatatgagatcaaatactttgaaaaggatcaagaaaccagctacacaatcatcaaatccaaagagaccacaatcaccgcggaaggccttaagccagctagtgtttatgtgttccagatccgtgctcgtacagccgccggatatggagtgttctcccgaaggttcgaattcgagaccacacctgtattcgccgcaagctcagatcagagtcagatccctgtcatagccgtttcagtaaccgtgggcgtgatcttgctggctgtggtcattggcgtgttactgtctggccgccgttgtggatattcgaaagcaaagcaggaccctgaggaggagaagatgcattttcacaatggtcacattaaactgcccggagttcggacctatatagatcctcatacgtacgaggaccccaatcaggccgtgcacgaattcgctaaagagatcgaggcgagctgcatcactatcgaacgggtgataggggcaggagagtttggagaagtctgctcagggagactgaagctgcccggaaagcgtgaactgccagtggctataaagactttaaaggtgggttacaccgagaaacagagacgtgatttcttgggagaagccagcattatgggccagttcgaccatcccaatattattcacctggagggtgtggtgacaaagtccaagccagtgatgattgttaccgaatatatggaaaacgggagcctcgacacatttctgaaaaagaacgatgggcaattcacagtcattcagctcgtcggcatgttacgggggatcagcgctggaatgaagtatctgtcagacatgggctacgtgcacagggacttggctgcacgtaacatcctgattaatagtaatctggtgtgtaaagtctccgatttcggactttctcgagttctagaggacgatcctgaggccgcttacacaacgcggggaggcaaaatccctatccggtggacagcaccagaggccatcgcatttagaaaattcaccagcgcaagcgacgtgtggtcatacggcatcgtgatgtgggaggtagtgtcttatggcgagaggccatattgggagatgaccaaccaggacgtcatcaaggccgtcgaggagggatatcggcttccttcaccgatggattgtcccgccgcactgtatcagctgatgctggactgctggcagaaggagcgcaactctagacctaagtttgatgaaatagtcaacatgctcgacaaactgatccgaaacccttcttctctgaaaacactcgtaaacgcctcttgcagggtgtctaaccttctggccgaacattctccccttggaagcggggcttacaggtccgtcggcgagtggctagaagccatcaagatggggagatacacagagatcttcatggagaacggctactccagtatggacgccgtggcccaagtgaccctagaagacctgcgaaggctaggggtgacattggtagggcatcagaagaaaataatgaattcattacaggaaatgaaagtccagctggtcaacggcatggtccccctctag

SEQ ID NO: 255993 - DNA, 3048 bp, Artificial Sequence
  derived and/or modified sequence
atgcgcggaagtgggccacgcggtgctggacgacgcaggcctcctagtggcggtggagacactcccattacccctgcgagtctagcgggttgttactctgcgccaagaagagcaccactgtggacgtgccttctcctgtgtgccgcactcagaactctccttgctagccctagcaatgaggtgaacctgctggacagcagaacagtgatgggtgacctgggctggattgcctttcctaagaatgggtgggaggagattggtgaagtggatgaaaattacgctcctatccacacatatcaggtctgcaaggtgatggagcaaaaccagaacaactggctccttacttcatggatcagcaacgagggtgcgtcacgcattttcattgaattgaaatttactttgagagactgtaatagcctacccggaggtctcggaacctgtaaagaaacttttaacatgtattatttcgagtcagacgaccaaaacgggaggaatattaaggagaatcagtacattaagatcgatacgatagctgcggacgaaagcttcactgagctggacctgggggatcgcgtcatgaagttaaataccgaggtccgggatgttggcccactttctaaaaaggggttttaccttgcctttcaggacgttggggcatgtatagcactggtgtctgtgagagtttactataaaaagtgtcccagcgtggtgaggcatttggccgtgtttcccgacactatcactggcgctgatagttctcagctgttggaagtgagtggtagctgtgtgaatcacagcgtcaccgatgagccgcctaagatgcattgttccgccgagggtgaatggctcgtgcccataggtaagtgtatgtgtaaagccggttacgaggaaaagaatgggacgtgtcaggtgtgtcgcccagggttttttaaggccagcccacacattcaaagttgcggcaaatgtcccccacactcgtacactcacgaagaggcatctacatcctgcgtgtgtgaaaaggattatttcagaagggagagcgatccccctaccatggcttgtactaggcctccctcggctcccagaaacgccatctcgaacgtgaatgagacaagtgtgttcctggagtggattcccccagcagatactggaggccgtaaagatgtcagctactatattgcctgcaaaaagtgtaattctcatgcaggcgtgtgcgaggaatgtggcggacacgttcgatacctcccacgccagtctgggctaaaaaataccagcgtgatgatggtggacctgctggcccacaccaattacacctttgaaattgaagctgtcaacggagtgtccgacttgtctcctggggctcgacagtatgtctcggtcaacgtcacaacaaaccaggccgctccaagcccggttactaatgttaagaaagggaagatcgcaaagaattctatatccctctcatggcaggaacctgatcggcctaacggcataattctcgagtacgagataaagtacttcgagaaagaccaagagacgagttatactataataaagtctaaagaaactaccatcacagcggaaggcctgaagcccgcatctgtgtacgtgttccagattcgagcacgcactgctgccggttacggagtgttttctcgaagattcgagttcgagaccacccccgtcttcgctgcttcttcagaccaatcccagataccagtgatcgcagtttccgtcactgtgggcgtgatcctgctcgctgttgtcattggcgtacttttaagcggacggcgatgtggatattccaaggccaaacaagatcccgaggaagaaaaaatgcattttcacaacggccatatcaagctgcccggtgttcggacttacatcgatcctcacacttacgaggatccaaaccaggccgtccatgaattcgctaaggaaattgaggcctcctgcatcacgatagagcgagtcataggcgcaggggagttcggcgaggtgtgttccggcagattgaaactgccagggaagcgggaattgccagtagctatcaagaccctgaaagtgggatacacagagaagcagcggagggactttctgggagaggcgtctatcatgggacaattcgaccaccctaatatcatccaccttgagggagtcgttaccaaatccaaacctgttatgatagtaaccgagtatatggagaacggaagtttggatacttttctgaagaagaacgatggacagtttaccgtcattcaactcgtcggcatgctccgaggaatctccgctggcatgaaatatctctccgatatgggctatgtccatcgtgatctggcggcaagaaatatcctgatcaatagcaacctggtgtgcaaagtgagtgactttggcctgtctcgggtgctggaggatgacccagaggctgcctacactacaaggggcggtaaaattccaattcggtggacagcgccagaggcgattgcctttcggaagttcacatctgccagcgatgtttggtcgtacggtatcgtcatgtgggaagtggtatcctacggagagcgcccttattgggaaatgacaaaccaggatgtgatcaaggccgtggaggaaggctaccggctcccgagccccatggactgccccgctgcattgtatcagctgatgcttgactgttggcaaaaggaacgcaattcgagacccaaatttgatgagattgtgaacatgttggacaagcttatccggaacccaagttccctcaagactctagtgaacgcaagctgccgcgtgagcaacctgctggccgagcatagcccgctgggctctggtgcctaccgatcagtcggggagtggttggaggcgataaaaatgggcagatacacggagatctttatggagaatggctactcctccatggacgcagtggcacaggtgacgctcgaggacctgcgcaggctgggcgtgactcttgtcggccatcaaaagaaaatcatgaattcacttcaggaaatgaaggtgcagctggttaacgggatggtgcccctatag

SEQ ID NO: 255994 - DNA, 3048 bp, Artificial Sequence
  derived and/or modified sequence
atgagaggcagcggccccagaggcgccggcagaagaagaccccccagcggcggcggcgacacccccatcacccccgccagcctggccggctgctacagcgcccccagaagagcccccctgtggacctgcctgctgctgtgcgccgccctgagaaccctgctggccagccccagcaacgaggtgaacctgctggacagcagaaccgtgatgggcgacctgggctggatcgccttccccaagaacggctgggaggagatcggcgaggtggacgagaactacgcccccatccacacctaccaggtgtgcaaggtgatggagcagaaccagaacaactggctgctgaccagctggatcagcaacgagggcgccagcagaatcttcatcgagctgaagttcaccctgagagactgcaacagcctgcccggcggcctgggcacctgcaaggagaccttcaacatgtactacttcgagagcgacgaccagaacggcagaaacatcaaggagaaccagtacatcaagatcgacaccatcgccgccgacgagagcttcaccgagctggacctgggcgacagagtgatgaagctgaacaccgaggtgagagacgtgggccccctgagcaagaagggcttctacctggccttccaggacgtgggcgcctgcatcgccctggtgagcgtgagagtgtactacaagaagtgccccagcgtggtgagacacctggccgtgttccccgacaccatcaccggcgccgacagcagccagctgctggaggtgagcggcagctgcgtgaaccacagcgtgaccgacgagccccccaagatgcactgcagcgccgagggcgagtggctggtgcccatcggcaagtgcatgtgcaaggccggctacgaggagaagaacggcacctgccaggtgtgcagacccggcttcttcaaggccagcccccacatccagagctgcggcaagtgccccccccacagctacacccacgaggaggccagcaccagctgcgtgtgcgagaaggactacttcagaagagagagcgacccccccaccatggcctgcaccagaccccccagcgcccccagaaacgccatcagcaacgtgaacgagaccagcgtgttcctggagtggatcccccccgccgacaccggcggcagaaaggacgtgagctactacatcgcctgcaagaagtgcaacagccacgccggcgtgtgcgaggagtgcggcggccacgtgagatacctgcccagacagagcggcctgaagaacaccagcgtgatgatggtggacctgctggcccacaccaactacaccttcgagatcgaggccgtgaacggcgtgagcgacctgagccccggcgccagacagtacgtgagcgtgaacgtgaccaccaaccaggccgcccccagccccgtgaccaacgtgaagaagggcaagatcgccaagaacagcatcagcctgagctggcaggagcccgacagacccaacggcatcatcctggagtacgagatcaagtacttcgagaaggaccaggagaccagctacaccatcatcaagagcaaggagaccaccatcaccgccgagggcctgaagcccgccagcgtgtacgtgttccagatcagagccagaaccgccgccggctacggcgtgttcagcagaagattcgagttcgagaccacccccgtgttcgccgccagcagcgaccagagccagatccccgtgatcgccgtgagcgtgaccgtgggcgtgatcctgctggccgtggtgatcggcgtgctgctgagcggcagaagatgcggctacagcaaggccaagcaggaccccgaggaggagaagatgcacttccacaacggccacatcaagctgcccggcgtgagaacctacatcgacccccacacctacgaggaccccaaccaggccgtgcacgagttcgccaaggagatcgaggccagctgcatcaccatcgagagagtgatcggcgccggcgagttcggcgaggtgtgcagcggcagactgaagctgcccggcaagagagagctgcccgtggccatcaagaccctgaaggtgggctacaccgagaagcagagaagagacttcctgggcgaggccagcatcatgggccagttcgaccaccccaacatcatccacctggagggcgtggtgaccaagagcaagcccgtgatgatcgtgaccgagtacatggagaacggcagcctggacaccttcctgaagaagaacgacggccagttcaccgtgatccagctggtgggcatgctgagaggcatcagcgccggcatgaagtacctgagcgacatgggctacgtgcacagagacctggccgccagaaacatcctgatcaacagcaacctggtgtgcaaggtgagcgacttcggcctgagcagagtgctggaggacgaccccgaggccgcctacaccaccagaggcggcaagatccccatcagatggaccgcccccgaggccatcgccttcagaaagttcaccagcgccagcgacgtgtggagctacggcatcgtgatgtgggaggtggtgagctacggcgagagaccctactgggagatgaccaaccaggacgtgatcaaggccgtggaggagggctacagactgcccagccccatggactgccccgccgccctgtaccagctgatgctggactgctggcagaaggagagaaacagcagacccaagttcgacgagatcgtgaacatgctggacaagctgatcagaaaccccagcagcctgaagaccctggtgaacgccagctgcagagtgagcaacctgctggccgagcacagccccctgggcagcggcgcctacagaagcgtgggcgagtggctggaggccatcaagatgggcagatacaccgagatcttcatggagaacggctacagcagcatggacgccgtggcccaggtgaccctggaggacctgagaagactgggcgtgaccctggtgggccaccagaagaagatcatgaacagcctgcaggagatgaaggtgcagctggtgaacggcatggtgcccctgtag

SEQ ID NO: 255995 - DNA, 3427 bp, Artificial Sequence
  derived and/or modified sequence
gaggagccagaagcaaacttcagctgtctcagccggatccgtggttcctacatttggaggagccgcgtgccagaaggcgtaggaccccaaggggggacaaggaggactcccgagtctcccttcgccgctctgcgaggccgaagcggtggactgagccgctcgggacagcggcaccggaggaggctcggagaagatgcggggctcggggccccggggtgcgggacgccggcggcccccaagcggcggcggcgacacccccatcaccccagcgtccctggccggctgctactctgcacctcgacgggctcccctctggacgtgccttctcctgtgcgccgcactccggaccctcctggccagccccagcaacgaagtgaatttattggattcacgcactgtcatgggggacctgggatggattgcttttccaaaaaatgggtgggaagagattggtgaagtggatgaaaattatgcccctatccacacataccaagtatgcaaagtgatggaacagaatcagaataactggcttttgaccagttggatctccaatgaaggtgcttccagaatcttcatagaactcaaatttaccctgcgggactgcaacagccttcctggaggactggggacctgtaaggaaacctttaatatgtattactttgagtcagatgatcagaatgggagaaacatcaaggaaaaccaatacatcaaaattgataccattgctgccgatgaaagctttacagaacttgatcttggtgaccgtgttatgaaactgaatacagaggtcagagatgtaggacctctaagcaaaaagggattttatcttgcttttcaagatgttggtgcttgcattgctctggtttctgtgcgtgtatactataaaaaatgcccttctgtggtacgacacttggctgtcttccctgacaccatcactggagctgattcttcccaattgctcgaagtgtcaggctcctgtgtcaaccattctgtgaccgatgaacctcccaaaatgcactgcagcgccgaaggggagtggctggtgcccatcgggaaatgcatgtgcaaggcaggatatgaagagaaaaatggcacctgtcaagtgtgcagacctgggttcttcaaagcctcacctcacatccagagctgcggcaaatgtccacctcacagttatacccatgaggaagcttcaacctcttgtgtctgtgaaaaggattatttcaggagagagtctgatccacccacaatggcatgcacaagacccccctctgctcctcggaatgccatctcaaatgttaatgaaactagtgtctttctggaatggattccgcctgctgacactggtggaaggaaagacgtgtcatattatattgcatgcaagaagtgcaactcccatgcaggtgtgtgtgaggagtgtggcggtcatgtcaggtaccttccccggcaaagcggcctgaaaaacacctctgtcatgatggtggatctactcgctcacacaaactatacctttgagattgaggcagtgaatggagtgtccgacttgagcccaggagcccggcagtatgtgtctgtaaatgtaaccacaaatcaagcagctccatctccagtcaccaatgtgaaaaaagggaaaattgcaaaaaacagcatctctttgtcttggcaagaaccagatcgtcccaatggaatcatcctagagtatgaaatcaagtattttgaaaaggaccaagagaccagctacacgattatcaaatctaaagagacaactattactgcagagggcttgaaaccagcttcagtttatgtcttccaaattcgagcacgtacagcagcaggctatggtgtcttcagtcgaagatttgagtttgaaaccaccccagtgtttgcagcatccagcgatcaaagccagattcctgtaattgctgtgtctgtgacagtgggagtcattttgttggcagtggttatcggcgtcctcctcagtggaaggcggtgtggctacagcaaagcaaaacaagatccagaagaggaaaagatgcattttcataatgggcacattaaactgccaggagtaagaacttacattgatccacatacctatgaggatcccaatcaagctgtccacgaatttgctaaggagatagaagcatcatgtatcaccattgagagagttattggagcaggtgaatttggtgaagtttgtagtggacgtttgaaactaccaggaaaaagagaattacctgtggctatcaaaacccttaaagtaggctatactgaaaagcaacgcagagatttcctaggtgaagcaagtatcatgggacagtttgatcatcctaacatcatccatttagaaggtgtggtgaccaaaagtaaaccagtgatgatcgtgacagagtatatggagaatggctctttagatacatttttgaagaaaaacgatgggcagttcactgtgattcagcttgttggcatgctgagaggtatctctgcaggaatgaagtacctttctgacatgggctatgtgcatagagatcttgctgccagaaacatcttaatcaacagtaaccttgtgtgcaaagtgtctgactttggactttcccgggtactggaagatgatcccgaggcagcctacaccacaaggggaggaaaaattccaatcagatggactgccccagaagcaatagctttccgaaagtttacttctgccagtgatgtctggagttatggaatagtaatgtgggaagttgtgtcttatggagagagaccctactgggagatgaccaatcaagatgtgattaaagcggtagaggaaggctatcgtctgccaagccccatggattgtcctgctgctctctatcagttaatgctggattgctggcagaaagagcgaaatagcaggcccaagtttgatgaaatagtcaacatgttggacaagctgatacgtaacccaagtagtctgaagacgctggttaatgcatcctgcagagtatctaatttattggcagaacatagcccactaggatctggggcctacagatcagtaggtgaatggctagaggcaatcaagatgggccggtatacagagattttcatggaaaatggatacagttcaatggacgctgtggctcaggtgaccttggaggatttgagacggcttggagtgactcttgtcggtcaccagaagaagatcatgaacagccttcaagaaatgaaggtgcagctggtaaacggaatggtgccattgtaacttcatgtaaatgtcgcttcttcaagtgaatgattctgcactttgtaaacagcactgagatttattttaacaaaaaaagggggaaaagggaaaacagtgatttctaaaccttagaaaacatttgcctcagccacagaatttgtaatcatggttttactgaagtatccagttcttagtccttagtct

SEQ ID NO: 255996 - protein, 468 aa, Artificial Sequence
  derived and/or modified sequence
MAARLVSRCGAVRAAPHSGPLVSWRRWSGASTDTVYDVVVSGGGLVGAAMACALGYDIHFHDKKILLLEAGPKKVLEKLSETYSNRVSSISPGSATLLSSFGAWDHICNMRYRAFRRMQVWDACSEALIMFDKDNLDDMGYIVENDVIMHALTKQLEAVSDRVTVLYRSKAIRYTWPCPFPMADSSPWVHITLGDGSTFQTKLLIGADGHNSGVRQAVGIQNVSWNYDQSAVVATLHLSEATENNVAWQRFLPSGPIALLPLSDTLSSLVWSTSHEHAAELVSMDEEKFVDAVNSAFWSDADHTDFIDTAGAMLQYAVSLLKPTKVSARQLPPSVARVDAKSRVLFPLGLGHAAEYVRPRVALIGDAAHRVHPLAGQGVNMGFGDISSLAHHLSTAAFNGKDLGSVSHLTGYETERQRHNTALLAATDLLKRLYSTSASPLVLLRTWGLQATNAVSPLKEQIMAFASK

SEQ ID NO: 255997 - protein, 146 aa, Artificial Sequence
  derived and/or modified sequence
MAARLVSRCGAVRAAPHSGPLVSWRRWSGASTDTVYDVVVSGGGLVGAAMACALGYDIHFHDKKILLLEAGPKKVLEKLSETYSNRVSSISPGSATLLSSFGAWDHICNMRYRAFRRMQVPLYLFNFVKMSWSVLRYRSPLSPSVL

SEQ ID NO: 255998 - DNA, 2118 bp, Artificial Sequence
  derived and/or modified sequence
gcctgcgggagttctgagtgcgacggcgcaggtctgcaccatggcggcccggcttgtcagccgatgcggggctgtgcgtgcagctccccacagcggcccgctggtgtcctggcgcaggtggtccggcgcctcaacagacaccgtgtatgacgtggtggtgtcgggtggaggcctggtgggcgctgccatggcctgtgccttgggatatgatattcactttcatgacaagaaaatcctgttgctcgaagcaggtccaaagaaagtactggagaaattgtcagaaacttacagcaacagggtcagctccatttcccctggctctgcaacgcttctcagtagttttggtgcctgggaccatatctgcaacatgagatacagagcctttcggcgaatgcaggtgtgggacgcctgctcagaggccctgataatgtttgataaggataatttagatgacatgggctatatcgtggagaatgatgtcatcatgcatgctctcactaagcagttggaggctgtgtctgaccgagtgacggttctctacaggagcaaagccattcgctatacctggccttgtccatttcctatggccgactccagcccttgggttcatattaccctaggtgatggcagcaccttccagaccaaattgttgataggtgcagatggtcacaactccggagtacggcaggctgttggaatccagaatgtgagctggaactatgaccagtctgctgttgtggctactctgcatttatcagaggccacagaaaacaacgtagcctggcagagatttcttccctctgggcctattgctctgctcccgctctcagacaccttgagttccttggtttggtccacgtcccatgaacatgcagcagagctagttagcatggatgaggaaaaatttgtggatgccgttaactctgccttttggagtgatgctgaccacacggacttcatcgacacagctggtgccatgctgcagtatgctgtcagccttctgaagcccactaaggtctcggctcgccagctgcccccaagcgtagccagggtggatgccaaaagccgagttctgtttcctcttgggttgggacatgctgctgagtacgtcaggcctcgggtggcgctcattggggatgcagcccacagagtccatccgcttgcaggacagggtgtcaacatgggctttggggatatctccagcttggcccatcacctcagtacggcagccttcaatgggaaggacttaggttccgtgagccacctcacaggttatgaaacagaaagacagcgtcacaacactgctcttctggctgctacagacttactaaaaaggctctattctaccagtgcctccccgcttgtgttgctcaggacgtggggcttgcaggccacaaatgcagtgtctccactcaaagaacagattatggcctttgcaagcaaatgagtactcctctcctaaagaaagattacgttgatgaaaaagaacatcctgcccaggacccatcatacatattttcaagatcttatttaatttaataaacttactttacattaaaattctctttttcttctttgcttaatgggcctgtggcacccaaataatgaatgataatttgctgtgaggagcgtatattagccagaccaaaggaaaaaacttcgaaggaagacttacaatttggttgaaaagagctttttattactaaaaaacccacaaggtgctgtctcactcatttccagttaatcatttctaaagagaaaatttacattttgtttttgttttaatgttggtcataaatttatacagttgttttttgatagaggtaagaattagactcgatgcatttttgttagaattgctgtttaaatgttaacatcagaatgcaaattaaatataaattgctttaacctttgttacaggtatactggactttctgaaaggaaaaccaggtctcattaatgctagttattactttatcacagcaccagatttccattttatttatggttcctctctgggacaccactgtcggtttaataaaacaataaataattcattgcacagatccgaagacctcaggaaccagatcacaagggaaaccgattagcagcagaatt

SEQ ID NO: 255999 - DNA, 1407 bp, Artificial Sequence
  derived and/or modified sequence
atggccgccagactggtgagcagatgcggcgccgtgagagccgccccccacagcggccccctggtgagctggagaagatggagcggcgccagcaccgacaccgtgtacgacgtggtggtgagcggcggcggcctggtgggcgccgccatggcctgcgccctgggctacgacatccacttccacgacaagaagatcctgctgctggaggccggccccaagaaggtgctggagaagctgagcgagacctacagcaacagagtgagcagcatcagccccggcagcgccaccctgctgagcagcttcggcgcctgggaccacatctgcaacatgagatacagagccttcagaagaatgcaggtgtgggacgcctgcagcgaggccctgatcatgttcgacaaggacaacctggacgacatgggctacatcgtggagaacgacgtgatcatgcacgccctgaccaagcagctggaggccgtgagcgacagagtgaccgtgctgtacagaagcaaggccatcagatacacctggccctgccccttccccatggccgacagcagcccctgggtgcacatcaccctgggcgacggcagcaccttccagaccaagctgctgatcggcgccgacggccacaacagcggcgtgagacaggccgtgggcatccagaacgtgagctggaactacgaccagagcgccgtggtggccaccctgcacctgagcgaggccaccgagaacaacgtggcctggcagagattcctgcccagcggccccatcgccctgctgcccctgagcgacaccctgagcagcctggtgtggagcaccagccacgagcacgccgccgagctggtgagcatggacgaggagaagttcgtggacgccgtgaacagcgccttctggagcgacgccgaccacaccgacttcatcgacaccgccggcgccatgctgcagtacgccgtgagcctgctgaagcccaccaaggtgagcgccagacagctgccccccagcgtggccagagtggacgccaagagcagagtgctgttccccctgggcctgggccacgccgccgagtacgtgagacccagagtggccctgatcggcgacgccgcccacagagtgcaccccctggccggccagggcgtgaacatgggcttcggcgacatcagcagcctggcccaccacctgagcaccgccgccttcaacggcaaggacctgggcagcgtgagccacctgaccggctacgagaccgagagacagagacacaacaccgccctgctggccgccaccgacctgctgaagagactgtacagcaccagcgccagccccctggtgctgctgagaacctggggcctgcaggccaccaacgccgtgagccccctgaaggagcagatcatggccttcgccagcaagtag

SEQ ID NO: 256000 - DNA, 1407 bp, Artificial Sequence
  derived and/or modified sequence
atggccgccagactcgtgtccagatgtggcgctgttagagccgcaccccactccgggccccttgtgtcatggcggagatggtctggcgcctcaactgataccgtttacgatgtggttgtgagcggaggcggcctggtgggagcagcaatggcctgcgctcttgggtatgacatccattttcacgacaagaaaattttgctcctcgaggcaggccccaagaaggtgttggaaaaacttagtgaaacctactctaatagagtctcatctataagccctggatctgctacacttctgagctcatttggcgcctgggaccacatttgtaacatgaggtaccgagcatttcgcaggatgcaggtgtgggacgcttgttccgaagctttgatcatgttcgataaagataacctggatgacatggggtatattgtggagaatgacgtaataatgcacgccctcaccaaacagcttgaggccgtgagcgaccgcgttaccgtcttgtacaggtctaaagccattcgctacacttggccttgccctttccccatggctgattcctccccatgggtgcacattactcttggagacggctcgactttccagacgaagctgctcattggagcagatggtcataactctggggtgcgtcaagcggtcggcatccagaatgtgagttggaactatgatcaatccgccgttgtcgctacactgcatctgtccgaggcaaccgagaataatgttgcttggcaacggttcctcccctcaggccctatagccctcctccctcttagtgacacactgtcctccttggtctggagcacatctcacgagcacgctgcagaactggtcagtatggatgaggaaaagtttgtggatgctgtgaacagtgctttttggtcggacgcagatcacacagatttcatcgacaccgcaggagccatgctccagtatgcagtgagccttttgaaaccaaccaaggtgagtgcacgccagctaccacctagtgtggccagagttgacgctaaatcgagagtgctcttccccttgggcctgggtcatgccgcagagtacgtgcggcccagagtggcccttatcggtgatgctgcacaccgggtccaccctctggcaggccagggagtgaacatggggtttggcgacatttcctctcttgctcaccacttatctacagctgctttcaacggcaaggacctgggctctgtgagtcatcttactggttatgaaactgagcgtcagagacacaatactgcccttctggcggctaccgacctcttgaaacgtctttattccacatccgctagcccccttgtcctcctacgcacatggggactgcaggcaactaacgcagtgtctccacttaaggaacagattatggcttttgcctctaagtag

SEQ ID NO: 256001 - DNA, 1407 bp, Artificial Sequence
  derived and/or modified sequence
atggccgcccggctggtgagccgctgtggggctgtgcgggccgccccccacagcggccccctggtgtcctggaggcgctggagcggggccagcacagacacagtgtatgatgtggtggtgtctgggggcggcctggtgggcgccgccatggcctgtgccctgggctatgacatccacttccatgacaagaagatcctgctgctggaggccggccccaagaaggtgctggagaagctgtctgagacctacagcaacagagtgagcagcatcagccctggcagcgccaccctgctgagcagctttggagcctgggaccacatctgcaacatgagataccgggccttccggaggatgcaggtgtgggatgcctgcagcgaggccctgatcatgtttgacaaggacaacctggatgacatgggctacatcgtggagaatgatgtgatcatgcacgccctgaccaagcagctggaggccgtgtctgacagagtgacagtgctgtaccgcagcaaggccatccgctacacctggccctgccccttccccatggctgacagcagcccctgggtgcacatcaccctgggagatggcagcaccttccagaccaagctgctgattggagcagatggccacaacagcggcgtgcggcaggccgtgggcatccagaatgtgtcctggaactatgaccagagcgctgtggtggccaccctgcacctgtctgaggccacagaaaataatgtggcctggcagcgcttcctgcccagcggccccatcgccctgctgcccctgagtgacaccctgagcagcctggtgtggagcaccagccatgaacatgctgctgagctggtgtccatggatgaggagaagtttgtggatgctgtgaacagcgccttctggagcgatgctgaccacacagacttcatcgacacagctggggccatgctgcagtatgctgtgtccctgctgaagcccaccaaggtgtctgcccggcagctgccccccagcgtggcccgggtggatgccaagagccgggtgctcttccccctgggcctgggccatgctgctgaatatgtgcggccccgggtggccctgattggagatgctgcccaccgggtgcaccccctggccggccagggcgtgaacatgggctttggagacatcagcagcctggcccaccacctgagcacagctgccttcaacgggaaggacctgggctctgtgagccacctgaccggctatgaaacagagcggcagaggcacaacacagccctgctggccgccacagacctgctgaagaggctgtacagcaccagcgccagccccctggtgctgctgcggacctggggcctgcaggccaccaatgctgtgagccccctgaaggagcagatcatggcctttgccagcaagtag

SEQ ID NO: 256002 - DNA, 1407 bp, Artificial Sequence
  derived and/or modified sequence
atggccgcccggctggtgagccggtgcggcgccgtgcgggccgccccgcactccggccccttagtttcttggcgaaggtggagcggagcaagtaccgacaccgtgtatgatgtcgttgtaagcggcggcggactggttggggctgctatggcgtgcgccttgggatatgatatccattttcacgacaagaaaattctactgctggaggctgggcctaagaaggtactggaaaaactgtcagaaacgtattcaaatcgggtttcatcaatttccccaggaagtgcgaccttactgagctccttcggtgcctgggaccacatctgcaatatgaggtaccgagctttccggcgaatgcaggtgtgggacgcttgcagcgaggctctgatcatgtttgacaaagataacctcgacgacatgggctatattgtcgaaaacgacgttattatgcacgcgctgactaaacaattagaggcagtttcagaccgcgtcacagtgctataccgatcaaaagcaattcgatatacgtggccctgtccatttcccatggccgattctagcccctgggtccatatcactcttggagacggctcgactttccagaccaaactgctaatcggcgcggacggccacaacagcggagtgaggcaagctgttggcatccaaaacgtgagttggaactacgaccagtcggctgtggtcgccaccctccatctgtctgaggccactgaaaacaatgttgcctggcaacgattcctaccatctggccccatcgcgcttttacccctgagcgataccttatcttcgctggtgtggagtacctctcatgagcacgccgccgaattagtgtcaatggacgaggaaaagtttgttgacgctgttaacagtgcattttggtccgatgccgatcacacagacttcatcgatacggccggcgctatgttacagtatgccgtttctttgctcaaacctaccaaggtaagcgctcgacagttacccccttctgttgcccgcgtggatgcaaagtcacgcgtactcttccccctgggccttggtcacgccgccgaatacgtccgccccagggtggccctgataggcgacgccgctcatcgggtccaccctttggccgggcaaggggtgaatatgggctttggggacatatcttcccttgctcaccatctgtcaaccgccgcattcaacggcaaggatttaggttctgtgagtcatctgactggctacgaaactgaacgacagcgtcacaatacagccctcctggctgcgactgaccttctcaagcgtctttacagcacttctgccagtcccttggtgttacttcgaacttggggcttgcaggcaaccaatgctgtgagccctctcaaggagcagatcatggctttcgcctccaagtag

SEQ ID NO: 256003 - DNA, 1407 bp, Artificial Sequence
  derived and/or modified sequence
atggctgcccgactggtttcaagatgtggggcagtgagagccgctccacatagcgggccactcgtatcttggagacgatggagcggtgcaagcacagacacagtttacgatgtggtggtctcaggcggaggactcgtgggggctgcgatggcttgtgccttgggttacgatattcattttcacgacaaaaagatcctattgctggaggccggaccgaaaaaagtactcgagaaactgtccgaaacatattccaaccgggtttcttctatttcgccaggttcggccacgcttctcagctcttttggagcatgggaccatatttgcaatatgagatatagagcatttcggaggatgcaggtttgggacgcatgctctgaagctctcatcatgttcgacaaagataacctggacgacatggggtacattgtcgaaaatgatgtgataatgcacgctttgacaaagcagcttgaggccgtatcagatagggtcacagtgttgtacaggtccaaggccatcagatatacatggccatgtcctttcccaatggctgactcttctccatgggtgcacattacgttgggggacgggtcaactttccagaccaaattattaataggggctgatggccataatagtggggttcggcaagcggtcggaatccagaacgtcagctggaactatgaccaatcagctgttgtagccaccctccacctcagcgaggccaccgagaacaacgtcgcatggcagcgctttttgccttctggcccaattgctctgctgccactgagtgatacactctcatcattggtgtggtcaacatcacatgaacatgcagcagagctagtatccatggatgaagagaagttcgtggatgcagtgaacagtgcattctggtctgacgccgatcatactgattttattgacacagcgggagcaatgctgcagtacgccgtgtcactgttaaaacccacaaaagtctcagcaagacagctgcctccttcggtagcccgtgtggatgctaaatcacgtgtcctgtttccgctgggactcggccatgcggctgaatatgtcagacccagagtcgcattgataggcgacgcagcacatagagtgcatcccctggccggacaaggcgttaatatgggattcggcgatatctcttcccttgcccaccatctctcaactgctgcttttaacggaaaagacctggggtcagtgtcccacttgacaggatatgaaactgaacgccaacgccataacacagccctcctggccgctactgacctcttaaaacgcctgtatagtacaagcgcttctccactagtactgttgagaacctggggacttcaagcaacaaatgcagtgtctcctctgaaagaacagatcatggcgttcgccagtaaatag

SEQ ID NO: 256004 - protein, 443 aa, Artificial Sequence
  derived and/or modified sequence
MRGQGPPLSSFGVWLASRAASDPSRPRRQGYDIHFHDKKILLLEAGPKKVLEKLSETYSNRVSSISPGSATLLSSFGAWDHICNMRYRAFRRMQVWDACSEALIMFDKDNLDDMGYIVENDVIMHALTKQLEAVSDRVTVLYRSKAIRYTWPCPFPMADSSPWVHITLGDGSTFQTKLLIGADGHNSGVRQAVGIQNVSWNYDQSAVVATLHLSEATENNVAWQRFLPSGPIALLPLSDTLSSLVWSTSHEHAAELVSMDEEKFVDAVNSAFWSDADHTDFIDTAGAMLQYAVSLLKPTKVSARQLPPSVARVDAKSRVLFPLGLGHAAEYVRPRVALIGDAAHRVHPLAGQGVNMGFGDISSLAHHLSTAAFNGKDLGSVSHLTGYETERQRHNTALLAATDLLKRLYSTSASPLVLLRTWGLQATNAVSPLKEQIMAFASK

SEQ ID NO: 256005 - DNA, 1608 bp, Artificial Sequence
  derived and/or modified sequence
cctctccgggattcctttcccgggggcagtctcttttctctcctcacctgacggctcccctccgcgcctccgggggctccctcaggcctccccacggtcatttcagctggacagaggcagcagcgacagtgacagcgatagtggcagcagcggtggcagcgagagctatgcggggccagggtccacccctttctagctttggcgtctggttggcttccagggcagcctccgatccatcccgcccgaggaggcaaggatatgatattcactttcatgacaagaaaatcctgttgctcgaagcaggtccaaagaaagtactggagaaattgtcagaaacttacagcaacagggtcagctccatttcccctggctctgcaacgcttctcagtagttttggtgcctgggaccatatctgcaacatgagatacagagcctttcggcgaatgcaggtgtgggacgcctgctcagaggccctgataatgtttgataaggataatttagatgacatgggctatatcgtggagaatgatgtcatcatgcatgctctcactaagcagttggaggctgtgtctgaccgagtgacggttctctacaggagcaaagccattcgctatacctggccttgtccatttcctatggccgactccagcccttgggttcatattaccctaggtgatggcagcaccttccagaccaaattgttgataggtgcagatggtcacaactccggagtacggcaggctgttggaatccagaatgtgagctggaactatgaccagtctgctgttgtggctactctgcatttatcagaggccacagaaaacaacgtagcctggcagagatttcttccctctgggcctattgctctgctcccgctctcagacaccttgagttccttggtttggtccacgtcccatgaacatgcagcagagctagttagcatggatgaggaaaaatttgtggatgccgttaactctgccttttggagtgatgctgaccacacggacttcatcgacacagctggtgccatgctgcagtatgctgtcagccttctgaagcccactaaggtctcggctcgccagctgcccccaagcgtagccagggtggatgccaaaagccgagttctgtttcctcttgggttgggacatgctgctgagtacgtcaggcctcgggtggcgctcattggggatgcagcccacagagtccatccgcttgcaggacagggtgtcaacatgggctttggggatatctccagcttggcccatcacctcagtacggcagccttcaatgggaaggacttaggttccgtgagccacctcacaggttatgaaacagaaagacagcgtcacaacactgctcttctggctgctacagacttactaaaaaggctctattctaccagtgcctccccgcttgtgttgctcaggacgtggggcttgcaggccacaaatgcagtgtctccactcaaagaacagattatggcctttgcaagcaaatgagtactcctctcctaaagaaagattacgttgatgaaaaagaacatcctgcccaggacccatcatacatattttcaagatcttatttaatttaataaacttactttacatt

SEQ ID NO: 256006 - DNA, 1332 bp, Artificial Sequence
  derived and/or modified sequence
atgagaggccagggcccccccctgagcagcttcggcgtgtggctggccagcagagccgccagcgaccccagcagacccagaagacagggctacgacatccacttccacgacaagaagatcctgctgctggaggccggccccaagaaggtgctggagaagctgagcgagacctacagcaacagagtgagcagcatcagccccggcagcgccaccctgctgagcagcttcggcgcctgggaccacatctgcaacatgagatacagagccttcagaagaatgcaggtgtgggacgcctgcagcgaggccctgatcatgttcgacaaggacaacctggacgacatgggctacatcgtggagaacgacgtgatcatgcacgccctgaccaagcagctggaggccgtgagcgacagagtgaccgtgctgtacagaagcaaggccatcagatacacctggccctgccccttccccatggccgacagcagcccctgggtgcacatcaccctgggcgacggcagcaccttccagaccaagctgctgatcggcgccgacggccacaacagcggcgtgagacaggccgtgggcatccagaacgtgagctggaactacgaccagagcgccgtggtggccaccctgcacctgagcgaggccaccgagaacaacgtggcctggcagagattcctgcccagcggccccatcgccctgctgcccctgagcgacaccctgagcagcctggtgtggagcaccagccacgagcacgccgccgagctggtgagcatggacgaggagaagttcgtggacgccgtgaacagcgccttctggagcgacgccgaccacaccgacttcatcgacaccgccggcgccatgctgcagtacgccgtgagcctgctgaagcccaccaaggtgagcgccagacagctgccccccagcgtggccagagtggacgccaagagcagagtgctgttccccctgggcctgggccacgccgccgagtacgtgagacccagagtggccctgatcggcgacgccgcccacagagtgcaccccctggccggccagggcgtgaacatgggcttcggcgacatcagcagcctggcccaccacctgagcaccgccgccttcaacggcaaggacctgggcagcgtgagccacctgaccggctacgagaccgagagacagagacacaacaccgccctgctggccgccaccgacctgctgaagagactgtacagcaccagcgccagccccctggtgctgctgagaacctggggcctgcaggccaccaacgccgtgagccccctgaaggagcagatcatggccttcgccagcaagtag

SEQ ID NO: 256007 - DNA, 1332 bp, Artificial Sequence
  derived and/or modified sequence
atgcgcggccagggcccccccctgtccagttttggagtctggcttgcttctagggccgcttccgaccctagtagaccgaggaggcagggctacgatatccacttccatgataagaagattctgctgcttgaggcaggtcctaagaaagtgctggagaaactgtccgagacatattctaacagggtgtcttctatttcacccggcagcgccacactgttatcttcattcggtgcatgggaccacatatgcaacatgcgatacagagcttttaggcgtatgcaggtgtgggatgcctgttcagaggccctgatcatgtttgataaggacaacttagacgacatgggctacatcgtcgagaatgacgtgatcatgcacgcactgactaaacaattggaagccgtttcagatcgagtgactgtcctctaccgcagcaaagcgattcgttacacctggccatgcccctttcctatggcagactcttctccctgggtgcacatcacccttggagatggatctacatttcaaactaagctgctgatcggggccgacggccacaacagcggagtgcggcaggcagtgggcattcagaatgtatcttggaactatgatcaatccgccgtggtcgctacactgcatctctctgaggccacagagaataacgtcgcctggcagaggttcttgccctctggacccattgctttgctgccacttagcgacacccttagcagcctggtgtggagcacctcacatgagcacgctgcagagctggtgtccatggacgaagaaaagttcgtagatgccgtgaattccgctttctggtctgatgccgatcacacggatttcattgacaccgccggagcaatgctgcagtacgccgtgagcttgcttaagcccactaaggtgtctgctcggcaactcccaccctcggttgcacgggtggacgccaagtctcgcgttctgttcccgctgggattgggccatgcagccgaatacgtcagaccaagggtggccctgattggcgatgcagcccatagagtgcatcctctggcgggacagggtgttaacatggggtttggcgatatcagtagtcttgctcatcatttatctactgccgcattcaacggtaaagaccttggttccgtgagtcatctaacagggtatgaaacggaaagacagagacataacaccgccttgttggccgccaccgatctgctgaagagactttactccactagtgccagtcccctggtgttgctgcgcacctggggactgcaggccactaatgccgttagtccactcaaggagcaaattatggcttttgcgtccaaatag

SEQ ID NO: 256008 - DNA, 1332 bp, Artificial Sequence
  derived and/or modified sequence
atgaggggccagggcccccccctgagcagctttggagtgtggctggccagcagagctgccagtgaccccagccggccccggcggcagggctatgacatccacttccatgacaagaagatcctgctgctggaggccggccccaagaaggtgctggagaagctgtctgagacctacagcaacagagtgagcagcatcagccctggcagcgccaccctgctgagcagctttggagcctgggaccacatctgcaacatgagataccgggccttccggaggatgcaggtgtgggatgcctgcagcgaggccctgatcatgtttgacaaggacaacctggatgacatgggctacatcgtggagaatgatgtgatcatgcacgccctgaccaagcagctggaggccgtgtctgacagagtgacagtgctgtaccgcagcaaggccatccgctacacctggccctgccccttccccatggctgacagcagcccctgggtgcacatcaccctgggagatggcagcaccttccagaccaagctgctgattggagcagatggccacaacagcggcgtgcggcaggccgtgggcatccagaatgtgtcctggaactatgaccagagcgctgtggtggccaccctgcacctgtctgaggccacagagaacaacgtggcctggcagcgcttcctgcccagcggccccatcgccctgctgcccctgagtgacaccctgagcagcctggtgtggagcaccagccatgagcacgccgctgagctggtgtccatggatgaggagaagtttgtggatgctgtgaacagcgccttctggagcgatgctgaccacacagacttcatcgacacagctggggccatgctgcagtatgctgtgtccctgctgaagcccaccaaggtgtctgcccggcagctgcccccatctgtggcccgggtggatgccaagagccgggtgctcttccccctgggcctgggccacgccgcagaatatgtgcggccccgggtggccctgattggagatgctgcccaccgggtgcaccccctggccggccagggcgtgaacatgggctttggagacatcagcagcctggcccaccacctgagcacagctgccttcaacgggaaggacctgggctctgtgagccacctgaccggctatgaaacagagcggcagaggcacaacacagccctgctggccgccacagacctgctgaagaggctgtacagcaccagcgccagccccctggtgctgctgcggacctggggcctgcaggccaccaatgctgtgagccccctgaaggagcagatcatggcctttgccagcaagtag

SEQ ID NO: 256009 - DNA, 1332 bp, Artificial Sequence
  derived and/or modified sequence
atgcggggccagggcccccccctgagcagcttcggcgtgtggctggcaagcagagcggctagcgacccctcacggccccggcgacagggatatgatatacattttcatgataagaaaatacttctgctggaggccggacccaaaaaagtcctggaaaagttaagcgaaacatactccaaccgcgtgagctctatttccccaggatcagctactctgctgagttcctttggagcttgggatcatatttgtaatatgagatatagagcattcaggcgaatgcaggtctgggacgcttgcagcgaggcactgatcatgttcgataaagataatctcgatgatatggggtatattgtggaaaatgatgtaataatgcatgccctgacgaagcagctcgaggcagtgtccgaccgggttacagtgctgtatagaagtaaggccatccgctacacatggccgtgccccttcccaatggcggactcttctccttgggtacatataacattgggagatgggtcaacgtttcagacgaagctcctcatcggggccgacggacataactctggcgtgaggcaggcagtaggaatccaaaatgtgagctggaattatgatcagtctgccgtcgtggcgacattacacctatccgaagccacagaaaataatgtagcatggcagcgatttctgcccagtggccctattgccctcctacccctctctgacacactttccagccttgtgtggtcgactagtcatgaacacgccgctgaacttgtcagtatggatgaggaaaaatttgtcgacgctgttaactccgccttttggtcagacgcagaccacacagacttcatcgacactgcgggagcaatgttgcagtatgccgtctccctgctgaagcccaccaaagttagtgccaggcaacttccacccagcgtggcccgcgtggacgccaaatcccgggtcctttttcccttggggctcggccatgccgcggagtacgtgcgacctagggtagcgcttatcggggatgctgcccatcgcgtgcacccgcttgccggtcagggagtcaacatgggctttggtgacatttccagtctggctcatcatctgtccacagccgctttcaacggcaaagacctgggctccgtcagtcatctaaccgggtacgagactgagcggcaacgccacaatactgccctgcttgcagcaaccgacctgctgaagcgcctgtatagcacctcggcatctccactggtcctgctgcgcacgtggggactacaggctacaaacgcagtgagcccactaaaagagcagatcatggcatttgccagcaaatag

SEQ ID NO: 256010 - DNA, 1332 bp, Artificial Sequence
  derived and/or modified sequence
atgaggggacagggccctccattatcctcttttggcgtctggctggccagcagggcagctagcgacccgagccggccaaggagacagggctatgacatccactttcacgacaaaaaaatccttttgctggaagccggaccgaagaaagtgttggagaagctcagtgagacctacagcaatcgtgtatccagcatctccccaggatccgccacactgctgagctccttcggggcatgggatcatatttgtaacatgcgctaccgggcattccgacgaatgcaggtctgggacgcatgttcagaagctcttattatgttcgataaagacaacctggacgacatggggtacattgtggaaaacgacgtcatcatgcatgccctaacaaagcagctagaagccgtgtctgatagggtgactgtcctgtatcggtccaaagcaatcaggtacacatggccctgcccattcccaatggccgactccagtccctgggtgcatatcactctaggcgatggctcaacctttcagacaaagctcttgattggtgcagacgggcacaacagcggggtaaggcaggctgttggcattcagaacgtgtcctggaactacgaccagtccgcagtggtggcaaccctccacctttcggaggcaaccgagaacaacgtggcttggcaacggttcttgccctccggaccgattgcgctgttacccttatcagacaccctttcatccctcgtctggtcgacatcacacgagcatgcagctgagctcgtttctatggacgaggaaaaatttgtggacgcagtgaatagtgccttctggtctgacgctgatcataccgacttcatagacaccgccggagcaatgctgcagtatgccgtaagtctgctaaagccgactaaggtatcagccaggcagctacctccttctgtcgcacgcgtggatgccaaatcccgggtgctcttccctctcggtctgggccatgcagctgagtacgttaggccaagagtcgctctgatcggagacgccgcacacagagtccacccgctggctggtcagggtgtgaacatgggatttggtgatatctcctctctagctcaccatctctcaactgcagccttcaatggtaaggatctgggctccgtctcccatctgaccggatacgaaactgaaaggcagcgccacaatactgctttattggccgcaacagacctgctgaaacggctgtattctacctcagctagcccattggtgcttctccgaacctgggggctgcaggcaacaaatgcagtgtcccccttaaaggagcagatcatggcattcgccagtaagtag

SEQ ID NO: 256011 - protein, 278 aa, Artificial Sequence
  derived and/or modified sequence
MQWLRVRESPGEATGHRVTMGTAALGPVWAALLLFLLMCEIPMVELTFDRAVASGCQRCCDSEDPLDPAHVSSASSSGRPHALPEIRPYINITILKGDKGDPGPMGLPGYMGREGPQGEPGPQGSKGDKGEMGSPGAPCQKRFFAFSVGRKTALHSGEDFQTLLFERVFVNLDGCFDMATGQFAAPLRGIYFFSLNVHSWNYKETYVHIMHNQKEAVILYAQPSERSIMQSQSVMLDLAYGDRVWVRLFKRQRENAIYSNDFDTYITFSGHLIKAEDD

SEQ ID NO: 256012 - DNA, 1647 bp, Artificial Sequence
  derived and/or modified sequence
tcctctgctgggcctgggggtctgggccagcaacaagttagtattgcagacatgggccaaggagccagaggccatgcagtggctcagggtccgtgagtcgcctggggaggccacaggacacagggtcaccatggggacagccgccctgggtcccgtctgggcagcgctcctgctctttctcctgatgtgtgagatccctatggtggagctcacctttgacagagctgtggccagcggctgccaacggtgctgtgactctgaggaccccctggatcctgcccatgtatcctcagcctcttcctccggccgcccccacgccctgcctgagatcagaccctacattaatatcaccatcctgaagggtgacaaaggggacccaggcccaatgggcctgccagggtacatgggcagggagggtccccaaggggagcctggccctcagggcagcaagggtgacaagggggagatgggcagccccggcgccccgtgccagaagcgcttcttcgccttctcagtgggccgcaagacggccctgcacagcggcgaggacttccagacgctgctcttcgaaagggtctttgtgaaccttgatgggtgctttgacatggcgaccggccagtttgctgctcccctgcgtggcatctacttcttcagcctcaatgtgcacagctggaattacaaggagacgtacgtgcacattatgcataaccagaaagaggctgtcatcctgtacgcgcagcccagcgagcgcagcatcatgcagagccagagtgtgatgctggacctggcctacggggaccgcgtctgggtgcggctcttcaagcgccagcgcgagaacgccatctacagcaacgacttcgacacctacatcaccttcagcggccacctcatcaaggccgaggacgactgagggcctctgggccaccctcccggctggagagctcagctgatacggcatcctgcgagaagacctgccctcctcactgggatccccttcctgcctcctcccagggctctgccagggccttgctcagtcccttccaccaaagtcatctgaacttccgtttccccagggcctccagctgccctcagacactgatgtctgtccccaggtgctctctgcccctcatgcccctctcaccggcccagtgccccgactctccaggctttatcaaggtgctaaggcccgggtgggcagctcctcgtctcagagccctcctccggcctggtgctgcctttacaaacacctgcaggagaagggccacggaagccccaggctttagagccctcagcaggtctggggagctagagcaaaggagggacctcaggccttccgtttcttcttccagggtggggtggcctggtgttcccctagccttccaaacccaggtggcctgcccttctccccagagggaggcggcctccgcccattggtgctcatgcagactctggggctgaggtgccccggggggtgatctctggtgctcacagccgaggagccgtggctccatggccagatgacggaaacagggtctgaccaagtgccaggaagacctgtgctataaaccaccctgcctgatcctgcccctgcctgaccccgccacgccctgccgtccagcatgattaaagaatgctgtctcctcttgg

SEQ ID NO: 256013 - DNA, 837 bp, Artificial Sequence
  derived and/or modified sequence
atgcagtggttgcgggtgagggagtcccctggcgaggcaacggggcacagggtgaccatgggcaccgcagcactgggaccagtatgggccgctctgctcttgttcctgctcatgtgtgagattccaatggtggagctgacctttgatagagccgtggcgtcgggctgccaacgctgttgcgactccgaggacccactggacccagctcatgtctcgtcagcctcaagttccggtagaccacacgcactcccagagatcaggccctatatcaatattacaattctgaaaggcgacaagggagaccctgggcctatgggcctgcccggatacatgggccgagaaggtccccagggggaacctggcccacaaggctccaagggagataagggagagatggggagtcctggcgctccatgccagaaacgtttcttcgcattcagcgtgggaagaaaaaccgccctgcacagcggtgaagattttcagactctcctcttcgagagggtgttcgttaatttggacggatgttttgacatggccaccggtcagtttgctgccccactcagggggatttatttcttttctttaaatgtccactcctggaattacaaagaaacctacgtccatataatgcacaaccagaaggaggcagtcattctttacgcacagccatccgagcggagcataatgcaatctcaatccgtgatgctggaccttgcctatggtgatcgcgtgtgggtgcgactcttcaaacgtcagagagagaatgcaatatattcaaatgattttgacacttacattaccttttcggggcacctgattaaggcagaggatgactag

SEQ ID NO: 256014 - DNA, 837 bp, Artificial Sequence
  derived and/or modified sequence
atgcagtggcttcgcgtgagagaatctccaggcgaagcgaccgggcatcgagtgaccatggggactgctgctttgggcccagtatgggcagctctgttactgtttctgctcatgtgcgagattcccatggtggagctgacctttgaccgagccgtcgcctcaggctgtcagaggtgttgcgactctgaggacccacttgatccagctcacgtaagcagcgcaagttccagcggcaggccacacgccttgccagaaatcagaccctatattaacattaccattctcaaaggagataagggcgatccaggccctatgggcctgcctggatatatgggacgggaagggcctcagggagaacctggaccgcagggcagtaaaggagataaaggcgagatgggctcacctggcgcaccttgtcagaagagatttttcgcattcagtgtgggtaggaaaaccgccctgcactccggtgaggattttcagactctcttgttcgaaagagtctttgttaatctggatggatgtttcgacatggcaactgggcagtttgctgcaccactccggggaatctattttttttcattaaacgtgcattcctggaattacaaagagacttatgtacatataatgcataatcagaaagaagccgtaattctgtacgcgcaaccgtcagagcggagcattatgcagtcgcagtctgtaatgctcgatctagcatacggcgacagggtctgggtccggctgttcaagagacaaagagagaatgctatttatagcaatgacttcgatacttatattaccttcagtgggcaccttattaaggccgaagacgattag

SEQ ID NO: 256015 - DNA, 837 bp, Artificial Sequence
  derived and/or modified sequence
atgcagtggctgagggtgcgagaatctccaggcgaagccacggggcaccgcgttaccatgggcacagctgcgctagggcccgtgtgggccgccctgttgctatttctgctcatgtgtgagattcccatggtggagctaacattcgacagggctgttgcttctggctgtcagagatgctgtgatagtgaggatccactcgatcctgcgcacgtttcttctgctagctcttccggacggccacacgcactgcccgaaattagaccctatatcaatatcacaattcttaaaggggacaagggtgatccaggacctatgggccttccaggctatatgggaagagaaggtcctcaaggagaaccaggcccacagggctctaaaggggataaaggcgagatgggttctcctggtgctccctgccagaaaaggttttttgcctttagcgtgggacggaagaccgccctccactctggcgaggatttccagacattgctctttgagcgcgtgtttgtcaatttggatgggtgttttgatatggctaccggtcagtttgcagctcctctccgcggcatttacttctttagcctcaacgttcattcttggaattataaagagacgtatgtccatataatgcataatcaaaaggaggctgtgatcttgtatgcacaaccttcagagcggagcattatgcaatcacagtccgtcatgctggatctagcctacggtgatagagtgtgggtgcgtctcttcaagagacagagggaaaacgccatttactccaacgattttgacacatatatcactttttccggtcacctgatcaaagcagaggacgattag

SEQ ID NO: 256016 - DNA, 837 bp, Artificial Sequence
  derived and/or modified sequence
atgcagtggctcagggtgcgagagagcccaggtgaagccacagggcatcgcgttacaatgggcaccgcagctctcggaccagtatgggcggctctcctgctctttcttcttatgtgcgagatccctatggtagaacttacattcgatcgggctgtggccagtgggtgccagcgatgctgcgacagcgaggaccccctggacccggcgcacgtgagttcagcctcgtccagcggccgaccccacgctcttcccgaaatacgtccttacatcaacatcactattctgaaaggtgataaaggtgaccccggacccatgggactcccaggttatatgggacgggaaggcccccagggagagcctggacctcagggtagtaagggggacaagggtgagatgggatcccctggagcaccttgccagaaacgcttcttcgccttttccgttggaaggaaaacagcccttcattcaggcgaagactttcagaccctgctattcgagcgagtattcgtaaatttggatggctgtttcgacatggctacaggccagttcgcagcacctttaagaggaatctactttttctctctaaatgtccactcctggaattacaaggaaacatacgtccatataatgcacaatcagaaagaggctgtcatcctgtatgcccagccaagcgaacggtcgatcatgcagtcccagtccgtcatgttggacttagcctacggtgatcgagtctgggtccgcctatttaagcggcagagggaaaacgctatctatagtaacgactttgatacatatataaccttcagcggacacctgatcaaagccgaggacgactag

SEQ ID NO: 256017 - DNA, 837 bp, Artificial Sequence
  derived and/or modified sequence
atgcagtggctgcgagtccgagagtcaccaggggaagcgaccggtcatcgcgttacaatgggcacagcagcattaggacccgtgtgggcggcgctactattatttcttctgatgtgtgaaatcccaatggtcgagctcacatttgacagagccgttgcttccggttgccaacggtgttgtgattccgaagaccccctggatcccgcacacgtctctagtgcctcttcttcaggacgcccccacgctcttccagaaatacgtccctatataaacattacgatcctgaagggggataaaggagatcccgggcctatgggtttgcctggctatatgggacgtgaaggtcctcaaggagagcctggtccccagggtagtaaaggggataaaggagaaatgggcagcccaggtgctccttgtcagaaaaggtttttcgcattctctgtcggacgcaagacagccttacacagtggggaagactttcaaactctcctgttcgagcgcgtgtttgtcaatctggacggctgttttgatatggcaacaggacaatttgctgctccattgcgcggaatttatttcttcagtcttaacgttcactcttggaactacaaagaaacatacgtacacattatgcacaatcagaaagaagccgtgatcctttatgcacagccaagcgaacgatccattatgcagtcacagtcagtcatgttggacctcgcttacggcgaccgggtctgggtgcggctgtttaaacgacaaagggagaacgccatctacagcaatgactttgacacttacatcacatttagcggacacttaatcaaagccgaagacgactag

SEQ ID NO: 256018 - DNA, 837 bp, Artificial Sequence
  derived and/or modified sequence
atgcaatggctccgcgttagagagtcacccggtgaagctactggccatagggtaactatgggcactgcggcgctgggaccggtgtgggctgcattacttctatttctgttaatgtgtgagattccaatggtcgagctgacttttgacagagccgttgcctcaggatgccaacgatgttgtgactctgaggacccactcgatccggcacacgtatcaagcgccagctcctcgggtcgtccccatgctcttcccgaaataagaccctacatcaatatcactatcctcaaaggcgacaagggggaccccggtccgatgggattgcccggctacatgggcagagagggaccccagggggagcctggaccacagggaagtaagggggataaaggggagatggggtcaccaggcgctccgtgtcagaaacgcttctttgctttctcggtgggaagaaagaccgctttacactcaggggaggattttcaaacacttcttttcgaaagagtctttgtgaatctcgatgggtgtttcgacatggcaaccggacagtttgccgcccccctcagagggatctactttttcagtctaaacgtgcatagctggaactataaagagacctatgttcacatcatgcacaatcaaaaagaagcggtgattctctatgcgcagccttcagaacgctccattatgcagtcccagtcagtgatgctagacttagcctatggcgacagggtgtgggtacggttgttcaaaagacagcgagagaatgcaatctattcaaacgacttcgacacgtatatcacattcagcggacacctcataaaagcggaggacgattag

SEQ ID NO: 256019 - DNA, 837 bp, Artificial Sequence
  derived and/or modified sequence
atgcagtggctgagagtgagagagagccccggcgaggccaccggccacagagtgaccatgggcaccgccgccctgggccccgtgtgggccgccctgctgctgttcctgctgatgtgcgagatccccatggtggagctgaccttcgacagagccgtggccagcggctgccagagatgctgcgacagcgaggaccccctggaccccgcccacgtgagcagcgccagcagcagcggcagaccccacgccctgcccgagatcagaccctacatcaacatcaccatcctgaagggcgacaagggcgaccccggccccatgggcctgcccggctacatgggcagagagggcccccagggcgagcccggcccccagggcagcaagggcgacaagggcgagatgggcagccccggcgccccctgccagaagagattcttcgccttcagcgtgggcagaaagaccgccctgcacagcggcgaggacttccagaccctgctgttcgagagagtgttcgtgaacctggacggctgcttcgacatggccaccggccagttcgccgcccccctgagaggcatctacttcttcagcctgaacgtgcacagctggaactacaaggagacctacgtgcacatcatgcacaaccagaaggaggccgtgatcctgtacgcccagcccagcgagagaagcatcatgcagagccagagcgtgatgctggacctggcctacggcgacagagtgtgggtgagactgttcaagagacagagagagaacgccatctacagcaacgacttcgacacctacatcaccttcagcggccacctgatcaaggccgaggacgactag

SEQ ID NO: 256020 - DNA, 2934 bp, Artificial Sequence
  derived and/or modified sequence
ccctcctctgctgggcctgggggtctgggccagcaacaagttagtattgcagacatgggccaaggagccagaggccatgcagtggctcagggtccgtgagtcgcctggggaggccacaggacacagggtcaccatggggacagccgccctgggtcccgtctgggcagcgctcctgctctttctcctgatgtgtgagatccctatggtggagctcacctttgacagagctgtggccagcggctgccaacggtgctgtgactctgaggaccccctggatcctgcccatgtatcctcagcctcttcctccggccgcccccacgccctgcctgagatcagaccctacattaatatcaccatcctgaagggtgacaaaggggacccaggcccaatgggcctgccagggtacatgggcagggagggtccccaaggggagcctggccctcagggcagcaagggtgacaagggggagatgggcagccccggcgccccgtgccagaagcgcttcttcgccttctcagtgggccgcaagacggccctgcacagcggcgaggacttccagacgctgctcttcgaaagggtctttgtgaaccttgatgggtgctttgacatggcgaccggccagtttgctgctcccctgcgtggcatctacttcttcagcctcaatgtgcacagctggaattacaaggagacgtacgtgcacattatgcataaccagaaagaggctgtcatcctgtacgcgcagcccagcgagcgcagcatcatgcagagccagagtgtgatgctggacctggcctacggggaccgcgtctgggtgcggctcttcaagcgccagcgcgagaacgccatctacagcaacgacttcgacacctacatcaccttcagcggccacctcatcaaggccgaggacgactgagggcctctgggccaccctcccggctggagagctcaggtgctggtcccgtcccctgcagggctcagtttgcactgctgtgaagcaggaaggccagggaggtccccggggacctggcattctggggagaccctgcttctatcttggctgccatcatccctcccagcctatttctgctcctctcttctctcttggacctattttaagaagcttgctaacctaaatattctagaactttcccagcctcgtagcccagcacttctcaaacttggaaatgcatgcgaatcacccggggttcgtgttaaatgcagattctgactcagcaggtctgagtgggtccaggattctgtgtttctcatatgttcctgggtgatgctgatggggtcagtctatgaaccacactggagcaaccaggttctaggactttctcaatattctagtactttctgaacattctggaatcctccccacattctagaattctcccaacatttttttttcttgagacagagtcttgctctgttgcccaggctagagtgcagtggtgcaatctcagttcactgcaacctctgcctcccgggttcaagcgattcttctgcctcagcctccctagtggctgggattacaggcgcctgctaccatgcctggctaatttttgtatttttagtagagatggggtttcaccatattggccaggctggtcttgaactcctgacttcaggtgacccacccgcctcggcctctcaaaatgctgggattacaggtgtgagccaccgtgcctggccaattccaacattcttaaattctctcatccctccagggctccccgtgctatgttctctttaccccttccccctcttctcttgctcaggcctgcaccactgcagccaccgttcatttattcattcattaaacactgagcactcactctgtgctgggtcccgggaagggtgagggggtcagacacaggccctgcccctgccctcagtgactggccagtccagcccaggcggggagagatgtgtacataggttttaaagcagacccagagctcatgggggcctgtgttctgggtgttcaggtgctgctggtcctccattacccactgctccccaaggctggtgggacggggtcccggtggcaggggcaggtatctccttcccgttcctcatccacctgcccagtgctcatcgttacagcaaaccccagggggccttggccaggtcaagggttctgtgaggagaggacccaggagtgtgggggcatttggggggtgaagtggcccccgaagaatggaacccacacccatagctctccccacagctgatacggcatcctgcgagaagacctgccctcctcactgggatccccttcctgcctcctcccagggctctgccagggccttgctcagtcccttccaccaaagtcatctgaacttccgtttccccagggcctccagctgccctcagacactgatgtctgtccccaggtgctctctgcccctcatgcccctctcaccggcccagtgccccgactctccaggctttatcaaggtgctaaggcccgggtgggcagctcctcgtctcagagccctcctccggcctggtgctgcctttacaaacacctgcaggagaagggccacggaagccccaggctttagagccctcagcaggtctggggagctagagcaaaggagggacctcaggccttccgtttcttcttccagggtggggtggcctggtgttcccctagccttccaaacccaggtggcctgcccttctccccagagggaggcggcctccgcccattggtgctcatgcagactctggggctgaggtgccccggggggtgatctctggtgctcacagccgaggagccgtggctccatggccagatgacggaaacagggtctgaccaagtgccaggaagacctgtgctataaaccaccctgcctgatcctgcccctgcctgaccccgccacgccctgccgtccagcatgattaaagaatgctgtctcctcttgg

SEQ ID NO: 256021 - DNA, 837 bp, Artificial Sequence
  derived and/or modified sequence
atgcagtggctgcgggttcgggaatcaccaggggaggctaccgggcaccgcgttacaatggggactgccgccttgggcccagtttgggcggcacttctgctgtttctcctaatgtgcgagattcccatggtggagctgaccttcgatcgtgcagtggcgagcgggtgccagcgctgctgcgacagcgaagacccactggaccccgcccatgtgtcgtcagccagcagcagtggcaggccccacgctcttccagaaatccggccctacatcaacatcaccatactcaaaggtgataagggggaccctggcccaatggggttgccagggtacatgggtagagagggccctcagggggaacccgggccgcagggtagtaaaggcgataagggggagatgggaagcccaggtgccccttgccagaagaggtttttcgctttctctgtaggccgcaagacagcgttgcacagtggagaagattttcagactttactattcgaacgcgtgtttgtgaacttagatggatgctttgatatggcgactgggcaattcgcggcgccactgcggggaatttattttttttctttaaatgtgcactcctggaactacaaggaaacgtacgtgcatattatgcacaatcagaaggaagccgtgatcctgtacgcccagcccagtgaacggtcaattatgcagtcccaatctgtaatgctggacctggcctatggcgatcgcgtgtgggtgaggttgtttaagcgccaaagggagaacgccatatactctaacgacttcgacacctacattacattctctgggcatctaataaaagctgaagatgattag

SEQ ID NO: 256022 - DNA, 837 bp, Artificial Sequence
  derived and/or modified sequence
atgcagtggctgcgagtgcgggaaagcccgggagaggcaacggggcaccgggtcactatgggcaccgcggccttgggccctgtgtgggctgccctccttctttttctcctcatgtgcgagatccctatggtcgaactcacatttgaccgcgctgtcgcttccggctgccagagatgctgcgactctgaagaccctctagaccctgcccatgtgtcttcagcctcatcgagcgggcgtccacacgcacttccagagatccgcccttatatcaacatcacaatactgaagggcgacaagggtgaccccggccctatgggactgccgggatacatggggagagaaggtccccagggtgagcccggaccccagggatcgaaaggcgacaaaggtgagatggggtctcctggtgccccgtgccagaaaaggttcttcgcattttcagtggggcggaaaactgccctgcacagcggagaggactttcaaactctgctgttcgaaagagtgtttgtcaatctcgacgggtgcttcgacatggctaccggacagttcgcagccccgctacggggaatttacttcttctctcttaacgtgcactcctggaattataaggagacatatgtccacatcatgcacaatcagaaggaggccgtgattctctacgcacagcctagtgagcgctcaatcatgcagtcgcagagtgtgatgctcgatctcgcctacggcgatcgggtgtgggtgcgcctctttaagagacagagggagaatgccatctactcaaacgacttcgatacctatattacattcagtgggcatctgataaaggcagaagacgattag

SEQ ID NO: 256023 - DNA, 837 bp, Artificial Sequence
  derived and/or modified sequence
atgcagtggctgcgggtgcgggagagccctggagaggccaccggccaccgggtgaccatgggcacagctgccctgggccctgtgtgggccgccctgctgctcttcctgctgatgtgtgagatccccatggtggagctgacctttgacagagctgtggccagcggctgccagcgctgctgtgacagcgaggaccccctggaccctgcccacgtgtcctctgccagcagcagcggccggccccacgccctgcctgagatccggccctacatcaacatcaccatcctgaagggggacaagggggaccccggccccatgggcctgcccggctacatgggccgggagggcccccagggcgagcccggcccccagggcagcaagggggacaagggggagatgggcagccctggggccccctgccagaagcgcttctttgccttctctgtgggcaggaagacagccctgcacagcggggaggacttccagaccctgctgtttgagcgggtgtttgtgaacctggatggctgctttgacatggccaccggccagtttgctgcccccctgcggggcatctacttcttcagcctgaatgtgcacagctggaactacaaggagacctacgtgcacatcatgcacaaccagaaggaggccgtcatcctgtatgcccagcccagcgagaggagcatcatgcagagccagagcgtgatgctggacctggcctacggggacagagtgtgggtgcggctcttcaagaggcagcgggagaatgccatctacagcaatgactttgacacctacatcaccttcagcggccacctgatcaaggccgaggatgactag

SEQ ID NO: 256024 - DNA, 837 bp, Artificial Sequence
  derived and/or modified sequence
atgcagtggctgcgggtgcgggagagccccggcgaggccaccggccatcgggtgaccatgggcaccgccgcccttgggccagtttgggcagctctgctgctgtttctgctgatgtgtgagatacctatggttgagctcacgttcgatcgggccgttgcaagtggttgccagaggtgttgcgattctgaggatcctttagacccagcccacgtcagttcggctagctcctctgggagaccacacgctttgcctgaaatccgcccgtacatcaatattacaatcctaaaaggcgacaagggagatcccgggcccatgggcctgcccggttacatgggtcgggaagggccacaaggcgagcctgggccccaaggaagcaagggcgacaagggcgaaatggggtcaccgggtgccccttgtcagaaacggtttttcgccttctctgttggtcggaaaaccgctctacacagcggcgaagacttccagactctccttttcgagcgcgtgtttgtaaatcttgatgggtgtttcgacatggcaaccggtcagtttgccgcccctcttcgcgggatttacttcttcagcctcaatgtccacagctggaattacaaagaaacgtacgtacatatcatgcacaaccagaaggaggccgtgatcttgtacgctcaaccttctgagcggtccatcatgcaatcgcagtccgtgatgctggacctggcttatggagatagagtgtgggtgaggcttttcaagcgccagagggagaatgcaatttattcaaacgatttcgacacatacatcacgttttcaggccatcttattaaggcagaagacgattag

SEQ ID NO: 256025 - DNA, 837 bp, Artificial Sequence
  derived and/or modified sequence
atgcagtggctgcgggtgcgggagagccccggcgaggccaccggccaccgcgtaaccatgggaacagccgctctggggccggtgtgggcagccttgttgctcttcctgttaatgtgtgagatcccaatggtggagctgacattcgatcgtgcagtcgcctcgggttgtcaaaggtgttgcgactccgaagacccactagatccagcacacgtgagtagcgcaagctctagtgggagaccacatgccctccctgagattcgcccatacattaacattactatactgaaaggggacaagggtgacccaggtccaatggggcttccggggtacatgggcagagaggggccccaaggtgagcccggaccacaaggttccaaaggtgacaaaggagagatggggtcaccgggcgcaccctgccagaagcggttcttcgcattctctgtgggcaggaaaacagcgctccactctggcgaggacttccagacattgctatttgagcgagtgttcgtcaatctggatggatgttttgatatggcaactggccaattcgcagccccattgaggggcatatacttcttttccttgaatgttcactcctggaattataaagaaacatacgtgcacattatgcacaaccagaaggaagcagttattctgtacgcccagcccagcgaacgctctatcatgcagagccagtcagtgatgctagatctggcttacggggatcgggtgtgggtgcggctgtttaaacgacagcgcgaaaatgctatctattccaacgattttgatacctacatcacattcagcgggcacctcatcaaagccgaagatgattag

SEQ ID NO: 256026 - RNA, 837 nt, Artificial Sequence
  derived and/or modified sequence
augcaguggcugagggugcgagaaucuccaggcgaagccacggggcaccgcguuaccaugggcacagcugcgcuagggcccgugugggccgcccuguugcuauuucugcucaugugugagauucccaugguggagcuaacauucgacagggcuguugcuucuggcugucagagaugcugugauagugaggauccacucgauccugcgcacguuucuucugcuagcucuuccggacggccacacgcacugcccgaaauuagacccuauaucaauaucacaauucuuaaaggggacaagggugauccaggaccuaugggccuuccaggcuauaugggaagagaagguccucaaggagaaccaggcccacagggcucuaaaggggauaaaggcgagauggguucuccuggugcucccugccagaaaagguuuuuugccuuuagcgugggacggaagaccgcccuccacucuggcgaggauuuccagacauugcucuuugagcgcguguuugucaauuuggauggguguuuugauauggcuaccggucaguuugcagcuccucuccgcggcauuuacuucuuuagccucaacguucauucuuggaauuauaaagagacguauguccauauaaugcauaaucaaaaggaggcugugaucuuguaugcacaaccuucagagcggagcauuaugcaaucacaguccgucaugcuggaucuagccuacggugauagagugugggugcgucucuucaagagacagagggaaaacgccauuuacuccaacgauuuugacacauauaucacuuuuuccggucaccugaucaaagcagaggacgauuag

SEQ ID NO: 256027 - RNA, 837 nt, Artificial Sequence
  derived and/or modified sequence
augcaguggcucagggugcgagagagcccaggugaagccacagggcaucgcguuacaaugggcaccgcagcucucggaccaguaugggcggcucuccugcucuuucuucuuaugugcgagaucccuaugguagaacuuacauucgaucgggcuguggccagugggugccagcgaugcugcgacagcgaggacccccuggacccggcgcacgugaguucagccucguccagcggccgaccccacgcucuucccgaaauacguccuuacaucaacaucacuauucugaaaggugauaaaggugaccccggacccaugggacucccagguuauaugggacgggaaggcccccagggagagccuggaccucaggguaguaagggggacaagggugagaugggauccccuggagcaccuugccagaaacgcuucuucgccuuuuccguuggaaggaaaacagcccuucauucaggcgaagacuuucagacccugcuauucgagcgaguauucguaaauuuggauggcuguuucgacauggcuacaggccaguucgcagcaccuuuaagaggaaucuacuuuuucucucuaaauguccacuccuggaauuacaaggaaacauacguccauauaaugcacaaucagaaagaggcugucauccuguaugcccagccaagcgaacggucgaucaugcagucccaguccgucauguuggacuuagccuacggugaucgagucuggguccgccuauuuaagcggcagagggaaaacgcuaucuauaguaacgacuuugauacauauauaaccuucagcggacaccugaucaaagccgaggacgacuag

SEQ ID NO: 256028 - RNA, 837 nt, Artificial Sequence
  derived and/or modified sequence
augcaguggcugcgaguccgagagucaccaggggaagcgaccggucaucgcguuacaaugggcacagcagcauuaggacccgugugggcggcgcuacuauuauuucuucugaugugugaaaucccaauggucgagcucacauuugacagagccguugcuuccgguugccaacgguguugugauuccgaagacccccuggaucccgcacacgucucuagugccucuucuucaggacgcccccacgcucuuccagaaauacgucccuauauaaacauuacgauccugaagggggauaaaggagaucccgggccuauggguuugccuggcuauaugggacgugaagguccucaaggagagccugguccccaggguaguaaaggggauaaaggagaaaugggcagcccaggugcuccuugucagaaaagguuuuucgcauucucugucggacgcaagacagccuuacacaguggggaagacuuucaaacucuccuguucgagcgcguguuugucaaucuggacggcuguuuugauauggcaacaggacaauuugcugcuccauugcgcggaauuuauuucuucagucuuaacguucacucuuggaacuacaaagaaacauacguacacauuaugcacaaucagaaagaagccgugauccuuuaugcacagccaagcgaacgauccauuaugcagucacagucagucauguuggaccucgcuuacggcgaccgggucugggugcggcuguuuaaacgacaaagggagaacgccaucuacagcaaugacuuugacacuuacaucacauuuagcggacacuuaaucaaagccgaagacgacuag

SEQ ID NO: 256029 - RNA, 837 nt, Artificial Sequence
  derived and/or modified sequence
augcaauggcuccgcguuagagagucacccggugaagcuacuggccauaggguaacuaugggcacugcggcgcugggaccggugugggcugcauuacuucuauuucuguuaaugugugagauuccaauggucgagcugacuuuugacagagccguugccucaggaugccaacgauguugugacucugaggacccacucgauccggcacacguaucaagcgccagcuccucgggucguccccaugcucuucccgaaauaagacccuacaucaauaucacuauccucaaaggcgacaagggggaccccgguccgaugggauugcccggcuacaugggcagagagggaccccagggggagccuggaccacagggaaguaagggggauaaaggggagauggggucaccaggcgcuccgugucagaaacgcuucuuugcuuucucggugggaagaaagaccgcuuuacacucaggggaggauuuucaaacacuucuuuucgaaagagucuuugugaaucucgauggguguuucgacauggcaaccggacaguuugccgccccccucagagggaucuacuuuuucagucuaaacgugcauagcuggaacuauaaagagaccuauguucacaucaugcacaaucaaaaagaagcggugauucucuaugcgcagccuucagaacgcuccauuaugcagucccagucagugaugcuagacuuagccuauggcgacaggguguggguacgguuguucaaaagacagcgagagaaugcaaucuauucaaacgacuucgacacguauaucacauucagcggacaccucauaaaagcggaggacgauuag

SEQ ID NO: 256030 - protein, 370 aa, Artificial Sequence
  derived and/or modified sequence
MEILMTVSKFASICTMGANASALEKEIGPEQFPVNEHYFGLVNFGNTCYCNSVLQALYFCRPFREKVLAYKSQPRKKESLLTCLADLFHSIATQKKKVGVIPPKKFITRLRKENELFDNYMQQDAHEFLNYLLNTIADILQEERKQEKQNGRLPNGNIDNENNNSTPDPTWVHEIFQGTLTNETRCLTCETISSKDEDFLDLSVDVEQNTSITHCLRGFSNTETLCSEYKYYCEECRSKQEAHKRMKVKKLPMILALHLKRFKYMDQLHRYTKLSYRVVFPLELRLFNTSGDATNPDRMYDLVAVVVHCGSGPNRGHYIAIVKSHDFWLLFDDDIVEKIDAQAIEEFYGLTSDISKNSESGYILFYQSRD

SEQ ID NO: 256031 - DNA, 1113 bp, Artificial Sequence
  derived and/or modified sequence
atggagatcctgatgaccgtgagcaagttcgccagcatctgcaccatgggcgccaacgccagcgccctggagaaggagatcggccccgagcagttccccgtgaacgagcactacttcggcctggtgaacttcggcaacacctgctactgcaacagcgtgctgcaggccctgtacttctgcagacccttcagagagaaggtgctggcctacaagagccagcccagaaagaaggagagcctgctgacctgcctggccgacctgttccacagcatcgccacccagaagaagaaggtgggcgtgatcccccccaagaagttcatcaccagactgagaaaggagaacgagctgttcgacaactacatgcagcaggacgcccacgagttcctgaactacctgctgaacaccatcgccgacatcctgcaggaggagagaaagcaggagaagcagaacggcagactgcccaacggcaacatcgacaacgagaacaacaacagcacccccgaccccacctgggtgcacgagatcttccagggcaccctgaccaacgagaccagatgcctgacctgcgagaccatcagcagcaaggacgaggacttcctggacctgagcgtggacgtggagcagaacaccagcatcacccactgcctgagaggcttcagcaacaccgagaccctgtgcagcgagtacaagtactactgcgaggagtgcagaagcaagcaggaggcccacaagagaatgaaggtgaagaagctgcccatgatcctggccctgcacctgaagagattcaagtacatggaccagctgcacagatacaccaagctgagctacagagtggtgttccccctggagctgagactgttcaacaccagcggcgacgccaccaaccccgacagaatgtacgacctggtggccgtggtggtgcactgcggcagcggccccaacagaggccactacatcgccatcgtgaagagccacgacttctggctgctgttcgacgacgacatcgtggagaagatcgacgcccaggccatcgaggagttctacggcctgaccagcgacatcagcaagaacagcgagagcggctacatcctgttctaccagagcagagactag

SEQ ID NO: 256032 - DNA, 1113 bp, Artificial Sequence
  derived and/or modified sequence
atggagatcctcatgacagtctcaaaatttgccagcatttgtaccatgggcgctaacgcctccgcgctcgaaaaagagattggtcctgaacagtttccggttaacgagcactatttcggcctggtaaacttcggaaatacttgctactgtaatagcgtcctccaggccctttacttctgccgaccattcagagaaaaagttttagcctacaagagccagcctaggaagaaggagtctctcctcacttgtctggcggacttgtttcactctattgccacgcagaagaagaaggtcggagtcatacctccaaagaagttcatcacccgactacgaaaagagaacgaattgttcgataattacatgcagcaggacgctcacgaatttctcaattatttgctcaatactatagctgacatcctccaggaggaaagaaagcaagaaaaacagaacggacgactgccaaatggtaacatcgacaacgaaaacaacaatagcaccccagatcctacttgggtacatgaaatatttcaggggacgctgacaaatgaaacgcgatgtttaacgtgcgaaaccatctccagcaaagacgaggactttctagatctttccgttgacgttgagcaaaacacctccatcacacactgccttagggggttcagtaacaccgaaactctttgttcagagtataaatactattgcgaagagtgccgttccaaacaggaggcgcataaacggatgaaggtaaagaagctccctatgatcctcgccttacatctgaaaagatttaaatacatggaccagctccacagatacaccaagttaagctatagagtagtgttcccattagagctacggctgtttaatacctccggggacgcaacgaacccggaccgaatgtatgatcttgtcgccgtggtggtccactgtggctccggccccaataggggacactatatagccatcgtgaaatcccacgatttctggctgctgtttgacgatgatatcgtcgagaagatcgacgctcaagctattgaggagttctatggattgactagcgacatttccaagaactctgagtccggctacattctgttctatcagtctcgagattag

SEQ ID NO: 256033 - DNA, 1113 bp, Artificial Sequence
  derived and/or modified sequence
atggagatcctgatgacagtgtccaagtttgccagcatctgcaccatgggcgccaatgccagcgccctggagaaggagatcggccctgagcagtttcctgtgaatgagcactacttcggcctggtgaactttggaaacacctgctactgcaacagcgtgctgcaggccctgtacttctgccggcccttccgggagaaggtgctggcctacaagagccagcccaggaagaaggagagcctgctgacctgcctggccgacctcttccacagcatcgccacccagaagaagaaggtgggcgtcatcccccccaagaagttcatcacccggctgaggaaagaaaatgagctgtttgacaactacatgcagcaggatgcccacgagttcctgaactacctgctgaacaccatcgctgacatcctgcaggaggagaggaagcaggagaagcagaatggccgcctgcccaatggaaacatcgacaatgaaaacaacaacagcaccccagaccccacctgggtgcatgagatcttccagggcaccctgaccaatgagacccgctgcctgacctgtgagaccatcagcagcaaggatgaggacttcctggacctgtctgtggatgtggagcagaacaccagcatcacccactgcctgcggggcttcagcaacacagagaccctgtgcagcgagtacaagtactactgtgaagaatgtcgcagcaagcaggaggcccacaagaggatgaaggtgaagaagctgcccatgatcctggccctgcacctgaagcgcttcaagtacatggaccagctgcaccgctacaccaagctgagctacagagtggtgttccccctggagctgcggctcttcaacaccagcggagatgccaccaacccagacaggatgtatgacctggtggccgtggtggtgcactgcggcagcggccccaacagaggccactacatcgccatcgtgaagagccatgacttctggctgctgtttgatgatgacatcgtggagaagattgatgcccaggccatcgaggagttctacggcctgaccagtgacatcagcaagaacagcgagagcggctacatcctcttctaccagagccgggactag

SEQ ID NO: 256034 - DNA, 1113 bp, Artificial Sequence
  derived and/or modified sequence
atggagatcctgatgaccgtgagcaagttcgccagcatctgcaccatgggggctaatgcctccgcactagagaaggagatcggccctgagcagtttcctgtgaacgaacactacttcggacttgtcaactttggcaatacatgttattgcaactcagtgcttcaggccctttacttttgtcgcccctttcgtgagaaagtgctggcttataaaagtcagccccgaaaaaaggagagccttctgacctgcttagctgacctgtttcattcgatcgcaacacaaaagaagaaggtgggcgttattccccccaaaaagtttattacccgtctacgcaaggagaacgaattgttcgacaattacatgcagcaggacgcccacgagttccttaattatctcttgaataccatcgcagacattctccaggaggaaagaaaacaggagaagcaaaacggaagactgccaaacggcaacatcgataacgagaacaacaattccacaccagatcccacttgggtgcacgaaatttttcagggcaccctcacaaacgagacacggtgtctgacgtgcgaaaccatcagcagtaaagatgaggatttcctggacctatcagtggacgtggagcagaacacgagcattactcactgcctgagaggattttccaataccgaaacactgtgctctgagtataagtactattgcgaggagtgtcgcagcaaacaggaggctcacaaacgcatgaaagttaaaaagctacctatgatcctggccctgcatcttaaacggttcaaatatatggaccaactgcaccgatacactaaactcagctatagggtggtattcccactggagctgcggctgttcaacactagtggcgatgcaaccaatcctgataggatgtatgacctcgttgcagtggtggtccactgtgggagcggacccaatcggggccattacattgccatcgtgaagagtcacgacttctggcttttattcgacgatgacatcgtggaaaaaattgatgcccaggcaatcgaagagttttatggcctgacaagcgacatcagtaagaactcggagtcgggatacattctcttctatcaaagtcgtgattag

SEQ ID NO: 256035 - DNA, 1113 bp, Artificial Sequence
  derived and/or modified sequence
atggaaattctcatgaccgtgagcaaattcgcatcaatttgtacaatgggtgctaatgcatccgccctggaaaaagagataggtcctgagcagtttcccgttaacgagcattattttggccttgtgaattttggaaatacttgctactgtaactctgtcctgcaggccttgtacttctgccgtccctttagggagaaagtgttggcctataagagccaacccaggaagaaggagtccctgcttacttgcctcgccgaccttttccacagtatagctacgcagaaaaaaaaagtcggcgtgatacccccaaagaaatttatcactcggctgcggaaagagaacgagctgtttgacaattacatgcagcaagacgcccatgaatttctcaactacttgttaaacaccattgctgatatcctgcaggaggaacgcaagcaggagaaacagaacggccgactgcctaatggtaacatcgacaacgaaaataacaactctactccagatcctacctgggtgcatgagatcttccaaggcacattaaccaacgaaacacggtgtttgacatgtgagaccatctccagcaaagacgaggactttctggatctgtccgtcgacgtggagcagaacacttctatcacccactgcctaagaggattttctaacacagaaacgctctgttcggaatataaatattactgcgaggagtgccgtagtaagcaggaagcacataagcgtatgaaagtgaaaaaactccccatgatcttagcccttcacctcaagcggttcaaatatatggaccagctgcacagatataccaagctgagctatagagtcgttttcccacttgaactacgactcttcaatacttccggagatgccacgaaccccgataggatgtatgatcttgttgccgttgtggtgcactgtgggagcgggcctaatcggggacactatatcgctattgttaaatcccacgacttctggttacttttcgacgacgatattgtggagaagattgatgcgcaagcgattgaagagttctatggcctgacctcagacatctctaaaaattccgagtccggctacattttattctaccagagccgcgactag

SEQ ID NO: 256036 - DNA, 4497 bp, Artificial Sequence
  derived and/or modified sequence
cggaggcagcggctgcgccctgcgccggggcggagccgggggcgggccggcggccggcaggcgggggctggggcccgaggccgggagtgcctgagcgccggcggcgacgacggcagcggcggcccagcgggctcggtggttgggtccgcggcggctcggggtccgcccgcgggctgcggtgcgagcgggcggcccggctcccctcctcccccgcccgccgccgccgctgtgattgggtggaagatggcgctggccggatggaaatcctaatgacagtctccaaattcgcctccatctgtaccatgggcgccaatgcttcggcattagagaaagagattggtccagaacagtttccggtcaatgagcactattttggattagtcaattttgggaatacctgctactgcaattcagttcttcaagcactttatttttgtcgtccatttcgggaaaaagttcttgcgtataagagtcaacctaggaaaaaggagagccttcttacatgcttagcagatctcttccatagcatagccactcagaagaaaaaggttggagtaataccccctaagaagttcatcacaagattacggaaagaaaatgagctttttgacaactacatgcaacaagatgcccatgaattcttaaattacctactaaatacaattgctgatattttacaagaagagagaaagcaggaaaaacaaaatggtcgtttacctaatggtaatattgataatgaaaataataacagcacaccagacccaacgtgggttcatgagatttttcagggaacattaactaatgaaaccagatgtcttacttgtgaaactataagcagcaaagatgaagattttttagacctttctgttgacgtggaacaaaatacatcaattactcactgcttaaggggtttcagcaacacagaaactctgtgcagtgaatacaagtattactgtgaagagtgtcgcagcaaacaggaagcacacaaacggatgaaagttaaaaaactgcccatgattctagctctacacctgaagagatttaaatatatggatcaacttcatcgatatacaaaactctcttaccgggtagtttttcctttagaacttcgtctgtttaacacttcaggtgatgccaccaatccagacagaatgtacgaccttgttgctgttgtggttcactgtggaagtggtcccaatcgaggccattatattgcaatagttaagagtcatgatttttggttgttgtttgatgacgacattgtagaaaaaatagatgcacaagctattgaagaattctacgggttgacatcagatatctcaaagaactctgagtctggttacatccttttctatcagtctcgggactgagagggaaccgtgatgaagagacactttctgcctcatttcttctctggttattttggaaaggatcaagcactgatttttcaagaaaagagaaatgcaggaagctcagggggcagtagcacactttgcacacgataaagcaaagacgatggattgacaagcccttccgatcatggtagttgatttatttgctcaggtatcatgctgtctgtacagttccatacaacaaggaggtgaaatcagagataccagctcctcttttaaaacagccttccagtcattggcacgcattttctctttattaattgcaccaataatgctttgaattccttgggggtgcagtagaaagaatcggaatctgtgccgtattgataaggagatgatgttgaacacactgcataaatttgcctggttcagtatgtatagaagcatattcagtggtcttttcaagagtaaaccagaaatacttttgggcccaacacttgcagttgccttcctgatgtaaaaactaacatgctagataatccagtgtcgggaagacaaagatgttttgcttctctgaagaagcttataataatatacagtatatgtatatgtagggagcaattggtcaaaagtggctttttgtttccccaaggggaaagactggctttgtaattataattttttccttatttattttacttaaaactggtagagtctaagtattatatgaagtgcccatgattctgtcagtaaatttgaacatatttttattagttaatgtcagtttaagttgtccttttgtttgtttctatttttaaggtgaattttaatttctatctgaaatcagttaagataccttgagaaaaactgcagtgagaggagataaatatcctttttcaggaggaactgatatctctggctaaatatttgtccttttattatggtttctaaatcagttattttcttcagctttaatttcataaaattaaaaaactattttaaaaattcctgtagttgttggaataattaaaaattctggtgcagtggtggtataccaatctttagaattcttaagtattctaatgtttcaagttgagatcatgcttgggaaaatcatgtcatagcatttatgttattttcagatgccattttttaccctggaaagaagtcataatgttcatcataaccctagcagcctggatagtgagctaaacaaacccttcaaagattaaattttaatcaagtagaccgggaatacaaaagacaagtccttccttcccttccccccacctttacaaatcttactggaagggtgttcagaaattaaaatctgtgtttgctaagacttcattctgttgggggttttaagaagtaatatatgtaacataaaatatatgtaaacgattgcagtttttttggacgtttttccatgcatcagtaagttgtctgacagtagccaaatgtaacttgcagaaaattattgaaaattatattcagaataatagcaatcaggccttggatgttctttattaaactcttttcaggcagtaaatttaaaaaaaattgtcattttctaaagtccttttgctaaaactgttgactatggaaaacaacaaaaaggaattttttagtctgctgctattattaacatttattatctgtatcttttggctcaggaaatgacttcacctattttttccataagcagacctttaacagagtcacttaattgggctgcttaaacagatgttctgggagaaaattataatatttagtatttgtacaaaatatcaaaaagtattttgacaagtttctttttaagatagttcctaaagccttaccctggctagaggtgttttgtacaaattatatataagccagcctgatctaccaacatgccacagagaatcacaatcaacagtgtggggaaagtcagggcagtggaagtggatgcactctttttattttgaaggcttaaaccaaattgtcttggaattaaagctgtatttctgcagctttcggtacagagaaaaagaggaaagtgaagctgtgtcagttttaacattagctatatcaacatgtttaagaaagatagatgaagtcatttgcataaaggtacagcattgaaatactatgttgtgtttgtttttacatttttgcattaaaaaaaaacatgccgtaaaagccaagttaaatttcatattaaagcaagttctagtgtatgtgttgagttcctggtaatcacatacttgttcacatctacaccgtacttcatagtatgatttgtcaggggagggattgtggggtgacagttttacatttactttttcttcttaatgcagctggatctaagtaaaatgttttgaagtttatcagaaactaaatgtacttttaaaacgtatagggtcagggttgggggaaaaatacaggtatagtaagtaagaaaagtgacccatgaagaaagcatcgtgaggttgtatgttggttgactgtgattaaaatgcggggctggtgtaagttgtaagtggtggctgattgccgtgtaactatgtacatgattgttgggatggctgtcccatattttgtatattggaataaaaatttctataaattattgtaactaaaagtaaatattctaaattaagtcccacttcttaagtcacatggcttctgtcttggaaattttacctttaaaagattatttaagacaggaaccaggaggcttgggaacagggaaagagggaaatgttgtattatgtgggtcttggggcctctaaccatcagtatagggttttttctttccttgatggcagtagaaagacctcattttcataacataactactcttgatactttctttaaaaacactttttattaaagattctatcatgaggtatttggctgggagctgggaggctaaagcgctcatgtcctggctcttcagtgaatttaactgtgtgaccttgggcaagtcacttaacctctctgtgcttcagtctccctgtcttgtaaaatgggagtaatacctacctcacagggttgttgtggggattaattagagataatgtctgtaaagcatttaaggttcttgaagaaggcactatataaatacaaaataatatctattaaagttggtttatttgtg

SEQ ID NO: 256037 - protein, 330 aa, Artificial Sequence
  derived and/or modified sequence
MGKIDVDKILFFNQEIRLWQLIMATPEENSNPHDRATPQLPAQLQELEHRVARRRLSQARHRATLAALFNNLRKTVYSQSDLIASKWQVLNKAKSHIPELEQTLDNLLKLKASFNLEDGHASSLEEVKKEYASMYSGNDSFPQNGSSPWYLNFYKQTMDLLTGSGIITPQEAALPIVSAAISHLWQNLSEERKASLRQAWAQKHRGPATLAEACREPACAEGSVKDSGVDSQGASCSLVSTPEEILFEDAFDVASFLDKSEVPSTSSSSSVLASCNPENPEEKFQLYMQIINFFKGLSCANTQVKQEASFPVDEEMIMLQCTETFDDEDL

SEQ ID NO: 256038 - DNA, 993 bp, Artificial Sequence
  derived and/or modified sequence
atgggcaagatcgacgtggacaagatcctgttcttcaaccaggagatcagactgtggcagctgatcatggccacccccgaggagaacagcaacccccacgacagagccaccccccagctgcccgcccagctgcaggagctggagcacagagtggccagaagaagactgagccaggccagacacagagccaccctggccgccctgttcaacaacctgagaaagaccgtgtacagccagagcgacctgatcgccagcaagtggcaggtgctgaacaaggccaagagccacatccccgagctggagcagaccctggacaacctgctgaagctgaaggccagcttcaacctggaggacggccacgccagcagcctggaggaggtgaagaaggagtacgccagcatgtacagcggcaacgacagcttcccccagaacggcagcagcccctggtacctgaacttctacaagcagaccatggacctgctgaccggcagcggcatcatcaccccccaggaggccgccctgcccatcgtgagcgccgccatcagccacctgtggcagaacctgagcgaggagagaaaggccagcctgagacaggcctgggcccagaagcacagaggccccgccaccctggccgaggcctgcagagagcccgcctgcgccgagggcagcgtgaaggacagcggcgtggacagccagggcgccagctgcagcctggtgagcacccccgaggagatcctgttcgaggacgccttcgacgtggccagcttcctggacaagagcgaggtgcccagcaccagcagcagcagcagcgtgctggccagctgcaaccccgagaaccccgaggagaagttccagctgtacatgcagatcatcaacttcttcaagggcctgagctgcgccaacacccaggtgaagcaggaggccagcttccccgtggacgaggagatgatcatgctgcagtgcaccgagaccttcgacgacgaggacctgtag

SEQ ID NO: 256039 - DNA, 993 bp, Artificial Sequence
  derived and/or modified sequence
atgggcaaaatcgacgtggacaagatcttgttcttcaaccaagagatccgcctctggcagctgataatggcaacacctgaagagaacagtaatcctcatgaccgggcaacaccccagctccctgctcagttgcaagaactggagcacagagtagcccgaagacgcctcagtcaggctagacatagagctacactcgccgccctctttaataatctgcggaagactgtttattctcagtcagatcttattgcaagtaagtggcaggtgctgaataaggccaaatctcacatacccgagctcgagcagaccctggacaacctgcttaaactcaaagccagtttcaacctcgaggatgggcatgcttcctccctggaggaagtgaaaaaagaatacgccagcatgtactcaggcaacgattcgttcccacaaaatggaagctctccgtggtacctaaacttttataaacagactatggacctgttgactgggagtgggatcattaccccgcaggaagcggcactaccaatcgtgagtgcagcgattagccacctctggcagaacctgtcagaggaacgaaaggcatcgctgagacaagcttgggcccagaagcaccggggacccgcaacactggctgaggcttgtcgggagcctgcttgcgccgaagggagcgtcaaggattccggagtggacagtcagggtgcttcatgttccttggtgtccaccccagaggaaatccttttcgaagacgcctttgatgttgcaagcttcctggataagtcggaggtaccttccacctcgagtagcagctctgtgctggctagctgtaatcctgaaaatccagaggaaaagtttcaactgtatatgcagattataaatttttttaaggggttaagttgcgcaaatacgcaggtgaaacaagaggctagctttcctgttgacgaagagatgatcatgctgcagtgtactgagacattcgacgatgaggacttgtag

SEQ ID NO: 256040 - DNA, 993 bp, Artificial Sequence
  derived and/or modified sequence
atgggcaagattgatgtggacaagatcctcttcttcaaccaggagatccggctgtggcagctgatcatggccaccccagaggagaacagcaacccccatgaccgggccaccccccagctgcctgcccagctgcaggagctggagcaccgggtggcccggcggcggctgagccaggcccggcaccgggccaccctggccgccctcttcaacaacctgaggaagacagtgtacagccagagcgacctgattgccagcaagtggcaggtgctgaacaaggccaagagccacatccctgagctggagcagaccctggacaacctgctgaagctgaaggccagcttcaacctggaggatggccacgccagcagcctggaggaggtgaagaaggagtatgcctccatgtacagcggaaatgacagcttcccccagaatggcagcagcccctggtacctgaacttctacaagcagaccatggacctgctgaccggcagcggcatcatcaccccccaggaggccgccctgcccatcgtgtctgctgccatcagccacctgtggcagaacctgtctgaggagaggaaggccagcctgcggcaggcctgggcccagaagcaccggggccctgccaccctggccgaggcctgccgggagcccgcctgtgccgagggctctgtgaaggacagcggcgtggacagccagggcgccagctgcagcctggtgtccaccccagaggagatcctgtttgaagatgcctttgatgtggccagcttcctggacaagtctgaggtgcccagcaccagcagcagcagctctgtgctggccagctgcaaccctgagaaccctgaggagaagttccagctgtacatgcagatcatcaacttcttcaagggcctgagctgtgccaacacccaggtgaagcaggaggccagcttccctgtggatgaggagatgatcatgctgcagtgcacagagacctttgatgatgaggacctgtag

SEQ ID NO: 256041 - DNA, 993 bp, Artificial Sequence
  derived and/or modified sequence
atgggcaagatcgacgtggacaagatcctgttcttcaaccaggagataagattgtggcaactaatcatggccacaccggaggaaaactctaatcctcacgaccgcgcaactccccagctgcccgctcagctgcaagagctggagcatagggtggcccgccggaggctctcacaggctcgccaccgcgccactttggccgcgctgttcaataatctgagaaaaacagtgtattcccagtcggatctgatcgcaagcaagtggcaagtgcttaacaaggcaaagagtcacatacctgagctggaacagactttggacaacctccttaagcttaaggctagcttcaacctggaagacggacatgcctccagtctcgaagaggttaagaaagaatacgcatcaatgtactctggcaatgactcctttcctcagaatggatcttccccctggtacctgaatttctacaaacagacaatggatctcctaacgggctccggtatcataactccccaagaggccgccctgcccattgtgtcagccgccatcagccatctgtggcaaaatctctcagaggagcgaaaagcgagtttgcggcaagcctgggcccagaaacatagaggcccggccacccttgccgaggcatgtagggagcctgcctgtgccgaagggtccgtcaaagacagcggtgttgattctcagggggcttcgtgcagcttggtttcaactcccgaagagatactcttcgaggacgccttcgacgttgcgtctttcttggataagagcgaagttcccagcacaagtagctcttcttccgttctggccagttgtaaccccgaaaacccagaggaaaaatttcagctgtacatgcagatcatcaactttttcaaagggctctcttgcgcaaacacccaagttaagcaggaggcatccttcccagtggacgaggaaatgatcatgctgcagtgtaccgaaacattcgatgacgaggatttatag

SEQ ID NO: 256042 - DNA, 993 bp, Artificial Sequence
  derived and/or modified sequence
atgggcaaaatagacgtcgataaaatcttattctttaatcaagagattagactttggcagctgatcatggccactccagaagagaacagtaacccccacgacagggccactcctcaactgccagcccagctccaggagctggagcaccgagtagccaggcggagactaagccaggcccgacatagggcaacccttgctgcattgtttaataacctgaggaaaacagtgtacagccaaagcgatttgatcgctagtaagtggcaggtattgaacaaggcgaagtctcacatccccgagctggaacagacactggataatctgctgaaactgaaagcatcgttcaacctggaggatggtcacgcttcatctcttgaggaagtaaagaaagagtacgcaagcatgtattccggaaatgactcctttccgcagaacgggtcatccccgtggtaccttaacttctacaaacaaacgatggacctgctcaccggttcgggaattataacacctcaagaggctgcactccctatcgtcagtgcagctataagtcatctgtggcaaaatctatctgaggaaaggaaggcctcactgcgccaggcgtgggcgcaaaagcaccgcggaccggctactcttgccgaggcgtgccgggagcccgcttgtgccgagggctctgtgaaagactccggtgtggatagccagggggcatcctgttctctcgtgtccacgccagaggagatcctctttgaggatgccttcgatgtcgccagctttctagacaagtctgaagttccgtccacatcatcttccagctcagtactcgcttcctgcaacccggaaaaccctgaagaaaaatttcaactgtatatgcagatcatcaacttttttaagggcctgtcctgcgccaacacccaagttaaacaggaggcaagcttccccgtggacgaagagatgataatgctgcagtgtacggaaactttcgatgacgaggacctttag

SEQ ID NO: 256043 - DNA, 993 bp, Artificial Sequence
  derived and/or modified sequence
atggggaagattgatgtggacaagatcctctttttcaatcaagaaatcaggctgtggcagcttataatggcaacccctgaagaaaacagcaatccccatgacagagcaacaccccagctgccagcacagctgcaggagcttgagcatcgggtggcccggagacggctgtcccaggcccgccaccgagccaccctggcagcgctcttcaacaacctcaggaagacagtgtactctcagtctgatctcatagcctcaaagtggcaggttctgaataaggcaaagagtcatattccagaactggagcaaaccctggataatttgctgaagctgaaagcatccttcaacctggaagatgggcatgcaagcagcttagaggaggtcaagaaagaatatgccagcatgtattctggaaatgacagttttcctcagaatggttcctccccttggtatctcaacttttacaaacagacgatggaccttctgactggcagcgggatcattaccccgcaggaggcggcgctgcccatcgtctccgcggccatctcccacctgtggcagaacctctcggaggagaggaaggccagcctccggcaggcctgggcgcagaagcaccgcggccctgcgaccctggcggaggcctgccgagagccggcctgtgccgagggcagcgtgaaggacagcggcgtggacagccagggggccagctgctcgctggtctccacgcccgaggagatcctttttgaggatgcctttgatgtggcaagcttcctggacaaaagtgaggttccgagtacatctagctccagttcagtgcttgccagctgcaacccagaaaacccagaggagaagtttcagctctatatgcagatcatcaacttttttaaaggccttagctgtgcaaacactcaagtaaagcaggaagcatcctttcccgttgatgaagagatgatcatgttgcagtgcacagagacctttgacgatgaagatttgtaa

SEQ ID NO: 256044 - protein, 819 aa, Artificial Sequence
  derived and/or modified sequence
MSGTSKESLGHGGLPGLGKTCLTTMDTKLNMLNEKVDQLLHFQEDVTEKLQSMCRDMGHLERGLHRLEASRAPGPGGADGVPHIDTQAGWPEVLELVRAMQQDAAQHGARLEALFRMVAAVDRAIALVGATFQKSKVADFLMQGRVPWRRGSPGDSPEENKERVEEEGGKPKHVLSTSGVQSDAREPGEESQKADVLEGTAERLPPIRASGLGADPAQAVVSPGQGDGVPGPAQAFPGHLPLPTKVEAKAPETPSENLRTGLELAPAPGRVNVVSPSLEVAPGAGQGASSSRPDPEPLEEGTRLTPGPGPQCPGPPGLPAQARATHSGGETPPRISIHIQEMDTPGEMLMTGRGSLGPTLTTEAPAAAQPGKQGPPGTGRCLQAPGTEPGEQTPEGARELSPLQESSSPGGVKAEEEQRAGAEPGTRPSLARSDDNDHEVGALGLQQGKSPGAGNPEPEQDCAARAPVRAEAVRRMPPGAEAGSVVLDDSPAPPAPFEHRVVSVKETSISAGYEVCQHEVLGGGRFGQVHRCTEKSTGLPLAAKIIKVKSAKDREDVKNEINIMNQLSHVNLIQLYDAFESKHSCTLVMEYVDGGELFDRITDEKYHLTELDVVLFTRQICEGVHYLHQHYILHLDLKPENILCVNQTGHQIKIIDFGLARRYKPREKLKVNFGTPEFLAPEVVNYEFVSFPTDMWSVGVITYMLLSGLSPFLGETDAETMNFIVNCSWDFDADTFEGLSEEAKDFVSRLLVKEKSCRMSATQCLKHEWLNNLPAKASRSKTRLKSQLLLQKYIAQRKWKKHFYVVTAANRLRKFPTSP

SEQ ID NO: 256045 - protein, 478 aa, Artificial Sequence
  derived and/or modified sequence
MDTPGEMLMTGRGSLGPTLTTEAPAAAQPGKQGPPGTGRCLQAPGTEPGEQTPEGARELSPLQESSSPGGVKAEEEQRAGAEPGTRPSLARSDDNDHEVGALGLQQGKSPGAGNPEPEQDCAARAPVRAEAVRRMPPGAEAGSVVLDDSPAPPAPFEHRVVSVKETSISAGYEVCQHEVLGGGRFGQVHRCTEKSTGLPLAAKIIKVKSAKDREDVKNEINIMNQLSHVNLIQLYDAFESKHSCTLVMEYVDGGELFDRITDEKYHLTELDVVLFTRQICEGVHYLHQHYILHLDLKPENILCVNQTGHQIKIIDFGLARRYKPREKLKVNFGTPEFLAPEVVNYEFVSFPTDMWSVGVITYMLLSGLSPFLGETDAETMNFIVNCSWDFDADTFEGLSEEAKDFVSRLLVKEKSCRMSATQCLKHEWLNNLPAKASRSKTRLKSQLLLQKYIAQRKWKKHFYVVTAANRLRKFPTSP

SEQ ID NO: 256046 - DNA, 2460 bp, Artificial Sequence
  derived and/or modified sequence
atgagcgggacttcaaaagagtctctgggtcacggaggactccccggacttggcaagacatgtctgacaactatggacactaaactcaacatgctcaatgaaaaggtagaccagctattgcatttccaggaagatgtcacagaaaaactacaaagcatgtgtcgcgatatgggccacttggagcggggcctccaccggttagaagcttcgcgtgcaccaggccccggaggagccgatggcgtgcctcacatcgacacccaggcaggatggcctgaggtgctcgaactcgtgagagccatgcaacaggatgccgcacagcatggagcacggctggaggcactgtttaggatggttgcggccgtggatcgtgctatcgcactggtaggcgctaccttccagaagtccaaagttgccgacttcctgatgcaaggccgagtgccctggagaagagggtccccaggagacagtccagaggaaaacaaagagcgagtcgaggaggaaggtgggaagcctaaacacgtccttagcacctccggcgtgcaatccgatgctcgcgagcccggggaagagagccaaaaggcagatgtacttgaaggtacagccgagcggctcccccccatccgcgcttccggactcggggccgatccggcccaagctgtggtgtcacctggtcagggtgatggtgtcccagggcccgcccaagccttccctggccatctgcccttgcctaccaaagttgaagcaaaggcacccgagacaccaagtgaaaacttgcggaccggtttggagctggccccagctcccggaagggtaaatgtcgtttcgccctcactggaggtggcccccggagcaggtcagggcgcaagctcatcccgtcccgatcccgagccactggaggagggtacgaggctcactccaggtcctggtcctcagtgccctggcccccctggactgccagcccaagctagggcaacccatagcggaggggaaaccccccccagaatctccatccatatccaggagatggatacacctggcgagatgttaatgacgggtagaggctcccttggtcctacgttgacgacggaggccccagccgcggcccagccaggaaaacagggtcctccgggaacaggtcgatgcctgcaggcacccggcacagagcccggcgagcagaccccggagggggctcgggaactgtcccccctgcaggagtcctccagtccaggtggggtgaaggccgaggaagaacagagggcgggcgccgagcccggcacccgccctagtctcgcccgcagcgacgacaacgaccacgaagtaggagctctcggacttcagcaaggaaagtccccaggagcagggaatcctgagccagagcaggactgcgccgccagagctccggttcgcgccgaggctgtacgtagaatgccaccaggcgcggaggctggaagcgttgttctggacgattcgcctgcacccccagcaccatttgagcacagagttgtgagcgtgaaggagacaagcattagcgctggctatgaagtctgtcaacacgaggtgctggggggcggacgcttcgggcaggtgcaccggtgcaccgaaaagtccaccggactccctctggctgcaaagatcatcaaggtcaaaagtgcaaaagacagggaggacgtgaaaaatgagatcaacattatgaatcaattaagtcacgtgaatctgattcaactgtacgacgcatttgagagtaagcactcctgtaccctcgtcatggaatatgtcgatggaggtgaactgtttgaccgaataacggatgagaaatatcatctgactgagctggacgtggtattgtttacaagacagatttgcgagggcgttcactacctgcatcaacattacatactgcacctggatttgaaaccggagaacattctctgtgtcaaccagacaggtcaccagatcaagatcatcgattttggattagctagacgctataaaccaagagagaagctcaaggtgaatttcggtacgccggagttcctggctccagaagtggtcaactatgagttcgtttcattccccaccgacatgtggagcgttggggtgattacttacatgcttttgagtggcctgtcccccttcctaggggaaaccgatgccgaaaccatgaactttatcgtcaactgctcctgggactttgatgcagatactttcgaagggttgtccgaggaagccaaggatttcgtaagtcgcctcctggttaaagagaaatcctgtcgtatgagcgccactcagtgcttgaagcatgagtggttaaacaatctgcctgctaaagctagcaggtcaaagactagactgaagtctcagctcctgctgcagaaatacattgcacaaagaaagtggaagaaacacttctatgtggtgacggctgctaacaggcttagaaagttccccacgagcccgtag

SEQ ID NO: 256047 - DNA, 2460 bp, Artificial Sequence
  derived and/or modified sequence
atgagcggcaccagcaaggagagcctgggccatggaggcctgcccggcctgggcaagacctgcctgaccaccatggacaccaagctgaacatgctgaatgagaaggtggaccagctgctgcacttccaggaggatgtgacagagaagctgcagagcatgtgccgggacatgggccacctggagcggggcctgcaccggctggaggccagccgggcccctggccctggaggagcagatggagtgccccacatcgacacccaggccggctggccagaggtgctggagctggtgcgggccatgcagcaggatgctgcccagcacggggcccggctggaggccctcttcaggatggtggccgctgtggaccgggccatcgccctggtgggcgccaccttccagaagagcaaggtggccgacttcctgatgcagggccgggtgccctggaggcggggcagccctggggacagccctgaggagaacaaggagcgggtggaggaggagggcggcaagcccaagcacgtgctgagcaccagcggcgtgcagagtgatgcccgggagcctggagaggagagccagaaggcagatgtgctggagggcacagctgagcggctgccccccatccgggccagcggcctgggcgctgaccctgcccaggccgtggtgtccccaggccagggagatggagtgcccggccctgcccaggccttccctggccacctgcccctgcccaccaaggtggaggccaaggcccctgagaccccatctgagaacctgaggacaggcctggagctggccccagcccctggccgggtgaatgtggtgagccccagcctggaggtggcccctggggccggccagggcgccagcagcagcaggccagaccctgagcccctggaggagggcacccggctgaccccaggccctggcccccagtgccccggccccccaggcctgcctgcccaggcccgggccacccacagcggcggggagaccccaccccgcatcagcatccacatccaggagatggacaccccaggagagatgctgatgacaggccggggcagcctgggccccaccctgaccacagaggccccagctgctgcccagcccgggaagcagggccccccaggcaccggccgctgcctgcaggcccctggaacagagcctggagagcagaccccagagggcgcccgggagctgagccccctgcaggagagcagcagccctggaggagtgaaggccgaggaggagcagagagctggagctgagcccggcacccggcccagcctggcccggagtgatgacaatgaccacgaggtgggcgccctgggcctgcagcagggcaagagccctggagctggcaaccctgagcctgagcaggactgtgccgcccgggcccctgtgcgggcagaggccgtgcggaggatgcctcctggagctgaggccggctctgtggtgctggatgacagccctgcccccccagccccctttgagcaccgggtggtgtctgtgaaggagaccagcatctctgctggctatgaggtgtgccagcacgaggtgctgggcggcggccgcttcggccaggtgcaccgctgcacagagaagagcacaggcctgcccctggccgccaagatcatcaaggtgaagagcgccaaggacagagaagatgtgaagaatgagatcaacatcatgaaccagctgagccacgtgaacctgatccagctgtatgatgcctttgagagcaagcacagctgcaccctggtgatggagtatgtggatggaggagagctgtttgaccgcatcacagatgagaagtaccacctgacagagctggatgtggtgctcttcacccggcagatctgtgaaggagtgcactacctgcaccagcactacatcctgcacctggacctgaagccagagaacatcctgtgtgtgaaccagacaggccaccagatcaagatcatcgactttggcctggcccggcgctacaagccccgggagaagctgaaggtgaactttggcaccccagagttcctggcccctgaggtggtgaactatgaatttgtgtccttccccacagacatgtggagcgtgggcgtcatcacctacatgctgctgagcggcctgagccccttcctgggggagacagatgctgagaccatgaacttcatcgtgaactgctcctgggactttgatgctgacacctttgagggcctgtctgaggaggccaaggactttgtgtcccggctgctggtgaaggagaagagctgcaggatgtctgccacccagtgcctgaagcatgagtggctgaacaacctgcctgccaaggccagccgcagcaagacccggctgaagagccagctgctgctgcagaagtacatcgcccagaggaagtggaagaagcacttctacgtggtgacagctgccaaccggctgaggaagttccccaccagcccctag

SEQ ID NO: 256048 - DNA, 2765 bp, Artificial Sequence
  derived and/or modified sequence
aggagtctgtcagctacggaggacaatgaccttgcagacaccaccgcctgagtgagaaccaggggtctgtgcctctcctcattccccgctcttgcccttgtcaagcctgcaccagcatgtcaggaacctccaaggagagtctggggcatggggggctgccagggttgggcaagacctgcttaacaaccatggacacaaagctgaacatgctgaacgagaaggtggaccagctcctgcacttccaagaagatgtcacagagaagttgcagagcatgtgccgagacatgggccacctggagcggggcctgcacaggctggaggcctcccgggcaccgggcccgggcggggctgatggggttccccacattgacacccaggctgggtggcccgaggtcctggagctggtgagggccatgcagcaggatgcggcccagcacggtgccaggctggaggccctcttcaggatggtggctgcggtggacagggccatcgctttggtgggggccacgttccagaaatcaaaggtggcggatttcctcatgcaggggcgtgtgccctggaggagaggcagcccaggtgacagccctgaggagaataaagagcgagtggaagaagagggaggaaaaccaaagcatgtgctgagcaccagtggggtgcagtctgatgccagggagcctggggaagagagccagaaggcggacgtgctggaggggacagcggagaggctgccccccatcagagcgtcagggctgggagctgaccccgcccaggcagtggtctcaccgggccagggagatggtgttcctggcccagcccaggcattccctggccacctgcccctgcccacaaaggtggaagccaaggctcctgagacacccagcgagaacctcaggactggcctggaattggctccagcacccggcagggtcaatgtggtctccccgagcctggaggttgcaccaggtgcaggacaaggagcatcgtccagcaggcctgaccctgagcccttagaggaaggcacgaggctgactccagggcctggccctcagtgcccagggcctccagggctgccagcccaggccagggcaacccacagtggtggagaaacacctccaaggatctccatccacatacaagagatggatactcctggggagatgctgatgacaggcaggggcagccttggacccaccctcaccacagaggctccagcagctgcccagccaggcaagcagggcccacctgggaccgggcgctgcctccaagcccctgggactgagcccggagaacagacccctgaaggagccagagagctctccccgctgcaggagagcagcagccccgggggagtgaaggcagaggaggagcaaagggctggggccgagcctggcacgagaccaagcttggccaggagtgacgacaatgaccacgaggttggggccctgggcctgcagcagggcaaaagcccaggggcgggaaaccctgagcctgagcaggactgtgcagccagggctccggtgagagctgaagcagtaaggaggatgcccccaggcgccgaggctggcagcgtggttctggatgacagtccggccccaccagctccttttgaacaccgggtagtgagcgtcaaggagacctccatctctgcgggttacgaggtgtgccagcacgaagtcttgggagggggtcggtttggccaggtccacaggtgcacagagaagtccacaggcctcccactggctgccaagatcatcaaagtgaagagcgccaaggaccgggaggacgtgaagaacgagatcaacatcatgaaccagctcagccacgtgaacctgatccagctctatgacgccttcgagagcaagcacagctgcacccttgtcatggagtacgtggacgggggtgagctcttcgaccggatcacagatgagaagtaccacctgactgagctggatgtggtcctgttcaccaggcagatctgtgagggtgtgcattacctgcaccagcactacatcctgcacctggacctcaagccggagaacatattgtgcgtcaatcagacaggacatcaaattaagatcattgactttgggctggccagaaggtacaagcctcgagagaagctgaaggtgaacttcggcactcctgagttcctggccccagaagtcgtcaattatgagtttgtctcattccccacagacatgtggagtgtgggagtcatcacctacatgctactcagtggcttgtccccatttctaggggaaacagatgcagagaccatgaatttcattgtaaactgtagctgggattttgatgctgacacctttgaagggctctcggaggaggccaaggactttgtttcccggttgctggtcaaagagaagagctgcagaatgagtgccacacagtgcctgaaacacgagtggctgaataatttgcctgccaaagcttcaagatccaaaactcgtctcaaatcccaactactgctgcagaaatacatagctcaaagaaaatggaagaaacatttctatgtggtgactgctgccaacaggttaaggaaatttccaacttctccctaatcttcaactctgctgctccaatgggtccagaaattactgaggccagtggtgaagtgaagagatgactcaaacatttaaataatttggctttttggtattattgattccacttattttgtaaaaatggttatggctgctgccttccttgtggatgaaaagtggctgtaaagaagcttcctaagaacgttt

SEQ ID NO: 256049 - DNA, 1795 bp, Artificial Sequence
  derived and/or modified sequence
agagggccgaccagcagaggaagggagaccagagggcagcttgcacagatcttgtcttgggttataactgttgacaagccacttaactgcctccaggtttaagtttgtctgtgtataagatggaggtaacaatatttatacatctcactggagacttatgaaaacaagattttggacagatcccttgggacccatggatggaaagtgaataaagagcgagtggaagaagagggaggaaaaccaaagcatgtgctgagcaccagtggggtgcagtctgatgccagggagcctggggaaggatctccatccacatacaagagatggatactcctggggagatgctgatgacaggcaggggcagccttggacccaccctcaccacagaggctccagcagctgcccagccaggcaagcagggcccacctgggaccgggcgctgcctccaagcccctgggactgagcccggagaacagacccctgaaggagccagagagctctccccgctgcaggagagcagcagccccgggggagtgaaggcagaggaggagcaaagggctggggccgagcctggcacgagaccaagcttggccaggagtgacgacaatgaccacgaggttggggccctgggcctgcagcagggcaaaagcccaggggcgggaaaccctgagcctgagcaggactgtgcagccagggctccggtgagagctgaagcagtaaggaggatgcccccaggcgccgaggctggcagcgtggttctggatgacagtccggccccaccagctccttttgaacaccgggtagtgagcgtcaaggagacctccatctctgcgggttacgaggtgtgccagcacgaagtcttgggagggggtcggtttggccaggtccacaggtgcacagagaagtccacaggcctcccactggctgccaagatcatcaaagtgaagagcgccaaggaccgggaggacgtgaagaacgagatcaacatcatgaaccagctcagccacgtgaacctgatccagctctatgacgccttcgagagcaagcacagctgcacccttgtcatggagtacgtggacgggggtgagctcttcgaccggatcacagatgagaagtaccacctgactgagctggatgtggtcctgttcaccaggcagatctgtgagggtgtgcattacctgcaccagcactacatcctgcacctggacctcaagccggagaacatattgtgcgtcaatcagacaggacatcaaattaagatcattgactttgggctggccagaaggtacaagcctcgagagaagctgaaggtgaacttcggcactcctgagttcctggccccagaagtcgtcaattatgagtttgtctcattccccacagacatgtggagtgtgggagtcatcacctacatgctactcagtggcttgtccccatttctaggggaaacagatgcagagaccatgaatttcattgtaaactgtagctgggattttgatgctgacacctttgaagggctctcggaggaggccaaggactttgtttcccggttgctggtcaaagagaagagctgcagaatgagtgccacacagtgcctgaaacacgagtggctgaataatttgcctgccaaagcttcaagatccaaaactcgtctcaaatcccaactactgctgcagaaatacatagctcaaagaaaatggaagaaacatttctatgtggtgactgctgccaacaggttaaggaaatttccaacttctccctaatcttcaactctgctgctccaatgggtccagaaattact

SEQ ID NO: 256050 - DNA, 2460 bp, Artificial Sequence
  derived and/or modified sequence
atgagcggcaccagcaaggagagcctgggccacggcggcctgcccggtctggggaaaacttgcctcacaacaatggatactaaactaaacatgctgaatgaaaaagtcgaccaactacttcattttcaagaagacgtgacagaaaaactccagagcatgtgcagagacatgggacatttagagaggggcctgcaccggcttgaggcctcgagagcccctgggccaggaggggccgacggcgtcccccacattgacacccaagccggctggccagaagtgctcgaactggtgcgtgccatgcagcaggatgccgcgcaacacggcgcaagacttgaggcattgttccggatggtggccgcagtagaccgcgctatagccctcgtaggagccacattccagaagtctaaagtagccgatttcctgatgcaaggcagggtgccatggcgacgagggagtcccggcgactctcccgaggagaacaaggaaagagttgaggaagaagggggcaaaccaaagcacgtgctctccacttccggagtgcagtctgatgctagggaacccggggaggagtcacagaaggccgacgttcttgagggcaccgccgagcgtcttccacccatccgcgctagcggtctgggagctgaccctgcccaggctgtagtttctcctgggcaaggcgatggcgttccaggcccagcacaagccttccctgggcatctccccctgccaactaaagtggaggcaaaggctcccgaaacgccttcagagaacctgcgaacagggctcgagttggcccccgcacccggacgggtgaatgtcgtgtcgcccagtcttgaggtggcgcctggggctggtcagggggcaagttcttctcgacctgatccagaaccactggaagagggaactcgcttgactcctgggccaggaccacagtgccctggcccccccggcctgcccgcacaggctagagccacccactcggggggggagaccccaccaagaatttccattcacattcaggagatggatactcccggagaaatgttaatgaccggcaggggtagcctggggcctacactgacaactgaggctccagctgctgcccaaccgggcaaacaggggccccccggcactgggcgctgcctgcaggcacctggcaccgaaccaggtgagcagacacctgagggcgccagagagctgagtccactccaagagtctagctctcctggaggtgtcaaggcagaggaggaacaacgcgcaggggcggagccgggcacccggccatcactcgcccggagcgatgataatgaccatgaggttggggctctgggtctacagcaaggaaagagccctggagccggtaatcccgaacccgaacaggactgtgctgcgagggcacccgttcgggcagaagccgtgaggcggatgccacctggagcagaggccggcagtgttgtgctggacgatagtccagctccacctgccccctttgaacatcgcgtagtgtctgttaaggaaacaagtatttccgccggctacgaagtatgccagcatgaggtcctgggcggaggtcgatttggccaggtgcatcggtgtactgaaaagtctacaggtctccccctagctgctaagattataaaagttaagtctgctaaggatagagaagatgttaagaacgagattaacattatgaaccagttgtctcacgtaaatctgatccagttatatgatgcgtttgagagcaaacactcatgcacattggtcatggagtatgtggatggtggggagctatttgatcgtattacagacgagaagtaccacctaacggagctggatgtggtactgttcactaggcagatctgtgaaggcgttcactatttgcaccagcattacatactgcaccttgacctcaaaccagagaatattctgtgcgtaaaccagaccggacaccagatcaaaatcattgactttggcctagcacgccggtacaaacctagggagaaattgaaagttaactttggcaccccagaatttctcgctcctgaagttgtgaactatgagttcgtttccttccctacggatatgtggtcagtcggagtgataacctacatgcttctcagtggactctcgccatttctgggagagaccgacgctgaaaccatgaactttatcgtcaattgcagttgggatttcgatgccgacacgttcgaggggctgagcgaggaggccaaagatttcgtgtccagactgttggtgaaggagaaatcttgccggatgtccgcaactcagtgtctgaaacatgagtggctgaacaaccttcctgctaaggcatcaagatccaagacccgcctcaaatcccaacttctgctacaaaagtatatcgcacagagaaagtggaaaaagcacttctacgtggtaacagcagctaacaggctgcgcaaattcccaaccagcccctag

SEQ ID NO: 256051 - DNA, 2460 bp, Artificial Sequence
  derived and/or modified sequence
atgagcgggacgtctaaagagtctcttggccatggcggactgcctggattgggcaagacttgcctcaccacaatggacaccaagctgaacatgctgaatgagaaagttgaccagctgcttcactttcaggaagatgtgaccgagaaactccagagcatgtgccgagatatggggcatctggagcgtggcttgcatagactggaggcttcacgagcaccaggccctgggggagccgacggagtgccacacatcgacacgcaggccggatggcctgaggtgttggaacttgtaagagccatgcagcaggatgcggcacagcatggagcaagactcgaagccctgtttcgcatggtggcagcggtggaccgggcaatcgcccttgtgggagccacgtttcagaagtccaaggtggctgactttctgatgcaggggagggtgccctggagaaggggctctccaggagattctccagaggagaataaggagagggtggaagaggaaggcggtaagccaaagcatgtgctgtccacatccggggtgcagagcgatgcccgtgaaccaggggaagaatcacaaaaggctgacgtactggaaggaactgctgaacggctgccgccaattcgcgcttctggtctgggagcagatcctgctcaggccgtggtgtcccctggacagggcgatggagttcccggaccagctcaagcctttcccggtcacctcccccttccaacaaaagttgaggcaaaggcccctgagacaccaagcgagaatcttagaacagggcttgagctggctcctgcccctggcagggtgaacgtggtcagcccatctctcgaagtcgcacctggagctggacagggtgcatcatcctcccggcctgacccggagcccctggaggaaggcacaaggctcactccgggtcctggtccacagtgtccaggcccaccagggctgcccgctcaggcccgtgctacacatagcgggggagagaccccgccacggattagcatccatattcaagaaatggatacaccaggcgagatgttgatgacagggaggggatctctggggccaacactcaccaccgaggctccggcagcggcacagcccggaaagcagggaccacctgggaccgggcgatgcttacaggcacccggaaccgagcctggagaacagaccccagaaggggcacgcgagctgagccccttgcaagagagcagctcacccggaggcgtcaaagcagaagaggagcaacgcgctggggctgaaccaggcacccgcccttctctcgctaggtcagacgacaacgaccacgaggtgggagctctgggactgcagcagggcaaaagtccaggcgcaggtaatcccgaacccgaacaggactgtgccgcacgcgcacctgtgcgggcagaggcagtgagaaggatgcctcctggcgcagaggcaggatccgtggttctggacgacagcccagcaccacccgctccgttcgaacatcgcgtcgtctctgtgaaggagacctccatcagcgcagggtatgaagtgtgtcagcatgaggttcttgggggaggacgcttcggacaggttcaccgatgcacggagaagtcaacaggcctgcccctagccgctaagataataaaggtcaaatccgccaaggaccgagaagatgtgaaaaacgagatcaacattatgaaccagctgtcgcacgtcaatttgatacagctgtacgacgcctttgaaagtaaacactcatgcaccctggttatggagtatgtggacggtggcgaattattcgaccgaattactgatgaaaagtaccacttaacagagttggatgtggtcctttttacccgccagatttgcgaaggcgtgcactacctgcaccaacactacattttacaccttgatctcaagcctgagaacatactctgcgtcaatcaaaccggacatcagatcaagatcatcgacttcgggctggctcggagatataagcctcgggagaaactcaaggttaattttgggacacctgaattcttagcgccagaggttgttaattacgaatttgtgtcttttcctaccgacatgtggtctgtgggggttattacatatatgctcctctccggcctgtccccttttctcggagaaactgatgcagaaacaatgaacttcatcgtcaactgtagctgggacttcgatgccgacactttcgaaggtctgtctgaagaggctaaggattttgtgtctaggctgctggtgaaggagaaatcttgtcgaatgtccgcaacacagtgcctgaagcatgagtggctgaataacctgccggctaaagcctcacggtcaaagactaggttaaagagtcaactcttgctgcagaagtatatcgcacagagaaagtggaagaagcatttttacgtggtgaccgccgctaatagactccgaaagttcccgactagtccatag

SEQ ID NO: 256052 - DNA, 2460 bp, Artificial Sequence
  derived and/or modified sequence
atgagcggcaccagcaaggagagcctgggccacggcggcctgcccggcctgggcaagacctgcctgaccaccatggacaccaagctgaacatgctgaacgagaaggtggaccagctgctgcacttccaggaggacgtgaccgagaagctgcagagcatgtgcagagacatgggccacctggagagaggcctgcacagactggaggccagcagagcccccggccccggcggcgccgacggcgtgccccacatcgacacccaggccggctggcccgaggtgctggagctggtgagagccatgcagcaggacgccgcccagcacggcgccagactggaggccctgttcagaatggtggccgccgtggacagagccatcgccctggtgggcgccaccttccagaagagcaaggtggccgacttcctgatgcagggcagagtgccctggagaagaggcagccccggcgacagccccgaggagaacaaggagagagtggaggaggagggcggcaagcccaagcacgtgctgagcaccagcggcgtgcagagcgacgccagagagcccggcgaggagagccagaaggccgacgtgctggagggcaccgccgagagactgccccccatcagagccagcggcctgggcgccgaccccgcccaggccgtggtgagccccggccagggcgacggcgtgcccggccccgcccaggccttccccggccacctgcccctgcccaccaaggtggaggccaaggcccccgagacccccagcgagaacctgagaaccggcctggagctggcccccgcccccggcagagtgaacgtggtgagccccagcctggaggtggcccccggcgccggccagggcgccagcagcagcagacccgaccccgagcccctggaggagggcaccagactgacccccggccccggcccccagtgccccggcccccccggcctgcccgcccaggccagagccacccacagcggcggcgagaccccccccagaatcagcatccacatccaggagatggacacccccggcgagatgctgatgaccggcagaggcagcctgggccccaccctgaccaccgaggcccccgccgccgcccagcccggcaagcagggcccccccggcaccggcagatgcctgcaggcccccggcaccgagcccggcgagcagacccccgagggcgccagagagctgagccccctgcaggagagcagcagccccggcggcgtgaaggccgaggaggagcagagagccggcgccgagcccggcaccagacccagcctggccagaagcgacgacaacgaccacgaggtgggcgccctgggcctgcagcagggcaagagccccggcgccggcaaccccgagcccgagcaggactgcgccgccagagcccccgtgagagccgaggccgtgagaagaatgccccccggcgccgaggccggcagcgtggtgctggacgacagccccgccccccccgcccccttcgagcacagagtggtgagcgtgaaggagaccagcatcagcgccggctacgaggtgtgccagcacgaggtgctgggcggcggcagattcggccaggtgcacagatgcaccgagaagagcaccggcctgcccctggccgccaagatcatcaaggtgaagagcgccaaggacagagaggacgtgaagaacgagatcaacatcatgaaccagctgagccacgtgaacctgatccagctgtacgacgccttcgagagcaagcacagctgcaccctggtgatggagtacgtggacggcggcgagctgttcgacagaatcaccgacgagaagtaccacctgaccgagctggacgtggtgctgttcaccagacagatctgcgagggcgtgcactacctgcaccagcactacatcctgcacctggacctgaagcccgagaacatcctgtgcgtgaaccagaccggccaccagatcaagatcatcgacttcggcctggccagaagatacaagcccagagagaagctgaaggtgaacttcggcacccccgagttcctggcccccgaggtggtgaactacgagttcgtgagcttccccaccgacatgtggagcgtgggcgtgatcacctacatgctgctgagcggcctgagccccttcctgggcgagaccgacgccgagaccatgaacttcatcgtgaactgcagctgggacttcgacgccgacaccttcgagggcctgagcgaggaggccaaggacttcgtgagcagactgctggtgaaggagaagagctgcagaatgagcgccacccagtgcctgaagcacgagtggctgaacaacctgcccgccaaggccagcagaagcaagaccagactgaagagccagctgctgctgcagaagtacatcgcccagagaaagtggaagaagcacttctacgtggtgaccgccgccaacagactgagaaagttccccaccagcccctag

SEQ ID NO: 256053 - protein, 559 aa, Artificial Sequence
  derived and/or modified sequence
MVEKILIHRILTLFPNAIARKLLLMLTFILIFWIIYLASKDHTKFSFNLENHIILNQGNIFKKYSHSETPLCPAVSPKETELRIKDIMEKLDQQIPPRPFTHVNTTTSATHSTATILNPQDTYCRGDQLDILLEVRDHLGHRKQYGGDFLRARMYSTALMAGASGKVTDFNNGTYLVSFTLFWEGQVSLSLLLIHPSEGVSALWRARNQGCDRIIFTGLFANRSSNVFTECGLTLNTNAELCQYMDDRDQEAFYCVRPQHMPCEALTHMTTRTRNISYLSKEEWRLFHRSNIGVEMMKNFTPIEVIPCNKSENIKKNCQIGMKTPFPSGYTLKKMWITAFCKQIKFNETKNINDCLERKLIYLMGDSTLHQWIYYLQKAVKTLKYFDHHGAGIFKTHVLLDVERHILIQWKKHGHPFVTKKLFSVKDENYIPREIDQVAGDKNTAIVITLGQHFRPFPINIFIRRAINIQKAIERLFLRSPETKVILKTENTREIEQNAEMFSDFHGYIQNLIIRDIFVDLNVGIIDAWDMTIAYCTNNAHPPDYVIQNQIGMFLNYIC

SEQ ID NO: 256054 - protein, 365 aa, Artificial Sequence
  derived and/or modified sequence
MVEKILIHRILTLFPNAIARKLLLMLTFILIFWIIYLASKDHTKFSFNLENHIILNQGNIFKKYSHSETPLCPAVSPKETELRIKDIMEKLDQQIPPRPFTHVNTTTSATHSTATILNPQDTYCRGDQLDILLEVRDHLGHRKQYGGDFLRARMYSTALMAGASGKVTDFNNGTYLVSFTLFWEGQVSLSLLLIHPSEGVSALWRARNQGCDRIIFTGLFANRSSNVFTECGLTLNTNAELCQYMDDRDQEAFYCVRPQHMPCEALTHMTTRTRNISYLSKEEWRLFHRSNIGVEMMKNFTPIEVIPCPALFYFIFRDSLTLSPRLECSGMISAHCNLCLPGSSDSPDSASHVAGITSVQRHTWL

SEQ ID NO: 256055 - DNA, 1680 bp, Artificial Sequence
  derived and/or modified sequence
atggtggagaagatcctgatccacagaatcctgaccctgttccccaacgccatcgccagaaagctgctgctgatgctgaccttcatcctgatcttctggatcatctacctggccagcaaggaccacaccaagttcagcttcaacctggagaaccacatcatcctgaaccagggcaacatcttcaagaagtacagccacagcgagacccccctgtgccccgccgtgagccccaaggagaccgagctgagaatcaaggacatcatggagaagctggaccagcagatcccccccagacccttcacccacgtgaacaccaccaccagcgccacccacagcaccgccaccatcctgaacccccaggacacctactgcagaggcgaccagctggacatcctgctggaggtgagagaccacctgggccacagaaagcagtacggcggcgacttcctgagagccagaatgtacagcaccgccctgatggccggcgccagcggcaaggtgaccgacttcaacaacggcacctacctggtgagcttcaccctgttctgggagggccaggtgagcctgagcctgctgctgatccaccccagcgagggcgtgagcgccctgtggagagccagaaaccagggctgcgacagaatcatcttcaccggcctgttcgccaacagaagcagcaacgtgttcaccgagtgcggcctgaccctgaacaccaacgccgagctgtgccagtacatggacgacagagaccaggaggccttctactgcgtgagaccccagcacatgccctgcgaggccctgacccacatgaccaccagaaccagaaacatcagctacctgagcaaggaggagtggagactgttccacagaagcaacatcggcgtggagatgatgaagaacttcacccccatcgaggtgatcccctgcaacaagagcgagaacatcaagaagaactgccagatcggcatgaagacccccttccccagcggctacaccctgaagaagatgtggatcaccgccttctgcaagcagatcaagttcaacgagaccaagaacatcaacgactgcctggagagaaagctgatctacctgatgggcgacagcaccctgcaccagtggatctactacctgcagaaggccgtgaagaccctgaagtacttcgaccaccacggcgccggcatcttcaagacccacgtgctgctggacgtggagagacacatcctgatccagtggaagaagcacggccaccccttcgtgaccaagaagctgttcagcgtgaaggacgagaactacatccccagagagatcgaccaggtggccggcgacaagaacaccgccatcgtgatcaccctgggccagcacttcagacccttccccatcaacatcttcatcagaagagccatcaacatccagaaggccatcgagagactgttcctgagaagccccgagaccaaggtgatcctgaagaccgagaacaccagagagatcgagcagaacgccgagatgttcagcgacttccacggctacatccagaacctgatcatcagagacatcttcgtggacctgaacgtgggcatcatcgacgcctgggacatgaccatcgcctactgcaccaacaacgcccacccccccgactacgtgatccagaaccagatcggcatgttcctgaactacatctgctag

SEQ ID NO: 256056 - DNA, 1098 bp, Artificial Sequence
  derived and/or modified sequence
atggtggagaagatcctgatccacagaatcctgaccctgttccccaacgccatcgccagaaagctgctgctgatgctgaccttcatcctgatcttctggatcatctacctggccagcaaggaccacaccaagttcagcttcaacctggagaaccacatcatcctgaaccagggcaacatcttcaagaagtacagccacagcgagacccccctgtgccccgccgtgagccccaaggagaccgagctgagaatcaaggacatcatggagaagctggaccagcagatcccccccagacccttcacccacgtgaacaccaccaccagcgccacccacagcaccgccaccatcctgaacccccaggacacctactgcagaggcgaccagctggacatcctgctggaggtgagagaccacctgggccacagaaagcagtacggcggcgacttcctgagagccagaatgtacagcaccgccctgatggccggcgccagcggcaaggtgaccgacttcaacaacggcacctacctggtgagcttcaccctgttctgggagggccaggtgagcctgagcctgctgctgatccaccccagcgagggcgtgagcgccctgtggagagccagaaaccagggctgcgacagaatcatcttcaccggcctgttcgccaacagaagcagcaacgtgttcaccgagtgcggcctgaccctgaacaccaacgccgagctgtgccagtacatggacgacagagaccaggaggccttctactgcgtgagaccccagcacatgccctgcgaggccctgacccacatgaccaccagaaccagaaacatcagctacctgagcaaggaggagtggagactgttccacagaagcaacatcggcgtggagatgatgaagaacttcacccccatcgaggtgatcccctgccccgccctgttctacttcatcttcagagacagcctgaccctgagccccagactggagtgcagcggcatgatcagcgcccactgcaacctgtgcctgcccggcagcagcgacagccccgacagcgccagccacgtggccggcatcaccagcgtgcagagacacacctggctgtag

SEQ ID NO: 256057 - DNA, 1873 bp, Artificial Sequence
  derived and/or modified sequence
gtgggttgggcaggaacagatcataataagggaggtttatgattccagctggcacgctgtggccacaaataggatgtcagcttttgatcaatgaagctcatagggaaactccaaccctaagataaatgcaaagactgctttaatcaaggagagtctctggacactataattcctgtgagaacacgagaagatggtggagaaaatactcatccataggatactcactttgtttccaaatgccatagctcgaaaattactgctgatgttgacatttatcttaattttctggatcatttacttggcttcaaaagaccacacaaagttctcgttcaacttggaaaaccatattatcctgaaccaagggaacatcttcaaaaaatattcacactctgaaacaccactgtgtccagcagtttcaccaaaagagactgaacttagaataaaggacattatggagaaactagaccagcagatcccacccagacctttcacccatgtgaataccaccaccagtgccacacacagcacagccaccatcctcaaccctcaagatacgtactgcaggggggatcagctggacatccttctggaggtgagggaccacttgggacacaggaagcaatatggtggggatttcctgagggccaggatgtactccacagcactaatggcaggtgcttcaggaaaggtgactgacttcaacaacggcacctacctggtcagcttcactctgttctgggagggccaggtttccctgtctctgctgctcatccaccccagtgaaggggtatcagctctctggagggcaaggaaccaaggatgtgataggatcatcttcactggcctgtttgccaacagaagctccaatgtcttcactgaatgtggcctgaccctaaacacaaatgctgaactgtgccagtacatggatgacagagaccaagaagccttctactgtgtgaggcctcaacatatgccctgtgaggccttgacccacatgaccactaggacaagaaatatttcctatcttagcaaggaagaatggaggcttttccacaggtccaacataggagttgaaatgatgaagaactttacccccattgaggtcataccatgcaacaagagcgagaacataaaaaagaactgccagattggaatgaagactcctttccccagtggttatactttgaaaaaaatgtggattacagcattttgtaaacagatcaagttcaatgaaacaaaaaatataaatgactgcttggaaagaaaacttatttatctcatgggagattcaacactgcatcagtggatttactacttacaaaaagctgtgaaaaccctaaaatattttgatcatcatggagctgggatctttaaaacacatgttcttctggatgttgaaagacatattttgattcagtggaaaaaacatggtcatccatttgttaccaaaaaattattctcagtgaaagatgaaaactatatcccacgggaaattgaccaggtagcaggagacaaaaacacagccattgtcattaccctcggccaacacttcagaccctttcccatcaacattttcatccgtagggccatcaatattcaaaaggccattgaacgtctattcttgcgaagcccggagaccaaggtgatacttaaaactgaaaacaccagagagatagaacaaaatgcagagatgttcagtgactttcatggctatattcagaatcttatcataagagatatttttgtggatcttaatgtgggtattattgatgcctgggacatgacgattgcatattgcaccaacaatgcccatccaccggattatgtgattcaaaatcagattggcatgttcttaaactacatttgttagagg

SEQ ID NO: 256058 - DNA, 2205 bp, Artificial Sequence
  derived and/or modified sequence
agagtctctggacactataattcctgtgagaacacgagaagatggtggagaaaatactcatccataggatactcactttgtttccaaatgccatagctcgaaaattactgctgatgttgacatttatcttaattttctggatcatttacttggcttcaaaagaccacacaaagttctcgttcaacttggaaaaccatattatcctgaaccaagggaacatcttcaaaaaatattcacactctgaaacaccactgtgtccagcagtttcaccaaaagagactgaacttagaataaaggacattatggagaaactagaccagcagatcccacccagacctttcacccatgtgaataccaccaccagtgccacacacagcacagccaccatcctcaaccctcaagatacgtactgcaggggggatcagctggacatccttctggaggtgagggaccacttgggacacaggaagcaatatggtggggatttcctgagggccaggatgtactccacagcactaatggcaggtgcttcaggaaaggtgactgacttcaacaacggcacctacctggtcagcttcactctgttctgggagggccaggtttccctgtctctgctgctcatccaccccagtgaaggggtatcagctctctggagggcaaggaaccaaggatgtgataggatcatcttcactggcctgtttgccaacagaagctccaatgtcttcactgaatgtggcctgaccctaaacacaaatgctgaactgtgccagtacatggatgacagagaccaagaagccttctactgtgtgaggcctcaacatatgccctgtgaggccttgacccacatgaccactaggacaagaaatatttcctatcttagcaaggaagaatggaggcttttccacaggtccaacataggagttgaaatgatgaagaactttacccccattgaggtcataccatgcccggcattattttattttatttttcgagacagtctcactctgtcaccaagactggagtgcagtggcatgatctcagctcattgcaacctctgcctcccgggttcaagcgattctcctgactcagcctcccacgtagctgggatcaccagtgtgcagcgccacacctggctataaaccatttttaagcgtacaattcagtgatattaagtaatttacaatgttgtgaaaccctcatcatgatccatctctggcacatttttaacattccaaaaagaaacttggtacctattaaacaataactccccattcgctcctgtccttggcccatggcaaccgccattgtattttctgtccttctgaatttgactattttaggtagctcatataagtgggaacatgcagcatttgtccttttctgtctggcgtatttcacttagcatatgtctttaaggttcatccatattgtagcatttgtcagaattttccttcatttttaagactgaataatattccgttgtaagtatgtactacattttgtttatccattcatttgttgatcgacatttgggttgtttccccttttggctactgtaaatagtgcttctaggaagagaaaaccaaatttaaaggcatgtctccagtgctgagcatgatgattgaatagcaaatcatcatcacccataatttgaagacatgtgcagcccagaaatgcatagattaaatgattcaagtttagagaaaatgtgatgtatacaggaaaacttagtgggatcataatagcagtcttcttgcttaggaaaattatttggaacttagtaaccagttgttctctagattccagtaagaatcatggatcacacttcaaaacccacaggctcattgagagaaaacaacttagtattatgttaacgtacagaccccaaaaccttgattcttggatatcctaaaatatgatttgggatcccctccagagggcctcaaatgacaaattttgtctctaaatcttcctctcattagaaagatatacaccctttctattaatatactctaggtctcaagagtaggaatattgttattaaggatacttcccctcttaggactgtgtttcttagttagaggaagtgaagttataatgctgtaacatcagtacaaagtttgggtcgtcaggaggtggaggttgcagtgagccaagattgcaccaccacactccagcctgggtgacagagcgagactccatctc

SEQ ID NO: 256059 - DNA, 1680 bp, Artificial Sequence
  derived and/or modified sequence
atggtcgaaaaaatccttattcaccgaattctcaccttgtttcccaacgccatcgcccgaaaactcctgctgatgttgacattcatcttgattttctggatcatttacctggcctcaaaagaccacaccaagttttccttcaatctggagaaccacatcatcctcaaccagggaaacattttcaaaaagtacagccacagcgagacccccctgtgccctgcagtaagcccaaaagagacagagctgagaattaaggacatcatggagaagctcgatcagcaaattcctcctcgacccttcactcacgtgaacaccactacttccgctacacactcaactgcaacaattctgaacccccaggacacctactgtagaggcgatcagctggatattttactggaagtgcgggatcatctgggccacaggaagcagtatgggggggattttctgcgcgctagaatgtacagtactgctctcatggcaggcgcaagcggcaaagtaaccgattttaataacggcacgtacttggtgtctttcactctgttttgggaggggcaggtctcactgagtcttctattaattcaccctagcgagggcgtctcagccctgtggagagccagaaaccaggggtgtgatagaatcatatttactggcctattcgccaacaggtcatccaatgtctttacggagtgtggactcacgcttaacaccaatgctgagctttgtcagtatatggacgatcgcgatcaggaggcgttttattgcgtccgcccacagcacatgccttgcgaagccttaactcacatgacaactcggacgcggaacatctcttatctgagtaaggaggaatggcgactcttccaccgctccaatattggagttgaaatgatgaagaactttacaccaattgaggtgattccctgcaataaatcggaaaacataaaaaagaattgtcaaattgggatgaaaaccccgtttcctagcggctacaccctgaaaaaaatgtggattacagccttctgcaagcagattaagtttaatgagacaaagaatatcaatgactgtttggagcggaaattaatttatttaatgggtgactctactctgcatcagtggatctactacctgcagaaagccgtgaagacactcaaatactttgaccaccacggcgccgggatcttcaaaacacacgtgcttctagatgtcgaaagacacattctgatccagtggaagaagcacggacaccccttcgtcacgaagaagctatttagcgtgaaagatgaaaattacattccccgggagatcgaccaggtagctggagataaaaacacggccatcgtaataactctcggacaacacttcagaccattccctatcaatatttttatccggcgggccatcaatatccagaaggccatcgagcggctattcttacgaagccctgaaaccaaggtaattttaaagaccgagaacactcgcgaaattgagcagaatgccgagatgtttagcgacttccatgggtacattcaaaatttaataatccgcgatatattcgtggatctcaacgtgggcatcatcgacgcttgggacatgactatcgcctattgtaccaacaacgctcatccccccgactacgtcattcaaaaccagattggcatgtttttaaattacatttgttag

SEQ ID NO: 256060 - DNA, 1098 bp, Artificial Sequence
  derived and/or modified sequence
atggtagaaaaaatcctcatccatcggatcctaaccctttttcccaatgccattgcacgtaagctcctcctgatgctgacatttattctgatattttggatcatctatcttgcgagcaaggaccatactaaatttagcttcaacttggaaaatcatataattctaaatcaaggaaatattttcaagaaatattcacacagcgagacgccgctgtgccctgctgtctctccgaaggaaaccgagttacgcatcaaggacattatggaaaaactggatcagcagattccaccccggccatttacccatgtcaacaccaccactagtgccacccattctacagcaactattcttaatcctcaggacacctattgcagaggagatcagctggacattctactggaagttcgcgatcacttgggacacagaaaacaatacggtggcgactttttacgcgctagaatgtactcaacagctctaatggccggcgcatccgggaaggttacggactttaataatggcacatatctggtttcttttacgctgttctgggaaggccaagtgtccctgtccctgctgctgattcacccttcagagggtgtcagtgctctctggagagcccggaatcagggctgtgatcggatcatcttcacaggcctctttgcaaatcggagctccaacgtctttacagagtgcgggctcacactgaacaccaacgcagagctttgccagtacatggatgaccgtgaccaggaggccttctattgtgtgaggccccagcatatgccatgtgaagcactgacccacatgactacacggaccagaaacatctcatatctgtctaaggaagaatggcgtcttttccacagaagcaatataggagtggagatgatgaaaaactttacacccatagaggttatcccatgtcccgccttgttctactttatttttagggacagcctgaccctctctcctagattggaatgctctgggatgatttctgctcattgtaacctatgcctcccgggtagctccgactcaccagatagcgcgagccatgttgccggcatcacatcagtgcagaggcacacatggctttag

SEQ ID NO: 256061 - DNA, 1680 bp, Artificial Sequence
  derived and/or modified sequence
atggtggagaagatcctgatccaccgcatcctgaccctcttccccaatgccatcgccaggaagctgctgctgatgctgaccttcatcctgatcttctggatcatctacctggccagcaaggaccacaccaagttctccttcaacctggagaaccacatcatcctgaaccagggcaacatcttcaagaagtacagccacagcgagacccccctgtgcccagctgtgagccccaaggagacagagctgcgcatcaaggacatcatggagaagctggaccagcagatccccccccggcccttcacccacgtgaacaccaccaccagcgccacccacagcacagccaccatcctgaacccccaggacacctactgccgcggggaccagctggacatcctgctggaggtgcgggaccacctgggccacaggaagcagtatggaggagacttcctgcgggccaggatgtacagcacagccctgatggccggggccagcggcaaggtgacagacttcaacaacggcacctacctggtgtccttcaccctcttctgggagggccaggtgtccctgagcctgctgctgatccaccccagcgagggcgtgtctgccctgtggagggccaggaaccagggctgtgaccgcatcatcttcaccggcctgtttgccaacagaagcagcaatgtgttcacagaatgtggcctgaccctgaacaccaatgctgagctgtgccagtacatggatgaccgggaccaggaggccttctactgtgtgcggccccagcacatgccctgtgaggccctgacccacatgaccaccaggaccaggaacatctcctacctgagcaaggaggagtggaggctcttccacaggagcaacatcggcgtggagatgatgaagaacttcacccccattgaagtcatcccctgcaacaagtctgagaacatcaagaagaactgccagatcggcatgaagacccccttccccagcggctacaccctgaagaagatgtggatcacagccttctgcaagcagatcaagttcaatgagaccaagaacatcaatgactgcctggagaggaagctgatctacctgatgggagacagcaccctgcaccagtggatctactacctgcagaaggctgtgaagaccctgaagtactttgaccaccacggggccggcatcttcaagacccacgtgctgctggatgtggagcggcacatcctgatccagtggaagaagcacggccacccctttgtgaccaagaagctgttctctgtgaaggatgagaactacatcccccgggagattgaccaggtggccggggacaagaacacagccatcgtcatcaccctgggccagcacttccggcccttccccatcaacatcttcatccggcgggccatcaacatccagaaggccatcgagcggctcttcctgcggagccctgagaccaaggtgatcctgaagacagagaacacccgggagattgagcagaatgctgagatgttcagtgacttccacggctacatccagaacctgatcatccgggacatctttgtggacctgaatgtgggcatcattgatgcctgggacatgaccatcgcctactgcaccaacaatgcccaccccccagactatgtgatccagaaccagatcggcatgttcctgaactacatctgctag

SEQ ID NO: 256062 - DNA, 1098 bp, Artificial Sequence
  derived and/or modified sequence
atggtggagaagatcctgatccaccgcatcctgaccctcttccccaatgccatcgccaggaagctgctgctgatgctgaccttcatcctgatcttctggatcatctacctggccagcaaggaccacaccaagttctccttcaacctggagaaccacatcatcctgaaccagggcaacatcttcaagaagtacagccacagcgagacccccctgtgcccagctgtgagccccaaggagacagagctgcgcatcaaggacatcatggagaagctggaccagcagatccccccccggcccttcacccacgtgaacaccaccaccagcgccacccacagcacagccaccatcctgaacccccaggacacctactgccgcggggaccagctggacatcctgctggaggtgcgggaccacctgggccacaggaagcagtatggaggagacttcctgcgggccaggatgtacagcacagccctgatggccggggccagcggcaaggtgacagacttcaacaacggcacctacctggtgtccttcaccctcttctgggagggccaggtgtccctgagcctgctgctgatccaccccagcgagggcgtgtctgccctgtggagggccaggaaccagggctgtgaccgcatcatcttcaccggcctgtttgccaacagaagcagcaatgtgttcacagaatgtggcctgaccctgaacaccaatgctgagctgtgccagtacatggatgaccgggaccaggaggccttctactgtgtgcggccccagcacatgccctgtgaggccctgacccacatgaccaccaggaccaggaacatctcctacctgagcaaggaggagtggaggctcttccacaggagcaacatcggcgtggagatgatgaagaacttcacccccattgaagtcatcccctgcccagccctcttctacttcatcttccgggacagcctgaccctgagcccccggctggagtgcagcggcatgatcagcgcccactgcaacctgtgcctgcccggcagcagtgacagcccagattctgccagccacgtggccggcatcacctctgtgcagaggcacacctggctgtag

SEQ ID NO: 256063 - DNA, 1680 bp, Artificial Sequence
  derived and/or modified sequence
atggtggagaagatcctgatccaccggatcctgaccctgttccccaacgccatcgctcgtaagctcctgttgatgctaacttttatcctgatcttctggattatctacctggcatctaaggaccacacgaaattctcattcaatttggaaaaccacatcatcctgaatcagggaaatattttcaagaaatactcccacagtgagacccctctatgtcctgccgtgagccctaaagagaccgagctccgtattaaagatattatggagaaactagaccaacagatccctcctcgaccatttacccacgtgaatactactacctccgccacacattctacagcaacgattctcaaccctcaggatacctactgtagaggagaccagctagacatcctgttagaggtaagggaccacctcgggcaccgtaaacagtatggcggtgattttcttcgcgcccggatgtactcgacagccctgatggcaggtgcctctggcaaggtgacagactttaacaatgggacctacctggtcagctttacactgttttgggagggccaggtctctcttagcctgctgctgatacacccctccgaaggcgtgtctgcgctctggagggccaggaaccaggggtgcgaccggattatcttcactggactcttcgccaaccggagctccaacgtatttaccgagtgtggactgaccctgaacacaaacgctgaactctgccagtacatggacgatagggatcaagaagcgttctattgtgttaggcctcagcacatgccatgtgaggccctgacacacatgactacaaggactcggaatatcagttatctgtcgaaggaggaatggcggctattccaccggagtaatattggagtcgagatgatgaaaaatttcacacccatcgaagtcattccgtgtaataaaagcgaaaacatcaagaaaaattgtcagattgggatgaaaacaccatttccctctggatataccctgaaaaagatgtggattaccgcattctgtaaacagataaagttcaacgagacaaaaaatattaatgactgccttgaaagaaagctcatttatctcatgggcgacagcaccctgcaccagtggatttactaccttcaaaaagccgtgaagactctaaaatatttcgatcaccatggggcaggcatctttaagacccacgtcctactggacgttgaaagacacatcctgatccagtggaagaagcatggacacccctttgtcaccaagaagctgttctctgtgaaagacgagaactacattccacgtgagatcgaccaagtcgcgggcgacaagaacactgcaattgtcatcaccctcggtcagcattttcgcccattccccatcaacatcttcatacggcgtgctatcaacatccagaaggctattgaacgcctgttcctaagatctcctgagactaaagtgatcctgaaaaccgaaaatacccgcgaaattgaacagaacgctgaaatgttttccgattttcacgggtatatccaaaatctgattatccgcgatatctttgtggacctcaatgtgggaattatcgatgcttgggatatgacaatagcgtattgcacaaacaacgcacaccctccagactatgtcatccaaaatcagattggaatgttccttaattatatctgctag

SEQ ID NO: 256064 - DNA, 1098 bp, Artificial Sequence
  derived and/or modified sequence
atggtggagaagatcctgatccaccggatcctgaccctgttccccaatgcgatcgcaagaaagctgcttctcatgcttacttttattctcatcttttggatcatctacctggctagcaaggatcacactaaattttctttcaatcttgagaatcacatcatcctgaatcagggcaacatatttaaaaagtattcacatagtgaaacaccgctgtgcccagcagtgtctcctaaagagacagaactgcggattaaagatattatggaaaagctggatcagcagatccctccccggccctttacccacgtaaacaccaccaccagcgcgactcacagcactgccaccattttgaatcctcaagatacatattgtagaggtgaccaactcgacatcttgttagaggtgcgggaccacctcggccatcgcaagcagtatgggggcgacttcctccgcgctcgcatgtacagtaccgcactcatggccggagcgtcagggaaggtaactgacttcaataatggcacatatttggtttccttcactctcttttgggaaggccaggtatcattatcactgcttctgatccaccccagtgaaggggtgtccgcgctgtggagggcaaggaatcaagggtgcgacaggattattttcaccggcctgtttgctaataggagttccaacgtgtttaccgaatgcggcctgaccctaaataccaatgccgaactttgtcagtacatggacgatagggaccaggaagcattctattgtgtgagaccacagcatatgccctgtgaagccctcacacatatgacaaccagaacacggaacattagctacctatccaaggaagagtggcgcttgttccatcgttccaacattggcgttgagatgatgaagaactttacccccatcgaagtgataccgtgccccgcactcttctatttcatattccgggatagtttgaccctgagcccaaggctggagtgcagcggcatgattagcgctcattgcaacctgtgcttacctggctcctcagactcccctgatagcgcatcgcacgtagcaggcatcacttccgtgcagcggcacacatggctctag

SEQ ID NO: 256065 - DNA, 1680 bp, Artificial Sequence
  derived and/or modified sequence
atggtggagaaaatactgatccatagaattctgactttatttcccaatgcaatagccaggaagttattactcatgctaacattcattctcatattctggatcatttatttagcttcaaaagaccacacaaagttttcttttaatctcgagaatcatatcattctgaatcagggcaacatttttaagaagtactcccacagcgagacgcctttatgtccggctgtaagccctaaggaaactgaactcagaatcaaggatattatggagaagctggatcaacagattcctcccaggccatttacccacgttaacacaacaactagcgctacacactctacggctacaatactaaatccgcaggacacgtactgccgtggcgaccagctcgacatacttctagaggtccgggatcatctcggccaccggaagcagtatgggggagacttccttcgcgcaagaatgtactcaactgccttaatggccggagcctccggcaaggtgactgactttaataatggcacgtacttagtcagctttacactgttctgggaaggccaagtcagcctgtcactgcttcttatacatcctagtgaaggcgtgtccgcgctgtggagggctagaaatcagggctgcgaccggatcatcttcaccggcctatttgctaataggtcatctaacgtttttaccgaatgtggactgacactgaacaccaacgccgagctgtgccagtacatggacgacagggatcaagaggccttttattgcgtccgaccccagcatatgccctgtgaggctctcacacacatgactactagaacaaggaacatcagttatctgagcaaagaggaatggcggctctttcaccgctctaatatcggtgtggagatgatgaaaaattttactcccattgaggtgattccttgcaacaagagtgagaatattaaaaaaaattgccaaatcggtatgaaaacacccttcccgagcgggtatacactgaagaaaatgtggataacagccttctgtaaacagatcaagtttaatgagaccaagaatattaatgactgcctcgaaaggaaactcatatatctgatgggcgactctactctgcaccagtggatttactacctgcagaaagccgtgaaaactttgaagtacttcgatcatcatggcgctggcattttcaagacccacgtcctcttagacgtggagcggcacattctcatccagtggaaaaaacatgggcaccccttcgtgacaaaaaagttatttagtgtgaaggatgagaattacatacccagagaaatcgatcaggtcgccggtgataagaacaccgcaatagtgatcacgctgggtcaacactttcgcccatttcccatcaacatctttatccgtcgagccatcaatattcagaaggcaattgagaggctgtttttacggtcccctgagacgaaggtaatcctcaagacagagaatacacgagagattgaacagaatgctgagatgttcagtgactttcacggatatatccaaaatctcattatcagagacatctttgtagacctgaacgtgggcatcatagacgcatgggatatgactattgcatattgcaccaataatgcgcatcccccagattacgttattcagaaccagatcggtatgttcctcaactacatttgctag

SEQ ID NO: 256066 - DNA, 1098 bp, Artificial Sequence
  derived and/or modified sequence
atggtcgagaaaatacttatacatcggattctcaccctgttccctaacgcgattgctaggaaacttctcctgatgctgacattcatattgatcttttggatcatttacctagccagtaaggaccatacaaagttcagcttcaacctcgaaaatcacattatattgaaccagggcaatatctttaaaaagtatagtcattccgagacgcctctttgcccagccgtctccccaaaggaaaccgagttgaggatcaaggatatcatggaaaaattggaccaacagatcccccctcgaccttttactcacgtgaacactaccacctcagccactcacagcactgcgacgatcctgaacccacaggatacatattgcaggggagatcaattggacattctcctcgaggtgagggaccatttgggccatcgaaagcagtacggcggtgacttcctccgcgcaaggatgtacagtacagccctgatggcaggtgcctccgggaaggttaccgatttcaacaacggcacgtaccttgtgtcgtttactttgttctgggaagggcaggtgtccttgagtctccttctgattcatcctagcgagggtgtgtctgccctatggagagccaggaatcaggggtgtgaccggatcatctttacaggactgttcgctaatcggtcctcaaacgtgttcaccgaatgtggtctgactcttaataccaatgctgaattgtgccagtacatggatgatagggaccaggaggcattctattgcgtgaggccacaacatatgccatgcgaagctctgacacacatgacaacaagaacgaggaacatctcatatctttccaaagaggagtggaggttatttcacagaagtaatatcggggtggagatgatgaagaatttcaccccaatcgaagtgatcccctgccctgcattgttttatttcattttcagggattcactcactctgtctccccgtctcgaatgctctggcatgatctcagcccactgtaatctgtgtcttccagggagttctgacagcccggactcagcctcacacgtcgccggaatcacctcagtccagcggcatacatggttgtag

SEQ ID NO: 256067 - protein, 416 aa, Artificial Sequence
  derived and/or modified sequence
MYRHGISSQRSWPLWTTIFIFLGVAAILGVTIGLLVHFLAVEKTYYYQGDFHISGVTYNDNCENAASQASTNLSKDIETKMLNAFQNSSIYKEYVKSEVIKLLPNANGSNVQLQLKFKFPPAEGVSMRTKIKAKLHQMLKNNMASWNAVPASIKLMEISKAASEMLTNNCCGRQVANSIITGNKIVNGKSSLEGAWPWQASMQWKGRHYCGASLISSRWLLSAAHCFAKKNNSKDWTVNFGIVVNKPYMTRKVQNIIFHENYSSPGLHDDIALVQLAEEVSFTEYIRKICLPEAKMKLSENDNVVVTGWGTLYMNGSFPVILQEDFLKIIDNKICNASYAYSGFVTDTMLCAGFMSGEADACQNDSGGPLAYPDSRNIWHLVGIVSWGDGCGKKNKPGVYTRVTSYRNWITSKTGL

SEQ ID NO: 256068 - DNA, 318 bp, Artificial Sequence
  derived and/or modified sequence
atgtatagaccagtcatggcttcctgtacatctgtgtcactatggatgattgcccttcttgtgtttggagtgttggcaatctttggaataactattggtctccttgttcattttctggcagtagcaaacaggatctacttctaccaaggtagctttaaaatgctggatatcccatataatagcaattatgaaagggagacatcaccagaaaataactatcttagccaaattcttgagactagatggttgatgcatttcaaagttctagcatttacagacaatatatcttttctcaagtcatcacactggtgtaagtaa

SEQ ID NO: 256069 - DNA, 1251 bp, Artificial Sequence
  derived and/or modified sequence
atgtaccggcatggcataagtagtcaaaggagttggcctctttggacaaccatttttatcttcctgggagtagccgctatactcggagtcacaattggccttcttgtgcacttcctcgcggtcgagaagacctattactatcagggtgactttcacattagtggcgtcacctacaatgacaactgcgagaacgccgcatcacaggcttctaccaacctgtccaaagatatcgagaccaaaatgcttaacgctttccagaattcttcgatttataaggagtacgtaaagtccgaggtcatcaagctgctcccaaatgccaatggatcaaacgttcagttgcagctgaaattcaagtttcctccagctgaaggcgtttcgatgcggaccaagatcaaggcaaaactgcatcagatgcttaaaaacaacatggctagttggaacgcagtgcccgcaagcatcaagctgatggaaataagtaaagcagctagtgaaatgctaaccaacaattgttgcggtagacaagtcgcaaattccattatcacgggcaataaaatcgtgaacgggaaatcctctctggagggagcctggccatggcaggctagcatgcagtggaagggcagacactactgcggggctagtttgattagtagtcgctggttgctcagcgccgcacactgttttgctaagaaaaacaactccaaagactggacagtaaacttcggaatcgttgtaaataagccatatatgaccagaaaggtccagaacattatttttcacgaaaactactcttcccctggactgcatgacgatatagccctggtacagctggcagaggaggtgagctttaccgaatacataaggaaaatctgtctgccagaagcgaagatgaagctgtcagagaatgataacgtggtggtgaccggatggggtactctttacatgaacgggtcttttcctgtcatactccaggaagattttcttaaaattatcgataacaagatttgtaatgcttcatacgcgtactcaggctttgtaacagacactatgctttgtgctggcttcatgtccggagaagctgacgcttgtcaaaatgattccggcggtccattggcctacccagatagtcgaaatatctggcatctggtaggaattgtgagctggggggacggttgcggtaaaaaaaacaagccgggagtctatacccgcgttaccagctatagaaactggatcacttcaaagacagggctgtag

SEQ ID NO: 256070 - DNA, 1251 bp, Artificial Sequence
  derived and/or modified sequence
atgtatagacatgggatctcttcacagcgctcctggcccttgtggaccacaatatttattttcttaggggtggcagctattctcggtgtgaccattggactcctcgttcatttccttgcagtggaaaagacatactattaccagggagactttcacatctccggagtgacctataacgataactgcgaaaacgctgctagccaggcctctacaaacctttcaaaagatatcgagactaaaatgctgaacgcattccagaattcaagtatatacaaagagtacgtgaagtcagaagtgatcaagctgctccccaatgccaacggttcaaacgtgcaacttcaactgaagttcaaattcccacctgccgaaggggtctccatgaggaccaaaattaaagcgaaactgcatcagatgttaaagaacaatatggcaagctggaacgccgtccctgcgtctatcaagcttatggaaattagcaaggccgcatctgagatgcttacaaataactgttgtggacggcaggtcgccaattctatcattaccggaaacaagatagtgaacggcaagagctccctcgagggggcctggccttggcaggcctcaatgcagtggaaaggcaggcattactgcggagcatctctcatttcatctagatggcttctctccgccgctcactgctttgccaagaagaacaacagcaaggattggaccgtcaatttcggtattgttgtcaataagccctacatgacacgtaaagtccaaaacatcatttttcacgaaaactattcttcaccgggcctccatgacgatatcgccctagttcagctagctgaagaggtttccttcaccgagtatatccgtaagatttgtctgcccgaagctaaaatgaagctcagcgaaaacgataacgttgtcgtcaccggctggggaaccctgtatatgaatggctcatttccagtaattctgcaggaggactttctgaaaatcatagacaacaagatttgcaatgcttcttacgcctactcaggattcgttacggacacaatgttgtgtgcaggcttcatgtccggggaggctgatgcctgccagaatgacagcggcggacctctggcgtaccctgactcccgcaacatctggcaccttgttggaattgtatcctggggtgacgggtgcggaaaaaagaataagcccggcgtttacacacgcgtgactagttatcgaaactggataacttccaagacaggactttag

SEQ ID NO: 256071 - DNA, 1251 bp, Artificial Sequence
  derived and/or modified sequence
atgtatcgacatggaataagcagtcaacgtagttggcctctctggaccactattttcatttttctgggggtcgctgcgatcctaggagttacgatcggtctgctggtgcacttcctcgcggtagaaaagacatactattatcagggcgattttcacatcagcggcgtgacctataacgacaattgtgagaatgcagctagtcaggcttccacaaacctctccaaagacatcgaaacaaaaatgctcaatgcctttcagaatagttccatttacaaagagtatgtgaaatcagaagtgattaagttgcttccaaacgccaatggctccaacgtacagctccagctcaaatttaaatttcctcctgcagaaggtgtgagcatgagaactaagattaaagccaaactgcatcaaatgcttaagaataatatggcttcatggaatgcggtgcctgcgtcaattaaactgatggaaatttcgaaagccgcctccgagatgcttaccaacaattgttgtgggagacaagtggccaatagcataataactggcaataagattgtaaacggaaaatcctccctggagggtgcatggccctggcaagctagcatgcaatggaaaggccgacattactgtggagccagccttatctccagcaggtggctgctatccgctgctcactgtttcgctaagaagaacaactctaaagactggaccgttaattttgggatcgtggtgaataaaccttacatgaccagaaaagtgcaaaatataatatttcacgaaaattattcctctcccggattgcacgatgatatagcattggtccagctggccgaggaagtgagttttaccgagtacatcaggaaaatctgtttacccgaagctaagatgaagctctcagaaaatgataacgtggtggtgacgggatggggaacactgtatatgaacggaagctttccagtgatactgcaggaggattttctgaaaataatcgataacaaaatatgtaacgcttcatacgcgtattccggcttcgtaacggataccatgctatgcgcaggtttcatgtctggggaagctgacgcatgtcagaacgactctggaggaccacttgcctacccagattcaagaaacatctggcacctggtgggtattgttagctggggggacggatgcggtaagaagaataaacctggagtctacacacgcgtaacctcatatcgaaactggatcacatctaaaaccggactgtag

SEQ ID NO: 256072 - DNA, 1251 bp, Artificial Sequence
  derived and/or modified sequence
atgtacagacacggcatcagcagccagagaagctggcccctgtggaccaccatcttcatcttcctgggcgtggccgccatcctgggcgtgaccatcggcctgctggtgcacttcctggccgtggagaagacctactactaccagggcgacttccacatcagcggcgtgacctacaacgacaactgcgagaacgccgccagccaggccagcaccaacctgagcaaggacatcgagaccaagatgctgaacgccttccagaacagcagcatctacaaggagtacgtgaagagcgaggtgatcaagctgctgcccaacgccaacggcagcaacgtgcagctgcagctgaagttcaagttcccccccgccgagggcgtgagcatgagaaccaagatcaaggccaagctgcaccagatgctgaagaacaacatggccagctggaacgccgtgcccgccagcatcaagctgatggagatcagcaaggccgccagcgagatgctgaccaacaactgctgcggcagacaggtggccaacagcatcatcaccggcaacaagatcgtgaacggcaagagcagcctggagggcgcctggccctggcaggccagcatgcagtggaagggcagacactactgcggcgccagcctgatcagcagcagatggctgctgagcgccgcccactgcttcgccaagaagaacaacagcaaggactggaccgtgaacttcggcatcgtggtgaacaagccctacatgaccagaaaggtgcagaacatcatcttccacgagaactacagcagccccggcctgcacgacgacatcgccctggtgcagctggccgaggaggtgagcttcaccgagtacatcagaaagatctgcctgcccgaggccaagatgaagctgagcgagaacgacaacgtggtggtgaccggctggggcaccctgtacatgaacggcagcttccccgtgatcctgcaggaggacttcctgaagatcatcgacaacaagatctgcaacgccagctacgcctacagcggcttcgtgaccgacaccatgctgtgcgccggcttcatgagcggcgaggccgacgcctgccagaacgacagcggcggccccctggcctaccccgacagcagaaacatctggcacctggtgggcatcgtgagctggggcgacggctgcggcaagaagaacaagcccggcgtgtacaccagagtgaccagctacagaaactggatcaccagcaagaccggcctgtag

SEQ ID NO: 256073 - DNA, 2671 bp, Artificial Sequence
  derived and/or modified sequence
aaaaaccaagctccaacactggatgtagcacataagtcaaaagctgcgtcagaaggttctaacttttgtcatcactattaccagcattgtcatcgttatcgttatcttcgtcatcatcattaccaccgttatacctgatactgccataacaatcagaacattatgtacaggcacggcatatcttcccaaagatcttggccactatggactacgatctttatttttcttggagtggcggcaatcttgggagtaaccattggtcttcttgttcattttctggcagttgagaagacttactattatcaaggtgattttcatatttctggagtcacatacaatgataattgtgaaaacgcagcttcacaagccagcacaaatctaagcaaagatattgagactaagatgttaaatgcatttcaaaattccagtatatataaggaatatgtcaaatctgaggtcatcaaacttctgcctaatgccaatggttcaaatgtgcagttacagctgaaattcaagtttcctccagcagaaggagttagcatgaggactaaaatcaaggctaaattacatcagatgttgaaaaacaacatggcatcctggaatgcagttcctgcttccattaaactcatggaaatcagcaaggctgcttctgaaatgcttaccaacaactgttgtgggagacaagtagccaacagtatcataactggcaacaaaattgtgaatggaaaaagctccctggagggggcatggccatggcaggccagcatgcaatggaaaggccgtcactactgtggagcctctctgatcagcagcaggtggctattatctgcagctcactgctttgctaagaaaaataattcaaaagattggactgtcaactttggaattgtagtaaataaaccatatatgacacggaaagtccaaaacattatttttcatgaaaattatagcagtcctgggcttcatgatgatattgcccttgtgcagcttgctgaagaagtttcttttacagagtacattcgtaagatttgtcttcctgaagccaaaatgaagctctcagaaaatgacaatgttgtagttacaggttggggaacactttatatgaatggttcatttccagtgatacttcaagaagactttttgaagattattgacaacaaaatttgcaatgcctcatatgcatactctggctttgtgactgatacaatgttatgtgctggatttatgtcaggagaagctgatgcatgtcagaatgattctggtggaccactagcttaccctgattccagaaatatctggcatcttgttggaatagtaagctggggtgatggatgtggtaaaaagaataagccaggtgtctatactcgagtgacttcttatcgcaattggattacatccaagactggactctgaaaaaaaaggaattatacaaaggaacataaagaccactgtaggctatccttatctgtggctttgggatctttttattttgattgttggtaaactaatcattttattatatataaaaatataaatgtctttattaatattttattatatctaaaacactgtccatgcatttattaatcttttaaattaatgtaagagataggaagaggccaggtgtagtggctcatgcctgtaatcctagcactttgagaggccgagataggcggattgcttgagcccaggagtttgagggcagcctgggaaacatggctaaatccgtgttcaaaaaatacaaaaattagctaggcatggtggcgtgcacctatagtcccagctattcaggaggctgaggtgggaggattgcttgagcccagcaggttgaggctgtggtgatttgtgattgcgccaccactgcactccagcctgggcaacagagtgagaccctgtctcaaaaaaaaaaaaaaaaaaaggagagaagaaaataaagaaggctaatatataatttttcttaatagctgagttgtgattcattttaccattatattcagaattgaccttaatttgttttccagaatcaaaagaaaataaaatataaattttgaaactatgagaacatatataggggatttatcaaatgagttactttttattatatcaattataatttcattttattaactggaataagtgcgaaagtgtacattactttttaacttatatgtgaaatgattcatgtacctcacaaaatcatgcaatcttgcagtgaagaaggagtatcagagctccagctacactgagtctttcaatttacagatcaagaaactgaagaccagagaagagaaatgatttggttaaagtcactctccatcatctgtgataagttgacaaatttatccttacacaaatttgtcctcattgagttgacatccaaaatttgtcaggaattaaagaatgacttttgagtggcaattatttatataacattttccattgtcttcatattcaccttttgtcatttgtttgctttctcttgcagcaaaaataatatgaggtcatcaagggcagagaactgtgtggcatctccttatagtaaaagtgcaatcatatggatggctaactttgtaatctctacaaataatttaccttatgtaattttccaaatgtaaaagtcaccaaaaacttaaaggcattaaaataaactaaaaaagtactcatttcttca

SEQ ID NO: 256074 - DNA, 1251 bp, Artificial Sequence
  derived and/or modified sequence
atgtacagacacggcatcagtagccagaggagctggcctctgtggaccaccatctttatcttcctcggagtcgctgccattctcggagtgacaatcggccttcttgtgcatttcctggctgtggaaaagacctattactatcaaggcgatttccacatatctggcgtgacatacaacgacaactgcgaaaacgctgcaagccaggccagtactaatctgtccaaagacatagaaaccaagatgctgaacgctttccagaactcctcaatatacaaggagtacgttaagtctgaggtcatcaagctgcttccaaatgccaatggatcaaacgtccagctccagctgaagtttaaatttcctcctgcagagggagtgtctatgcgcactaagattaaggcgaagttacaccagatgcttaaaaacaacatggcaagctggaatgccgtgccagcgagcatcaagcttatggagatctccaaggctgcctccgagatgcttactaataattgctgtggcaggcaggtggccaacagcatcatcacagggaacaagattgtcaatgggaagagtagtctcgaaggtgcctggccgtggcaggccagcatgcagtggaaggggaggcactactgcggtgcgagccttatctcctccagatggctcctgagtgccgctcactgttttgctaagaaaaataattccaaagactggactgtgaattttggaatagttgtcaataaaccgtacatgactagaaaagtgcagaatattatctttcacgaaaattacagcagtccaggcctgcacgatgatatcgccctcgttcagctggcagaagaggtttcattcaccgagtatatcagaaagatttgcctccccgaggccaagatgaaactctcagagaacgacaatgtcgtagttaccggttggggcaccttgtacatgaatggcagtttcccggttatcttgcaggaagattttttgaagataattgacaacaaaatctgcaacgccagttacgcctattcgggtttcgtgacggacacgatgctgtgcgccggctttatgagcggggaagctgacgcttgtcagaacgattctggcggccctttagcctatcccgactcacggaatatatggcacctcgtgggaattgtgtcgtggggtgacgggtgcggcaagaagaataaaccaggcgtgtacacacgcgtcacaagttaccgcaactggatcacttcaaaaacaggcttgtag

SEQ ID NO: 256075 - DNA, 1251 bp, Artificial Sequence
  derived and/or modified sequence
atgtaccgccacggcatcagcagccagaggtcctggcccctgtggaccaccatcttcatcttcctgggcgtggccgccatcctgggcgtgaccatcggcctgctggtgcacttcctggccgtggagaagacctactactaccagggcgacttccacatcagcggcgtgacctacaatgacaactgtgaaaatgctgccagccaggccagcaccaacctgagcaaggacatcgagaccaagatgctgaatgccttccagaacagcagcatctacaaggagtatgtgaagtctgaggtgatcaagctgctgcccaatgccaacggcagcaatgtgcagctgcagctgaagttcaagttccccccagctgagggcgtgtccatgaggaccaagatcaaggccaagctgcaccagatgctgaagaacaacatggcctcctggaatgctgtgcctgccagcatcaagctgatggagatcagcaaggccgccagcgagatgctgaccaacaactgctgcggccggcaggtggccaacagcatcatcactggaaacaagatcgtgaatggcaagagcagcctggagggcgcctggccctggcaggcctccatgcagtggaagggccgccactactgtggggccagcctcatcagcagccgctggctgctgtctgctgcccactgctttgccaagaagaacaacagcaaggactggacagtgaactttggcatcgtggtgaacaagccctacatgaccaggaaggtgcagaacatcatcttccacgagaactacagcagccctggcctgcatgatgacatcgccctggtgcagctggccgaggaggtgtccttcacagagtacatcaggaagatctgcctgcctgaggccaagatgaagctgtctgaaaatgacaacgtggtggtgacaggctggggcaccctgtacatgaatggcagcttccctgtgatcctgcaggaggacttcctgaagatcatcgacaacaagatctgcaatgccagctatgcctacagcggctttgtgacagacaccatgctgtgtgccggcttcatgtctggagaggctgatgcctgccagaatgacagcggcggccccctggcctacccagacagcaggaacatctggcacctggtgggcatcgtgtcctggggagatggctgcggcaagaagaacaagccaggagtgtacaccagggtgaccagctacagaaactggatcaccagcaagacaggcctgtag

SEQ ID NO: 256076 - DNA, 1251 bp, Artificial Sequence
  derived and/or modified sequence
atgtaccggcacggcatcagcagccagcggagctggcccctgtggactaccatctttatttttctgggggttgccgccatccttggcgttaccatcggcctgctggtccacttcctcgccgtggaaaagacttattactatcagggcgacttccacatttcaggagtaacatacaacgataactgtgagaatgctgcctcccaggcctctactaatctgagcaaggacattgagacaaaaatgctcaatgccttccaaaatagctctatctacaaggaatacgttaaatctgaggttattaagctgctgcccaacgcaaatggatccaacgtgcagctgcaactgaaattcaagtttccccctgctgaaggcgtctccatgcgcacaaaaatcaaggccaaactacaccagatgttgaagaataacatggcgtcatggaatgctgtgccagcttccatcaaattgatggagattagtaaagcagcatccgaaatgctcacaaataactgctgcggtcggcaagtggctaactccattatcaccggaaacaaaatcgtgaacggaaaatcttcgctagaaggcgcttggccatggcaggcatctatgcaatggaaagggcggcactattgcggagctagtctgattagctctcgctggcttctgagtgcagctcattgttttgctaaaaagaacaatagtaaggactggacagtgaatttcggcattgtcgtaaacaagccttacatgacccgtaaggttcaaaatattatctttcacgaaaactattcaagcccaggccttcacgacgatattgccctggtccagctggcagaggaagtctcctttaccgagtacatccggaaaatctgccttcccgaggcaaaaatgaagttgtccgaaaacgacaacgtggtggtcactgggtggggaactttgtatatgaatggctcgttcccagtgattctgcaggaagattttttaaaaataatcgataataagatatgcaatgcatcctacgcttactcaggattcgtcacagataccatgctctgtgctggcttcatgtctggggaggctgatgcatgtcagaacgactccggggggccactagcctatcccgattcacgtaatatttggcatcttgtgggcattgtcagctggggagatggatgcggcaagaaaaacaagcccggcgtttacacccgtgtcacatcctaccgcaattggattaccagtaagaccgggttgtag

SEQ ID NO: 256077 - RNA, 1251 nt, Artificial Sequence
  derived and/or modified sequence
auguauagacaugggaucucuucacagcgcuccuggcccuuguggaccacaauauuuauuuucuuagggguggcagcuauucucggugugaccauuggacuccucguucauuuccuugcaguggaaaagacauacuauuaccagggagacuuucacaucuccggagugaccuauaacgauaacugcgaaaacgcugcuagccaggccucuacaaaccuuucaaaagauaucgagacuaaaaugcugaacgcauuccagaauucaaguauauacaaagaguacgugaagucagaagugaucaagcugcuccccaaugccaacgguucaaacgugcaacuucaacugaaguucaaauucccaccugccgaaggggucuccaugaggaccaaaauuaaagcgaaacugcaucagauguuaaagaacaauauggcaagcuggaacgccgucccugcgucuaucaagcuuauggaaauuagcaaggccgcaucugagaugcuuacaaauaacuguuguggacggcaggucgccaauucuaucauuaccggaaacaagauagugaacggcaagagcucccucgagggggccuggccuuggcaggccucaaugcaguggaaaggcaggcauuacugcggagcaucucucauuucaucuagauggcuucucuccgccgcucacugcuuugccaagaagaacaacagcaaggauuggaccgucaauuucgguauuguugucaauaagcccuacaugacacguaaaguccaaaacaucauuuuucacgaaaacuauucuucaccgggccuccaugacgauaucgcccuaguucagcuagcugaagagguuuccuucaccgaguauauccguaagauuugucugcccgaagcuaaaaugaagcucagcgaaaacgauaacguugucgucaccggcuggggaacccuguauaugaauggcucauuuccaguaauucugcaggaggacuuucugaaaaucauagacaacaagauuugcaaugcuucuuacgccuacucaggauucguuacggacacaauguugugugcaggcuucauguccggggaggcugaugccugccagaaugacagcggcggaccucuggcguacccugacucccgcaacaucuggcaccuuguuggaauuguauccuggggugacgggugcggaaaaaagaauaagcccggcguuuacacacgcgugacuaguuaucgaaacuggauaacuuccaagacaggacuuuag

SEQ ID NO: 256078 - RNA, 1251 nt, Artificial Sequence
  derived and/or modified sequence
auguaucgacauggaauaagcagucaacguaguuggccucucuggaccacuauuuucauuuuucugggggucgcugcgauccuaggaguuacgaucggucugcuggugcacuuccucgcgguagaaaagacauacuauuaucagggcgauuuucacaucagcggcgugaccuauaacgacaauugugagaaugcagcuagucaggcuuccacaaaccucuccaaagacaucgaaacaaaaaugcucaaugccuuucagaauaguuccauuuacaaagaguaugugaaaucagaagugauuaaguugcuuccaaacgccaauggcuccaacguacagcuccagcucaaauuuaaauuuccuccugcagaaggugugagcaugagaacuaagauuaaagccaaacugcaucaaaugcuuaagaauaauauggcuucauggaaugcggugccugcgucaauuaaacugauggaaauuucgaaagccgccuccgagaugcuuaccaacaauuguugugggagacaaguggccaauagcauaauaacuggcaauaagauuguaaacggaaaauccucccuggagggugcauggcccuggcaagcuagcaugcaauggaaaggccgacauuacuguggagccagccuuaucuccagcagguggcugcuauccgcugcucacuguuucgcuaagaagaacaacucuaaagacuggaccguuaauuuugggaucguggugaauaaaccuuacaugaccagaaaagugcaaaauauaauauuucacgaaaauuauuccucucccggauugcacgaugauauagcauugguccagcuggccgaggaagugaguuuuaccgaguacaucaggaaaaucuguuuacccgaagcuaagaugaagcucucagaaaaugauaacgugguggugacgggauggggaacacuguauaugaacggaagcuuuccagugauacugcaggaggauuuucugaaaauaaucgauaacaaaauauguaacgcuucauacgcguauuccggcuucguaacggauaccaugcuaugcgcagguuucaugucuggggaagcugacgcaugucagaacgacucuggaggaccacuugccuacccagauucaagaaacaucuggcaccugguggguauuguuagcuggggggacggaugcgguaagaagaauaaaccuggagucuacacacgcguaaccucauaucgaaacuggaucacaucuaaaaccggacuguag

SEQ ID NO: 256079 - protein, 191 aa, Artificial Sequence
  derived and/or modified sequence
MEAKAAPKPAASGACSVSAEETEKWMEEAMHMAKEALENTEVPVGCLMVYNNEVVGKGRNEVNQTKNATRHAEMVAIDQVLDWCRQSGKSPSEVFEHTVLYVTVEPCIMCAAALRLMKIPLVVYGCQNERFGGCGSVLNIASADLPNTGRPFQCIPGYRAEEAVEMLKTFYKQENPNAPKSKVRKKECQKS

SEQ ID NO: 256080 - protein, 144 aa, Artificial Sequence
  derived and/or modified sequence
MVYNNEVVGKGRNEVNQTKNATRHAEMVAIDQVLDWCRQSGKSPSEVFEHTVLYVTVEPCIMCAAALRLMKIPLVVYGCQNERFGGCGSVLNIASADLPNTGRPFQCIPGYRAEEAVEMLKTFYKQENPNAPKSKVRKKECQKS

SEQ ID NO: 256081 - DNA, 576 bp, Artificial Sequence
  derived and/or modified sequence
atggaggccaaggccgcccccaagcccgccgccagcggcgcctgcagcgtgagcgccgaggagaccgagaagtggatggaggaggccatgcacatggccaaggaggccctggagaacaccgaggtgcccgtgggctgcctgatggtgtacaacaacgaggtggtgggcaagggcagaaacgaggtgaaccagaccaagaacgccaccagacacgccgagatggtggccatcgaccaggtgctggactggtgcagacagagcggcaagagccccagcgaggtgttcgagcacaccgtgctgtacgtgaccgtggagccctgcatcatgtgcgccgccgccctgagactgatgaagatccccctggtggtgtacggctgccagaacgagagattcggcggctgcggcagcgtgctgaacatcgccagcgccgacctgcccaacaccggcagacccttccagtgcatccccggctacagagccgaggaggccgtggagatgctgaagaccttctacaagcaggagaaccccaacgcccccaagagcaaggtgagaaagaaggagtgccagaagagctag

SEQ ID NO: 256082 - DNA, 2065 bp, Artificial Sequence
  derived and/or modified sequence
gagtggtggctgggtatggaggcgaaggcggcacccaagccagctgcaagcggcgcgtgctcggtgtcggcagaggagaccgaaaagtggatggaggaggcgatgcacatggccaaagaagccctcgaaaatactgaagttcctgttggctgtcttatggtctacaacaatgaagttgtagggaaggggagaaatgaagttaaccaaaccaaaaatgctactcgacatgcagaaatggtggccatcgatcaggtcctcgattggtgtcgtcaaagtggcaagagtccctctgaagtatttgaacacactgtgttgtatgtcactgtggagccgtgcattatgtgtgcagctgctctccgcctgatgaaaatcccgctggttgtatatggctgtcagaatgaacgatttggtggttgtggctctgttctaaatattgcctctgctgacctaccaaacactgggagaccatttcagtgtatccctggatatcgggctgaggaagcagtggaaatgttaaagaccttctacaaacaagaaaatccaaatgcaccaaaatcgaaagttcggaaaaaggaatgtcagaaatcttgaacatgttctgatgaaagaaccaagtgacccaaagtgacctggacaagattcatagactgaaagctgttgacatcgttgaatcatatgtttatatattgtttttaatctgcaggaaaatggtgtctctcatcatttgctctgttaagggaacaaattagcactttttagaagtctgacaattgtaaacagttattagcttttccagaagctgattcccattttaagatgggggaaaattaaggtttgaggttttagaaattagcaagtagtgcatacccttctagccacaagtgcccagtccaggcaagtgctgacttcttagagaatgtgtggccagacccagggacctggagtgtgtttggactgcagtttgccaccctgagaacaccttctccaggactggcatttcagaatcagattcttcattttttgcagctacgatgttcttccagggcactgggggctgtgacttctctctaaattgtatataagttgtgtatatagagaccataattatatggtccttagaaaagactttgcttttataaagcatttagaaaaaatgcatacttttaaaacaagtgcttgagttgtcacttaaaaattatagcatattgctataataaaaccttatttatgtcttatttgaagatgaatagtcttaaaagataaagacataaatgggacaattgttattgagcaaaaaaccaaattatcccaccctcatggagcttatattctagcaaggggagatggatatgatagattacacagtttattggaggacaataagagttatggcaaaaagcaaaaggaacacagggtaaaggggataggtgccatttggtggtgagaatgctgactgaaaaatagaatgatcaatttaatctgaaacaaatggttatttcttttataatccatataataaatttaaaatctaaaatgtaaaattttgaacacaacactggaaagggtatccacagcaggaagtccccagttcacctccatgactacagggcagctttgcacagccctctgggcgcactgtgtgcctctgcccagaagggggcctcgccgttccaccagaagctcagctccaggccctggaggggctgctgctcctcagttgcatttcttcagtagattcatttccttgatgcaaagcatctgtatttgttggttctgtcatttgagcgatgtctctgacttgtttgttttgaattacattacaggctggaatgtaattgtggtgaaagtatttttatattgctgagagtagcagctaatcacagttacatgcttcagaggacttataattgcttggttttgtgtgtgtgtgtgtgtgtgtgtgtgtgtgtgtgtgtgtttaactgcatttgaaaagttttatggagaatatgcatgattttaaatctgtgataatgttacatgcaccttcaatttcatccactttaaaaattatcttctcattgaa

SEQ ID NO: 256083 - DNA, 576 bp, Artificial Sequence
  derived and/or modified sequence
atggaagccaaggcggctccaaagcccgccgcctccggtgcctgcagcgtctcagccgaagaaacggagaaatggatggaggaagcaatgcacatggccaaagaggccctggaaaatacagaagtcccagttggatgcctgatggtgtataataacgaagttgtaggtaaagggaggaatgaggtaaaccagaccaagaacgctactcggcacgctgagatggtagctatagatcaagtcctggactggtgtcgccagtcagggaagagtccctccgaagtcttcgagcacactgttttgtatgtcactgtggagccatgcatcatgtgcgccgcggccctgagactgatgaaaattcccctggtggtgtacgggtgtcagaacgaaaggtttggcggttgcggttcagttctgaatattgcctcagccgacctgccgaataccggccgtccatttcagtgcatcccaggctaccgcgcagaagaggccgtggaaatgctaaagacattctataagcaggaaaatcctaatgcaccgaagtctaaagtgcgcaagaaggaatgtcagaagtcctag

SEQ ID NO: 256084 - DNA, 576 bp, Artificial Sequence
  derived and/or modified sequence
atggaggccaaggccgcccccaagccagctgccagcggggcctgcagcgtgtctgctgaggagacagagaagtggatggaggaggccatgcacatggccaaggaggccctggagaacacagaggtgcctgtgggctgcctgatggtgtacaacaatgaggtggtgggcaaaggaagaaatgaggtgaaccagaccaagaatgccaccaggcatgctgagatggtggccatcgaccaggtgctggactggtgccggcagagcggcaagagccccagcgaggtgtttgagcacacagtgctgtatgtgacagtggagccctgcatcatgtgtgccgccgccctgcggctgatgaagatccccctggtggtgtatggctgccagaatgaaagatttggaggctgcggctctgtgctgaacatcgccagcgctgacctgcccaacacaggccggcccttccagtgcatccctggctacagagctgaggaggccgtggagatgctgaagaccttctacaagcaggagaaccccaatgcccccaagagcaaggtgaggaagaaggagtgccagaagagctag

SEQ ID NO: 256085 - DNA, 576 bp, Artificial Sequence
  derived and/or modified sequence
atggaggccaaggccgcccccaagcccgccgccagcggcgcctgctccgtctcggcggaagagacagagaaatggatggaggaagccatgcacatggccaaggaggccttagaaaataccgaagttcctgtgggctgtctcatggtctacaacaatgaagtggtaggaaagggtcgcaatgaggtaaatcagaccaagaacgctacgcgacacgcggagatggtggctatagatcaggtgttggactggtgtaggcagtcagggaagtcaccctccgaggtgttcgaacatactgtactctatgttaccgtcgagccttgcatcatgtgtgccgccgctcttagactcatgaagatccccctcgtggtgtacgggtgccagaatgagaggtttggcggctgtggttctgttttgaacatcgccagtgccgatctgcccaacactgggagacctttccagtgcataccaggctatcgcgcagaggaggctgtagaaatgctgaaaacattttacaagcaggaaaaccctaacgcccctaaatcaaaggtgcggaagaaggagtgccagaagtcttag

SEQ ID NO: 256086 - DNA, 576 bp, Artificial Sequence
  derived and/or modified sequence
atggaagcgaaagcagcacctaaacctgcagcttctggcgcatgtagtgtgagtgccgaagaaacagagaagtggatggaggaggccatgcacatggccaaggaggccctagaaaacaccgaggtgcccgtcgggtgcttgatggtttacaataatgaagttgtgggcaagggcaggaacgaagtgaatcagacgaaaaatgcaacgcgccacgctgagatggttgccattgatcaggtgttggattggtgcaggcaaagcggcaagtcccccagcgaagtgttcgagcacaccgtgttgtatgtgactgttgagccctgtattatgtgcgccgcagcactgaggctcatgaagattccactcgtggtgtatgggtgccagaacgaacggtttggtggctgcggaagtgtactgaacatcgcctcagcggatttgccaaacactggacgccctttccagtgcatcccgggttatcgggctgaggaagccgtcgaaatgctcaaaaccttttacaaacaggaaaatccgaatgcacccaaaagtaaggtgcgcaaaaaagaatgccagaagtcttag

SEQ ID NO: 256087 - protein, 157 aa, Artificial Sequence
  derived and/or modified sequence
MSSQKGNVARSRPQKHQNTFSFKNDKFDKSVQTKKINAKLHDGVCQRCKEVLEWRVKYSKYKPLSKPKKCVKCLQKTVKDSYHIMCRPCACELEVCAKCGKKEDIVIPLNKETEKIEHTENNLSSNHRRSCRRNEESDDDLDFDIDLEDTGGDHQMN

SEQ ID NO: 256088 - protein, 179 aa, Artificial Sequence
  derived and/or modified sequence
MSSQKGNVARSRPQKHQNTFSFKNDKFDKSVQTKKINAKLHDGVCQRCKEVLEWRVKYSKYKPLSKPKKCVKCLQKTVKDSYHIMCRPCACELEVCAKCGKKEDIVIPWSLPLLPRLECSGRILAHHNLRLPCSSDSPASASRVAGTTGAHHHAQLIFVFLVEMGFHYVGQAGLELLTS

SEQ ID NO: 256089 - DNA, 474 bp, Artificial Sequence
  derived and/or modified sequence
atgagcagccagaagggcaacgtggccagaagcagaccccagaagcaccagaacaccttcagcttcaagaacgacaagttcgacaagagcgtgcagaccaagaagatcaacgccaagctgcacgacggcgtgtgccagagatgcaaggaggtgctggagtggagagtgaagtacagcaagtacaagcccctgagcaagcccaagaagtgcgtgaagtgcctgcagaagaccgtgaaggacagctaccacatcatgtgcagaccctgcgcctgcgagctggaggtgtgcgccaagtgcggcaagaaggaggacatcgtgatccccctgaacaaggagaccgagaagatcgagcacaccgagaacaacctgagcagcaaccacagaagaagctgcagaagaaacgaggagagcgacgacgacctggacttcgacatcgacctggaggacaccggcggcgaccaccagatgaactag

SEQ ID NO: 256090 - DNA, 540 bp, Artificial Sequence
  derived and/or modified sequence
atgagcagccagaagggcaacgtggccagaagcagaccccagaagcaccagaacaccttcagcttcaagaacgacaagttcgacaagagcgtgcagaccaagaagatcaacgccaagctgcacgacggcgtgtgccagagatgcaaggaggtgctggagtggagagtgaagtacagcaagtacaagcccctgagcaagcccaagaagtgcgtgaagtgcctgcagaagaccgtgaaggacagctaccacatcatgtgcagaccctgcgcctgcgagctggaggtgtgcgccaagtgcggcaagaaggaggacatcgtgatcccctggagcctgcccctgctgcccagactggagtgcagcggcagaatcctggcccaccacaacctgagactgccctgcagcagcgacagccccgccagcgccagcagagtggccggcaccaccggcgcccaccaccacgcccagctgatcttcgtgttcctggtggagatgggcttccactacgtgggccaggccggcctggagctgctgaccagctag

SEQ ID NO: 256091 - DNA, 1279 bp, Artificial Sequence
  derived and/or modified sequence
gggagggcagagcgatgctctttgacctcccagaagagtcacgtgggctgacccagagccggggcggaaaggctgcgtttgtttcttccgggtcattgacagaagcgtcaattcctgggagtagttcgttggttttctttcccctcatccttttgcctgctcccggcgaggggtggctttgatttcggcgatgagctcccagaaaggcaacgtggctcgttccagacctcagaagcaccagaatacgtttagcttcaaaaatgacaagttcgataaaagtgtgcagaccaagaaaattaatgcaaaacttcatgatggagtatgtcagcgctgtaaagaagttcttgagtggcgtgtaaaatacagcaaatacaaaccattatcaaaacctaaaaagtgtgttaaatgtttacaaaagacagtgaaggattcttatcacataatgtgcaggccatgtgcctgtgaacttgaagtttgcgcaaaatgtggaaagaaagaagacattgttattccgttgaataaagaaacagaaaaaatagaacatactgaaaataatctaagttccaaccatagaagaagctgcagaagaaatgaagaaagtgatgatgatttagattttgatattgatttagaagacacaggaggagaccatcaaatgaattaatatcactgtattaaaagtctgccgggcacagtggctcacgcctgtaatcccaacactttgggaggccaaggagggtggatcacctgaggtcaggagttcgagaccagcctggccaacatggcggaaccccatctccactaaaagtacaaaaaattagctgggcgtggtggctcatgcctgtaatcccagctactcaggaggctgaggcaggaggattgcttgaaccctggaggcggagattgaagtgagctgagttcgtgccattacactccagcctgggtgacagagtgagactctgtctcaaaaaaaataaaataaaaagtcaatttagaatgtgaaattctgaccaccttttggctttgagtattttccaaaagatatttgaaatcctaatgaggaaatcagaaaaagctatggaaaaatagacaaatttcatacatgaacaatataaattgtgtatattacttaacatcaaactaaacaagattcagaattgatggttgtataagaactagctcatgtaaaaataaaataacattattacattgcctcaaaaattggtcctcggtaagtgccttttgataaatgatctcaaataaatgactcatagcaaaa

SEQ ID NO: 256092 - DNA, 1107 bp, Artificial Sequence
  derived and/or modified sequence
gggagggcagagcgatgctctttgacctcccagaagagtcacgtgggctgacccagagccggggcggaaaggctgcgtttgtttcttccgggtcattgacagaagcgtcaattcctgggagtagttcgttggttttctttcccctcatccttttgcctgctcccggcgaggggtggctttgatttcggcgatgagctcccagaaaggcaacgtggctcgttccagacctcagaagcaccagaatacgtttagcttcaaaaatgacaagttcgataaaagtgtgcagaccaagaaaattaatgcaaaacttcatgatggagtatgtcagcgctgtaaagaagttcttgagtggcgtgtaaaatacagcaaatacaaaccattatcaaaacctaaaaagtgtgttaaatgtttacaaaagacagtgaaggattcttatcacataatgtgcaggccatgtgcctgtgaacttgaagtttgcgcaaaatgtggaaagaaagaagacattgttattccatggagtctccctctgttgcccaggctggagtgcagtggcaggatcttggctcaccacaacctccgcctcccttgttcaagtgattctcctgcctcagcctctcgagtagctgggactacaggcgcacaccaccatgcccagctaatctttgtatttttagtagagatggggtttcactatgttggccaggccggtctcgaactcctgacctcatgatctgcctgcctcaacctcccaaagtgctggaattacaggtgtgagccatcatgcctggcctaatttgtatatttctaatgactcatgatgttgactgagcatcttttcttttcttttctttttttttttccttgttttttgagatggagtcttgctctatagcccgggctggagtgcagtggcaccatttcagctcaatgcaacctctgcctcctaggttcaagtgattctcctgcctcagcctcccgagtagctgggattacaggcacacaccaccatgcccagctaatttttgtatttttagtagaaacaggttttcacaatgttggccaggatggtctccatctactgaccttgtgatccgcccccctaggcct

SEQ ID NO: 256093 - DNA, 474 bp, Artificial Sequence
  derived and/or modified sequence
atgtcaagtcagaaaggcaatgtggcacgctcaagaccccagaagcatcagaacaccttttcctttaagaacgacaagttcgataaatccgtgcagacaaagaagataaatgccaagttgcacgatggcgtctgccagagatgcaaggaagttctggagtggagggtgaagtactccaaatacaagcccctgtcaaaacccaagaagtgcgtgaaatgtcttcagaagacagttaaagattcatatcacattatgtgccgcccttgtgcttgtgagctggaagtgtgtgccaaatgtggaaagaaagaagacattgtcataccactgaacaaggaaactgaaaaaattgagcatactgagaacaacctcagttcaaatcaccgccgcagctgtcgccgcaatgaggagtcagacgatgatttagactttgatatcgacttagaagacactggtggggaccaccaaatgaattag

SEQ ID NO: 256094 - DNA, 540 bp, Artificial Sequence
  derived and/or modified sequence
atgtcctcacagaaaggcaacgtcgccagatcacggccgcagaagcatcagaacacattttctttcaagaacgacaagtttgacaagagcgttcagactaaaaagattaacgctaaattacatgatggcgtttgtcagcggtgtaaggaggttcttgaatggagggtgaagtacagcaaatacaagccgttgagcaagcctaagaagtgcgttaagtgcctgcaaaaaacggtgaaggatagctatcatatcatgtgtagaccttgcgcgtgtgaattagaagtctgcgctaagtgtgggaaaaaggaggacattgtcattccttggagtttgccactgctgccaagattggaatgctcgggccgcattttggcacaccacaatctaaggctcccctgtagttccgactctcccgcttccgcatctagggtggcaggcaccacgggagcccaccatcacgcccaactgatcttcgtgtttctggtcgagatggggttccactatgtggggcaggccggacttgagctgctgacaagttag

SEQ ID NO: 256095 - DNA, 474 bp, Artificial Sequence
  derived and/or modified sequence
atgagcagccagaagggaaatgtggcccggagccggccccagaagcaccagaacaccttctccttcaagaatgacaagtttgacaagtctgtgcagaccaagaagatcaatgccaagctgcatgatggagtgtgccagcgctgcaaggaggtgctggagtggagggtgaagtacagcaagtacaagcccctgagcaagcccaagaagtgtgtgaagtgcctgcagaagacagtgaaggacagctaccacatcatgtgccggccctgtgcctgtgagctggaggtgtgtgccaagtgtgggaagaaggaggacatcgtcatccccctgaacaaggagacagagaagattgagcacacagagaacaacctgagcagcaaccaccggcgcagctgcagaagaaatgaggagagtgatgatgacctggactttgatattgacctggaggacaccggcggggaccaccagatgaactag

SEQ ID NO: 256096 - DNA, 540 bp, Artificial Sequence
  derived and/or modified sequence
atgagcagccagaagggaaatgtggcccggagccggccccagaagcaccagaacaccttctccttcaagaatgacaagtttgacaagtctgtgcagaccaagaagatcaatgccaagctgcatgatggagtgtgccagcgctgcaaggaggtgctggagtggagggtgaagtacagcaagtacaagcccctgagcaagcccaagaagtgtgtgaagtgcctgcagaagacagtgaaggacagctaccacatcatgtgccggccctgtgcctgtgagctggaggtgtgtgccaagtgtgggaagaaggaggacatcgtcatcccctggagcctgcccctgctgccccggctggagtgcagcggccgcatcctggcccaccacaacctgcggctgccctgcagcagtgacagccctgccagcgccagccgggtggccggcaccaccggggcccaccaccacgcccagctgatctttgtgttcctggtggagatgggcttccactacgtgggccaggccggcctggagctgctgaccagctag

SEQ ID NO: 256097 - DNA, 474 bp, Artificial Sequence
  derived and/or modified sequence
atgagcagccagaagggcaacgtggcccggagccggccccagaagcaccaaaatacgttctcattcaagaatgacaaattcgacaagagtgtgcagaccaagaagatcaatgccaagcttcacgacggtgtctgccagcgttgtaaagaagtcctggagtggcgagttaagtattctaagtacaaacctctgtcgaagccaaagaaatgcgtgaaatgtttacagaaaactgtgaaagacagttaccatattatgtgccgtccgtgtgcctgcgaactggaggtgtgcgcaaagtgcgggaaaaaggaagacattgtgatccccctgaacaaagaaacagaaaaaatagagcatacagagaacaatttgtcaagcaatcaccgcagatcttgccgtcgtaacgaagagagtgacgacgatctggactttgacattgatctggaggacaccgggggagaccatcagatgaattag

SEQ ID NO: 256098 - DNA, 540 bp, Artificial Sequence
  derived and/or modified sequence
atgagcagccagaagggcaacgtggcccggagccggccccagaagcatcaaaatacattctccttcaagaatgacaaatttgataagtctgtgcagaccaaaaagattaacgctaagctgcacgacggggtctgccaacggtgtaaagaggttcttgagtggcgcgtaaagtacagtaaatacaagccactgagtaaacctaagaaatgtgtgaagtgcctccaaaaaactgttaaggactcctaccatataatgtgcaggccatgcgcttgcgaacttgaagtgtgtgccaaatgtggtaaaaaagaggatatcgttatcccttggtccctccctctactgccgagactggaatgttctggcaggattctagcgcaccacaatctgcggctgccttgcagcagtgatagccccgcctctgcttcacgagttgctggcaccactggcgcccatcatcacgcacaactgatattcgtgtttttggtcgagatgggtttccactatgtgggccaagcaggtcttgaacttctcacgtcatag

SEQ ID NO: 256099 - DNA, 474 bp, Artificial Sequence
  derived and/or modified sequence
atgtcaagtcagaaaggcaatgttgcaaggtcacgaccacagaaacatcaaaatacatttagcttcaaaaatgacaaattcgataaaagcgtgcagacgaagaaaattaacgcgaagctccatgatggggtgtgtcaacggtgtaaggaggtacttgagtggagggtgaagtattctaagtataaacccctttctaagcctaagaagtgcgttaagtgcttgcagaagacagtgaaggactcatatcacatcatgtgtaggccgtgcgcatgtgagcttgaggtgtgcgctaagtgcgggaagaaggaggatatcgtgatcccactgaataaagagaccgagaaaatcgaacatacagaaaataaccttagttccaaccaccgacgaagttgtaggcgcaatgaagagtctgatgacgacctcgacttcgacatcgacttagaggacacgggaggcgaccatcagatgaactag

SEQ ID NO: 256100 - DNA, 540 bp, Artificial Sequence
  derived and/or modified sequence
atgtccagccagaaaggtaatgtggcacgctcaagaccccaaaagcaccagaacaccttctccttcaaaaatgataagtttgataagtccgtgcagacaaagaagatcaacgctaagcttcacgacggagtctgccagcgatgtaaagaagtactggagtggcgcgttaagtactcaaagtacaagccactctcgaaacccaagaaatgcgtgaagtgcctacagaagaccgtcaaagactcctatcatattatgtgccgcccttgcgcttgcgagctggaagtctgcgctaaatgcgggaaaaaggaggacattgtgattccctggtccctgcccctgctccccagacttgagtgttctggacgcattctggcccaccataatctgagacttccctgctcaagtgatagccccgcttctgccagtagggtcgcgggtactacaggagcccaccaccatgctcagttgatttttgtgttccttgtggagatgggctttcactacgtggggcaggctgggctggaacttttaacgagctag

SEQ ID NO: 256101 - protein, 452 aa, Artificial Sequence
  derived and/or modified sequence
MACRSCVVGFSSLSSCEVTPVGSPRPGTSGWDSCRAPGPGFSSRSLTGCWSAGTISKVTVNPGLLVPLDVKLDPAVQQLKNQEKEEMKALNDKFASLIGKVQALEQRNQLLETRWSFLQGQDSAIFDLGHLYEEYQGRLQEELRKVSQERGQLEANLLQVLEKVEEFRIRYEDEISKRTDMEFTFVQLKKDLDAECLHRTELETKLKSLESFVELMKTIYEQELKDLAAQVKDVSVTVGMDSRCHIDLSGIVEEVKAQYDAVAARSLEEAEAYSRSQLEEQAARSAEYGSSLQSSRSEIADLNVRIQKLRSQILSVKSHCLKLEENIKTAEEQGELAFQDAKTKLAQLEAALQQAKQDMARQLRKYQELMNVKLALDIEIATYRKLVEGEEGRMDSPSATVVSAVQSRCKTAASRSGLSKAPSRKKKGSKGPVIKITEMSEKYFSQESEVSE

SEQ ID NO: 256102 - DNA, 1359 bp, Artificial Sequence
  derived and/or modified sequence
atggcgtgtcggtcctgtgtggtgggcttttcgagtctgagttcatgcgaggtcacgcctgtcgggagccctaggcccggaacatcaggctgggactcgtgtagggcgcctggtcctggtttctcaagtcggtcattgactggctgttggtcagcagggactatcagtaaggtgaccgtgaatccaggcctcctggtaccactggatgtcaaacttgaccccgcagtgcaacaactcaaaaaccaagagaaggaggagatgaaggcactgaatgataaattcgccagcctcattggcaaggttcaggctctggaacagagaaaccagctcctggagacaagatggagtttcctgcagggccaagattccgcaatcttcgatctaggacacctgtacgaagagtaccaaggtcgtttacaggaagagctgcgcaaagtgtcccaggagaggggccagcttgaggctaatttgctacaggttctggaaaaggtggaggagttcaggatccggtacgaggatgagatctctaagcggaccgatatggagtttacgtttgtgcagctgaaaaaggacctggacgccgaatgtcttcatcgtactgaactagagacaaagcttaagagcttagaatcgtttgtggagctcatgaagactatctatgaacaggagctgaaagacctcgccgcccaagtcaaagacgtgagtgtgaccgtggggatggactcccgatgccacatcgatctctctggcatcgtggaagaggtaaaggcacagtacgatgccgtcgctgcccgctctcttgaggaggccgaagcgtacagccggagccagcttgaggagcaggccgctaggagcgccgagtacgggtcctctctacagagctctcggtccgaaatcgccgacttgaacgtgcggattcagaaactgcgctcgcagattctgagcgtgaaaagccactgtctgaagctcgaggagaacatcaaaaccgccgaggagcagggtgaattggccttccaagatgccaagactaagctggcccagttggaggccgccctacagcaagcaaagcaagatatggcacgacaactcagaaagtaccaggagctgatgaacgtgaaactggctttggatattgagattgcaacctacaggaaactggtggagggcgaggagggccgcatggatagcccgtccgccactgtagtgagtgccgtccaatctagatgtaagacagcagcctcaagatctggcctctcaaaggcgccgagcagaaaaaaaaagggttccaaggggcccgttattaaaatcacagagatgtccgaaaagtacttctcacaggagtccgaagtatccgagtag

SEQ ID NO: 256103 - DNA, 3859 bp, Artificial Sequence
  derived and/or modified sequence
cccagctgtgaccagagcaaccagagcctgccacccgacgcaaccccaggctcactcgctcacccccctgggccctcctgcttccggccgggggcaccatggcctgccgctcctgcgtggttggcttcagcagcctcagcagctgtgaggtgaccccggtgggcagcccccggcctggaacctcaggatgggacagctgcagggcccccgggccgggcttcagctcccgcagcctcacaggctgctggtcggctggcactatctccaaggtgactgtgaaccccggcctgctggtgcccctggatgtcaagttggaccccgctgttcagcagctgaagaaccaggagaaggaggagatgaaggccctcaatgataaatttgcctccctaattggcaaggtgcaagccctggaacagcgcaaccagctgctggagacacgctggagcttcctgcagggccaggactcagccatcttcgacctcgggcatctctatgaggaatatcagggccggctgcaggaggaactgcgcaaagtgagccaggagcgggggcagctggaggccaacctgctgcaggtgctggagaaggttgaggagtttcgaatcaggtatgaggatgagatctccaagcgcacagacatggagttcacctttgttcagctgaagaaggacctggatgcagagtgtcttcatcggactgaactggaaaccaagttaaaaagcctggagagcttcgtggagttgatgaaaaccatctatgagcaggagctgaaggacctggcagcacaggtgaaggatgtgtcggtgaccgtcggcatggacagccgctgccacatcgacctgagcggcatcgtggaggaggtgaaggcccagtatgacgccgtcgcggctcgcagcctggaggaggccgaggcatactctcggagccagctggaggagcaggccgcccgctcggccgagtatgggagcagcctccagagcagccgcagcgagatcgcggatctcaatgtgcgcatccagaagctgcggtcccagatcctctctgtcaagagccattgcctgaaactggaggagaacatcaagacagctgaggagcagggtgagctggccttccaggatgccaagaccaagctggcccagctggaggccgccctgcagcaggccaagcaggacatggcgcggcagctgcgcaagtaccaggagctgatgaacgtcaagctggccctggacatcgagatcgccacctacaggaagctggtggagggcgaggagggcaggatggactcgccctcagccactgtggtcagcgctgtgcagtccaggtgcaaaaccgctgcctccagatcaggcctctccaaggccccctcccgaaagaagaagggcagcaaaggccccgtgatcaaaatcaccgaaatgtcagagaagtacttctcgcaggagtcggaggtctcagagtaaggcggctggaccccaggaaccccagggcactccactgcagcaggagggacttaagctagactcaagaaagcagcttggagcctctaggttgagaagagaggcaaaacctgatattgaactgagagaggggttcaaaactgactgtgttttgtgggctgccagggtgggagaggagcatcaccagctcctcagagccactccgctccatatcagtatctcacagtcccatccttccaaccttctggccagaggttttcctgatgggtgagtcggaattaggggtcagttttgtctccacctcctcgctcctctgaggctcctcctccagcatcaggctctgccaaggcccctctgactcttgcccaatccttgaccttgactcctatctcaagccttgccttgtctctgcctcggaactgggactgggactggctcatccacctatgtgcgggagccgaggaggacggcgtgggccctgtcctgtatctggaattcctgggaaggctggctgctgaagaccctcttggctttcccgtgctctttgggctccccagagacctgacagtattagggagtgaagggaggaggggccctggctatttgggacctaagcctaggccccagagatcagcccgaacacccgcatcccttcctcctcccatgggtccctcccagtaggcagtagtcagaactggatgggctgcccccagccagctcccagcagcttctccggaagctgctcttgccataatcaactccctgggagtggaagccagatggcagcttgagattgggcaggagcattcgatcttcctttcacctccctgccatgctggggtcctacccagcctggatctgagctctgtgcccccagccgggttgttcccagcctgagcaccgggctttggtgcaccaggccttggagacccctggtcccacccctgccgtgaagccccaggcccacttcccaagaatctcacttctcagggcctctgttctcctctccactgggccaaatagcctggccctcccctccttggcattcatgggggagcccaggaaccccccacacctatggggttagagctcctcctttcttctcactccttccccttcctccctccatgcccactccccctgcctccagcaggccaggaagaaggcacagtccaggcaagtctgggagcttccaagcccttgaggtccagctgtggggcccaaatgacagccttacaagggttctaccagagaggaaaattccacatcccaccagaagacaggggtgttggcaggcatactcctatctcctcctcttggctctcaatgctgaggcttgcagaggcatcccagcggcaccagcctcccactgcacagcttccttccctccttcactctcctctcccctccctgccccttgcctcacctcctcttctagactgcattagattcattcatctcatttgccaggacatgttggccagaggtctgggcccatcccaggcctcaaggccctccaggcctgtggggagcactggagggttactgactctctggccatgggaactcagagattctcatccccaaagtcccaaaagagggtgctgattggtgcttttcctcaggctcttcattggtttccaagggagcaaatcctcagtggggatacaagacatataaagtatatattattttttcataacttatgtggcttttaacttattgcttcccttcctgtttctgcatgatcagtctgtatgtactatctggaaagataacacatactccagccacctcacctgattggctatcttggggccatgtccccttcttgctgccacaggatgaataaagtgttgagatttgtctatggagaaagctgtgtgtctgtttttatctcccctctcaggaccagtcagccactggtcaatcaggctgatcatggaacattaggaattctccaattaagggagaaaaagtccagggacttagttatatcttcagaccagtgcagctggtacacacaaagttctcctgtctcaccatctgatatggtttggatgctcgtcccctccaaatctcatgttgaaatgtaattcccagtgttggaagtggagcctggtgggaagtatttggatcatgagagaggatccttcatgaatggctcagcaccatctccttggtgatgagtgagttctcactcaattcacatagatatggttgtttaaaagagtctgagacctctcccctctttctcgccatgtgatatgcctgctcccccttcaccttccgcctttactgtaagcttcctgaggccctcaccagaagctgagcaaatgttggtgccatgccagtacagcctgcagaattgtgagccaaaataaatgtcttttctttataaatta

SEQ ID NO: 256104 - DNA, 1359 bp, Artificial Sequence
  derived and/or modified sequence
atggcctgccgcagctgtgtggtgggcttcagcagcctgagcagctgtgaggtgacccctgtgggcagcccccggcccggcaccagcggctgggacagctgccgggcccctggccctggcttcagcagccgcagcctgaccggctgctggagcgctggcaccatcagcaaggtgacagtgaaccctggcctgctggtgcccctggatgtgaagctggaccctgctgtgcagcagctgaagaaccaggagaaggaggagatgaaggccctgaatgacaagtttgccagcctcatcggcaaggtgcaggccctggagcagaggaaccagctgctggagacccgctggagcttcctgcagggccaggacagcgccatctttgacctgggccacctgtatgaggagtaccagggccgcctgcaggaggagctgaggaaggtgtcccaggagcggggccagctggaggccaacctgctgcaggtgctggagaaggtggaggagttccgcatccgctatgaagatgagatcagcaagaggacagacatggagttcacctttgtgcagctgaagaaggacctggatgctgaatgtctgcacaggacagagctggagaccaagctgaagagcctggagagctttgtggagctgatgaagaccatctatgagcaggagctgaaggacctggccgcccaggtgaaggatgtgtctgtgacagtgggcatggacagccgctgccacatcgacctgtctggaattgtggaggaggtgaaggcccagtatgatgctgtggccgcccggagcctggaggaggccgaggcctacagccgcagccagctggaggagcaggccgcccggtctgcagaatatggcagcagcctgcagagcagccgctcagaaattgctgacctgaatgtgcgcatccagaagctgcggagccagatcctgtctgtgaagagccactgcctgaagctggaggagaacatcaagacagctgaggagcagggcgagctggccttccaggatgccaagaccaagctggcccagctggaggccgccctgcagcaggccaagcaggacatggcccggcagctgaggaagtaccaggagctgatgaatgtgaagctggccctggacatcgagatcgccacctacaggaagctggtggagggggaggagggccgcatggacagccccagcgccaccgtggtgtctgctgtgcagagccgctgcaagacagctgccagccgcagcggcctgagcaaggcccccagcaggaagaagaagggcagcaagggccctgtgatcaagatcacagagatgtctgagaagtacttcagccaggagagcgaggtgtctgagtag

SEQ ID NO: 256105 - DNA, 1359 bp, Artificial Sequence
  derived and/or modified sequence
atggcctgccggagctgcgtggtgggcttcagcagcctgagcagctgcgaagttacacccgtgggctccccacgacccgggacatccggctgggattcatgtcgggccccgggccctggattcagttcacgttccctgaccggttgctggagcgctgggacgatctccaaagttacagtgaatcccggtttgctagtgcctctggacgtgaaactcgatcccgccgttcaacagctgaaaaaccaggagaaggaggaaatgaaagccctgaacgacaagtttgccagcctaataggtaaggtccaggccctggagcagcgcaaccaactcttggaaactagatggagcttcctccaggggcaggacagtgctatcttcgacctgggtcacctctatgaggaataccagggccggttacaggaagaactcaggaaggttagtcaggaacggggacaactggaggctaacctcctgcaagtgctagagaaggtagaggagttccgtatccgatatgaggatgaaatctccaaaaggactgacatggagtttaccttcgtgcagcttaaaaaagacttagacgcagaatgtcttcatagaaccgaactcgagactaaattgaaaagcttggaaagtttcgtggagctcatgaagaccatctacgagcaggagctgaaagacctagccgctcaggttaaggacgtctcagtgacagtgggtatggactccaggtgccacatagacctctccggaatcgtggaggaggttaaagctcagtatgatgccgttgcggctagatcactggaagaagcagaggcttactcccggtctcagcttgaggagcaggccgccagaagtgcagagtacgggtcctctctgcagtctagccgaagcgagattgcagacttgaacgttaggatacagaaattaaggagtcaaattctcagcgttaagtctcattgccttaaattggaggagaacatcaaaaccgctgaggaacaaggcgaactggcattccaggacgctaaaaccaagctggcccagctggaagccgcgcttcagcaggctaaacaggacatggcacggcagctcagaaaatatcaggaattgatgaacgtcaagttagccctggatattgagatagcgacctaccgtaagctagtagagggcgaggaaggtcgtatggactccccgtcggccaccgtagttagcgctgttcaatcacgctgcaaaacggctgcaagtaggtccggactctcgaaggcccccagtaggaagaaaaaaggctccaaggggccggtgatcaaaattacggagatgtctgagaaatatttctctcaggaaagcgaagtgtctgagtag

SEQ ID NO: 256106 - DNA, 1359 bp, Artificial Sequence
  derived and/or modified sequence
atggcctgccggagctgcgtggtggggttctctagtctgtctagttgcgaagttactcctgttggtagtcctcgacctggaacatccggatgggacagctgtcgagcaccagggcctggattcagctcacggtctctgacagggtgctggtcggccggtaccatatcaaaggtaaccgtaaacccaggactgctcgtgccactggatgtgaaactggatcccgctgtccagcagctgaagaatcaggagaaggaagaaatgaaggccctgaatgataagttcgcttccttgattgggaaagtccaggccttagagcagcgaaaccagctcctggaaactaggtggtctttcctgcagggtcaggacagcgccattttcgacctcggccacttatatgaggaatatcagggacggctacaggaggagctgagaaaggtttcgcaagaacgcggacagctggaggctaatctgcttcaggtgctggaaaaggtggaggaatttcggatccgatacgaagatgaaatttctaaaaggacggatatggagttcacatttgttcagttaaagaaagacctggacgcagagtgtctccatagaaccgagttagaaaccaagctgaagtctctcgagtctttcgttgaacttatgaaaaccatttacgaacaggagctgaaagacctagccgctcaagttaaggatgtttccgtgactgtaggcatggactctcgctgccacatcgaccttagcggaatcgttgaagaagtcaaggcgcaatacgatgctgtcgcggctagatccctggaggaggcggaggcttactccaggtcacaactagaagagcaagccgctagaagtgcggagtacgggtcaagtctccagtctagcagatctgaaattgcagatctgaacgtgagaattcagaagttgcgatcccagatattgagcgttaaaagtcactgcctgaaattggaggaaaacataaagaccgcagaggagcagggggagctcgcatttcaggacgcaaaaaccaagttagctcagctggaggccgctttgcagcaggctaagcaggatatggccagacagctgagaaagtatcaggagttgatgaacgtgaagctggcacttgacattgagatcgccacctaccgtaagcttgttgagggtgaggaaggaaggatggactctcctagcgcgacagttgtgtccgctgttcagtcacgctgtaaaaccgcagcctccaggtctgggctgtctaaggccccttccagaaaaaagaaaggatctaaaggacccgtcattaagatcaccgaaatgagcgagaagtattttagtcaggagtcagaggtgtccgagtag

SEQ ID NO: 256107 - DNA, 1359 bp, Artificial Sequence
  derived and/or modified sequence
atggcctgcagaagctgcgtggtgggcttcagcagcctgagcagctgcgaggtgacccccgtgggcagccccagacccggcaccagcggctgggacagctgcagagcccccggccccggcttcagcagcagaagcctgaccggctgctggagcgccggcaccatcagcaaggtgaccgtgaaccccggcctgctggtgcccctggacgtgaagctggaccccgccgtgcagcagctgaagaaccaggagaaggaggagatgaaggccctgaacgacaagttcgccagcctgatcggcaaggtgcaggccctggagcagagaaaccagctgctggagaccagatggagcttcctgcagggccaggacagcgccatcttcgacctgggccacctgtacgaggagtaccagggcagactgcaggaggagctgagaaaggtgagccaggagagaggccagctggaggccaacctgctgcaggtgctggagaaggtggaggagttcagaatcagatacgaggacgagatcagcaagagaaccgacatggagttcaccttcgtgcagctgaagaaggacctggacgccgagtgcctgcacagaaccgagctggagaccaagctgaagagcctggagagcttcgtggagctgatgaagaccatctacgagcaggagctgaaggacctggccgcccaggtgaaggacgtgagcgtgaccgtgggcatggacagcagatgccacatcgacctgagcggcatcgtggaggaggtgaaggcccagtacgacgccgtggccgccagaagcctggaggaggccgaggcctacagcagaagccagctggaggagcaggccgccagaagcgccgagtacggcagcagcctgcagagcagcagaagcgagatcgccgacctgaacgtgagaatccagaagctgagaagccagatcctgagcgtgaagagccactgcctgaagctggaggagaacatcaagaccgccgaggagcagggcgagctggccttccaggacgccaagaccaagctggcccagctggaggccgccctgcagcaggccaagcaggacatggccagacagctgagaaagtaccaggagctgatgaacgtgaagctggccctggacatcgagatcgccacctacagaaagctggtggagggcgaggagggcagaatggacagccccagcgccaccgtggtgagcgccgtgcagagcagatgcaagaccgccgccagcagaagcggcctgagcaaggcccccagcagaaagaagaagggcagcaagggccccgtgatcaagatcaccgagatgagcgagaagtacttcagccaggagagcgaggtgagcgagtag

SEQ ID NO: 256108 - protein, 292 aa, Artificial Sequence
  derived and/or modified sequence
MRALRDRAGLLLCVLLLAALLEAALGLPVKKPRLRGPRPGSLTRLAEVSASPDPRPLKEEEEAPLLPRTHLQAEPHQHGCWTVTEPAAMTPGNATPPRTPEVTPLRLELQKLPGLANTTLSTPNPDTQASASPDPRPLREEEEARLLPRTHLQAELHQHGCWTVTEPAALTPGNATPPRTQEVTPLLLELQKLPELVHATLSTPNPDNQTMSLRRSGVPGLPAVGTAALASSRGLGPVAMAALPPRPVPVTCPPVLALRTRTPWASPVRSGSSWPAMLRTCMIKMWTAVRSG

SEQ ID NO: 256109 - DNA, 879 bp, Artificial Sequence
  derived and/or modified sequence
atgcgagccctgagggaccgagccggcctgctcctttgtgtcctactgctggccgccttgctagaagcggctctagggctgcctgttaaaaaaccccgactgcgtggtccacggcctggctcactaacacggctggctgaagtgtctgcatccccagaccctagaccgttgaaagaggaagaagaggcaccactgctgcctagaactcacctccaggccgagcctcaccagcacggttgttggactgttactgagcccgcagccatgacacccggtaacgccacccccccacggactcccgaggtcacacccctgcgactggagctgcaaaaattacctgggttagccaatactaccctgtctactcctaaccctgatactcaggctagcgcgtccccagatccgaggccactccgcgaagaggaggaggcgcggctgcttcctcgaacccatctacaggctgaactgcaccaacatggctgttggacagtgacagagcctgccgcccttacaccggggaatgcaacaccccccagaacccaggaggtcactcccctgctcctcgagcttcaaaaattacctgaactggtacacgccaccctgtcaacaccaaacccagataaccaaactatgtccttgcgccggagcggagtgcctggcctccctgccgtgggaacggctgcgctcgcaagctcgagaggcctgggacccgtggccatggcagcgctgccacccaggccggtcccagtcacgtgtcctcccgtacttgctttgcgtacccgaactccctgggcctcacctgtcagatccggatcaagttggcccgccatgctgcgcacctgtatgatcaaaatgtggactgccgtgcgctctgggtag

SEQ ID NO: 256110 - DNA, 879 bp, Artificial Sequence
  derived and/or modified sequence
atgagggccctgcgggaccgggccggcctgctgctgtgtgtgctgctgctggccgccctgctggaggccgccctgggcctgcctgtgaagaagccccggctgcggggccccaggcctggcagcctgacccggctggccgaggtgtctgccagcccagacccccggcccctgaaggaggaggaggaggcccccctgctgcccaggacccacctgcaggccgagccccaccagcacggctgctggacagtgacagagcctgctgccatgaccccaggaaatgccaccccacccaggaccccagaggtgacccccctgcggctggagctgcagaagctgcccggcctggccaacaccaccctgagcacccccaacccagacacccaggccagcgccagcccagacccccggcccctgcgggaggaggaggaggcccggctgctgcccaggacccacctgcaggccgagctgcaccagcacggctgctggacagtgacagagcctgctgccctgaccccaggaaatgccaccccacccaggacccaggaggtgacccccctgctgctggagctgcagaagctgcctgagctggtgcacgccaccctgagcacccccaacccagacaaccagaccatgagcctgcggcgcagcggcgtgcccggcctgcctgctgtgggcacagctgccctggccagcagccggggcctgggccctgtggccatggccgccctgccccccaggcctgtgcctgtgacctgcccccctgtgctggccctgcggaccaggaccccctgggccagccctgtgcgcagcggcagctcctggccagccatgctgcggacctgcatgatcaagatgtggacagctgtgcgctctggatag

SEQ ID NO: 256111 - DNA, 879 bp, Artificial Sequence
  derived and/or modified sequence
atgcgggccctgcgggaccgggccggcctgctgctgtgcgtgctgctgctagcggctctgcttgaggcagccttggggctccccgtgaagaaacctcggctgcgcgggccccggcccggctccctcacacgcctggccgaggtttcagcatctccggatcctcgcccactgaaggaagaggaagaggctccgctactgcctagaacacatctgcaggccgagccccaccaacatggatgctggacggtcaccgagcccgctgccatgacacccgggaatgcaacccctcctcggactccagaggtgaccccccttcgcctggagctgcaaaaactgccggggctggcgaatactaccctgtctactcccaacccggatacacaggccagcgccagtcccgaccccaggcctctgcgcgaggaagaagaggctagactactcccccgcactcatctgcaggcagagctacaccagcacggatgctggactgtaaccgaacccgccgcccttaccccgggcaatgccacccctcctagaacccaagaggtcacccctctcctactggaattgcagaaactgcctgaactggtgcacgctacactgagcactcccaatccggataaccagacaatgagccttaggcgcagcggcgttcctggactcccggctgtgggtaccgccgcgctggctagttctcgaggcctcggtccagttgctatggcagccctgcctcctcgccccgttccagtcacttgtccgcccgttctcgcattgaggaccaggaccccctgggcttcccccgtgaggtccggctccagctggcccgcgatgctccgaacatgcatgataaagatgtggactgctgttagaagtggttag

SEQ ID NO: 256112 - DNA, 879 bp, Artificial Sequence
  derived and/or modified sequence
atgcgtgccctgagagatagggccggtctgctcctctgcgtgctgctcctcgcagcccttctcgaagcagccctggggcttccagttaagaagcccaggctacggggtcccaggcccggtagcctcactcggctggctgaggtcagcgccagtcccgacccaaggccgttaaaggaggaagaagaagccccactcctgccgaggacccatctgcaggctgagcctcatcagcacggctgctggactgttacagaaccagccgctatgactcccggtaacgcaacaccaccaagaacgcccgaggtgacacctctgcgtctagaactgcagaagctccctgggttagcgaatacgactttaagtacccctaacccagacacacaggcatcagcctctcctgatcctcgcccactgcgggaggaagaggaagcaagacttctgcctaggacccacctgcaggcggagctgcaccaacatggctgctggacggtgaccgagcccgcagcactgacccccggtaatgcaacgcccccacgcacacaggaggtcactcccctcctgctcgagctgcaaaaactgcctgagctggtgcatgccaccctcagcaccccaaaccctgacaatcagaccatgagccttaggcgttctggcgtgccaggactgccagcggtgggaacagctgctctggcttcctcacggggattagggcctgtcgctatggctgctctcccccctagacccgtccccgttacttgtcctcccgtcctggccctacgcacccgtaccccttgggcttccccagtgcggtcaggcagtagttggcccgcaatgcttagaacttgtatgattaagatgtggactgccgtgagaagtggatag

SEQ ID NO: 256113 - DNA, 879 bp, Artificial Sequence
  derived and/or modified sequence
atgagagccctgagagacagagccggcctgctgctgtgcgtgctgctgctggccgccctgctggaggccgccctgggcctgcccgtgaagaagcccagactgagaggccccagacccggcagcctgaccagactggccgaggtgagcgccagccccgaccccagacccctgaaggaggaggaggaggcccccctgctgcccagaacccacctgcaggccgagccccaccagcacggctgctggaccgtgaccgagcccgccgccatgacccccggcaacgccaccccccccagaacccccgaggtgacccccctgagactggagctgcagaagctgcccggcctggccaacaccaccctgagcacccccaaccccgacacccaggccagcgccagccccgaccccagacccctgagagaggaggaggaggccagactgctgcccagaacccacctgcaggccgagctgcaccagcacggctgctggaccgtgaccgagcccgccgccctgacccccggcaacgccaccccccccagaacccaggaggtgacccccctgctgctggagctgcagaagctgcccgagctggtgcacgccaccctgagcacccccaaccccgacaaccagaccatgagcctgagaagaagcggcgtgcccggcctgcccgccgtgggcaccgccgccctggccagcagcagaggcctgggccccgtggccatggccgccctgccccccagacccgtgcccgtgacctgcccccccgtgctggccctgagaaccagaaccccctgggccagccccgtgagaagcggcagcagctggcccgccatgctgagaacctgcatgatcaagatgtggaccgccgtgagaagcggctag

SEQ ID NO: 256114 - protein, 197 aa, Artificial Sequence
  derived and/or modified sequence
MAAFRDIEEVSQGLLSLLGANRAEAQQRRLLGRHEQVVERLLETQDGAEKQLREILTMEKEVAQSLLNAKEQVHQGGVELQQLEAGLQEAGEEDTRLKASLLQLTRELEELKEIEADLERQEKEVDEDTTVTIPSAVYVAQLYHQVSKIEWDYECEPGMVKGIHHGPSVAQPIHLDSTQLSRKFISDYLWSLVDTEW

SEQ ID NO: 256115 - DNA, 594 bp, Artificial Sequence
  derived and/or modified sequence
atggccgccttcagagacatcgaggaggtgagccagggcctgctgagcctgctgggcgccaacagagccgaggcccagcagagaagactgctgggcagacacgagcaggtggtggagagactgctggagacccaggacggcgccgagaagcagctgagagagatcctgaccatggagaaggaggtggcccagagcctgctgaacgccaaggagcaggtgcaccagggcggcgtggagctgcagcagctggaggccggcctgcaggaggccggcgaggaggacaccagactgaaggccagcctgctgcagctgaccagagagctggaggagctgaaggagatcgaggccgacctggagagacaggagaaggaggtggacgaggacaccaccgtgaccatccccagcgccgtgtacgtggcccagctgtaccaccaggtgagcaagatcgagtgggactacgagtgcgagcccggcatggtgaagggcatccaccacggccccagcgtggcccagcccatccacctggacagcacccagctgagcagaaagttcatcagcgactacctgtggagcctggtggacaccgagtggtag

SEQ ID NO: 256116 - DNA, 594 bp, Artificial Sequence
  derived and/or modified sequence
atggccgctttccgggatatcgaagaagtgtcccaaggcttattgtcattacttggagcaaacagggccgaagcccagcaacggcgactcttgggcaggcatgaacaggtcgtcgagcggctgctggagactcaagatggcgctgagaagcagttgcgggagatcttgacaatggagaaggaagtggctcaatcgctgttaaatgctaaagaacaggtgcatcagggcggtgttgagttgcagcaactggaagccggcctgcaggaagcgggcgaggaggacaccaggctaaaggcctccctgctgcagctgaccagggaactggaagaactgaaggaaattgaggcagaccttgaacgccaagagaaggaggtcgacgaggacaccaccgtgacaattcccagtgccgtgtatgtagcacagctctaccaccaggtgagcaagatcgagtgggactacgaatgtgaaccaggtatggtgaagggtattcaccatggccccagtgtggcccagcccatccacctggattccacacagctgtccaggaaattcatcagcgactacttatggtcacttgttgatacagagtggtag

SEQ ID NO: 256117 - DNA, 594 bp, Artificial Sequence
  derived and/or modified sequence
atggctgcattccgggatatcgaggaggtgagtcaggggttgctgtccctcctcggtgctaatcgcgctgaagcccagcagcgccgactgctcgggaggcacgaacaggtggttgagcgcttactggaaacgcaggacggcgccgagaagcagctgcgagagatactaaccatggaaaaggaagtagcacagtcactgctcaacgcgaaagagcaggttcaccagggaggcgtggagctgcagcagctggaggccggactgcaggaggctggcgaggaggacacccggcttaaggcctccctgttacagctgacacgggagctggaagagctgaaagagattgaggcagatctggaacgacaggaaaaagaggttgacgaagataccaccgtgaccattccgtcagctgtgtacgttgcgcagctataccaccaggtgagcaagatcgagtgggattacgaatgtgaacctgggatggtgaaggggattcatcatggtcctagtgttgctcagccgatacatctagatagtacccaactgtcaaggaaatttatctcagattacttgtggtccctggtggacactgagtggtag

SEQ ID NO: 256118 - DNA, 594 bp, Artificial Sequence
  derived and/or modified sequence
atggccgccttccgggacatcgaggaggtgtcccagggcctgctgagcctgctgggcgccaacagagctgaggcccagcagaggcggctgctgggcagacatgagcaggtggtggagcggctgctggagacccaggatggagctgagaagcagctgcgggagatcctgaccatggagaaggaggtggcccagagcctgctgaatgccaaggagcaggtgcaccagggcggcgtggagctgcagcagctggaggccggcctgcaggaggccggggaggaggacacccggctgaaggccagcctgctgcagctgacccgggagctggaggagctgaaggagattgaggccgacctggagcggcaggagaaggaggtggatgaggacaccaccgtgaccatccccagcgctgtgtatgtggcccagctgtaccaccaggtgtccaagattgagtgggactatgaatgtgagcccggcatggtgaagggcatccaccacggccccagcgtggcccagcccatccacctggacagcacccagctgagcaggaagttcatcagtgactacctgtggagcctggtggacacagagtggtag

SEQ ID NO: 256119 - DNA, 594 bp, Artificial Sequence
  derived and/or modified sequence
atggccgccttccgggacatcgaggaggtgagccagggcctgctgtccctgctcggagcaaatcgcgccgaagcacaacaacgtcgcctattggggcggcacgaacaggtcgtagagcgactgctggagacccaggatggagccgaaaaacagctgcgggaaatactgaccatggagaaggaggtggcccagtccctcctgaacgcaaaggagcaggtgcatcaggggggcgtagagctgcagcagttagaagctggtctgcaagaggccggggaggaggacacaaggttgaaggcaagcttactccaactgacacgagagctggaggagttaaaggagatcgaagcagatctggagcgccaggaaaaggaggttgacgaggataccaccgtgacgatcccctccgccgtctacgtggctcagctatatcatcaggtgtcgaagattgaatgggattacgaatgcgaacccggaatggttaaaggcattcatcacgggccatccgtcgcccaacccatacacctggacagcactcagcttagcagaaaattcatctctgactacctgtggagcttagtcgacacagaatggtag

SEQ ID NO: 256120 - DNA, 594 bp, Artificial Sequence
  derived and/or modified sequence
atggccgccttccgggacatcgaggaggtgagccagggcctgctgagcctcctgggagccaatagagcagaagcgcagcagaggagacttctagggcgacacgagcaggtggtcgaacgtcttcttgagacccaagatggcgcggaaaagcagctccgggagatcctcactatggagaaggaagtggcacaatcgctgttgaatgctaaggaacaggttcaccagggcggtgttgagctgcaacagctcgaagctggcttgcaggaggcgggagaggaagatactaggctaaaagcgtccctactccaactcaccagggaattggaagagctaaaagagattgaagccgacctggagagacaagagaaggaggtggacgaggacacaaccgtcaccataccaagcgctgtttacgtcgcccagctgtaccaccaggtgtctaaaatagagtgggattatgaatgcgaacctgggatggtgaagggaatacaccacggcccatctgtcgcacagcccatacacctagatagcacacaactgtcacggaaatttatctccgattacctctggtctttagtcgacactgagtggtag

SEQ ID NO: 256121 - DNA, 654 bp, Artificial Sequence
  derived and/or modified sequence
caaatttgcgcgggttggagcctggcgtagtcatggccgccttccgcgacatagaggaggtgagccaggggctgctcagcctgctgggcgccaaccgcgcggaggcgcagcagcgacggctgctggggcgccacgagcaggtggtggagcggctgctggaaacgcaagacggtgccgagaagcagctgcgagagatcctcaccatggagaaggaagtggcccagagccttctcaatgcgaaggagcaggtgcaccagggaggcgtggagctgcagcagctggaagctgggcttcaggaggctggggaggaggacacccgtctgaaggccagcctccttcagctcaccagagagctggaagagctcaaggagattgaggcggatctggagcgacaggagaaggaggtcgacgaggacacgacagtcacaatcccctcggccgtgtacgtggctcaactttaccaccaagttagtaaaattgagtgggattatgagtgtgagccagggatggtcaaaggcatccatcatggccccagtgtggcccagcccatccacctggacagcacccagctctccaggaaattcatcagcgactacctctggagtctggtggacaccgagtggtagccaggagcctcgtggctgcgtcttgcac

SEQ ID NO: 256122 - DNA, 594 bp, Artificial Sequence
  derived and/or modified sequence
atggccgcattccgggatatagaagaagtgtcgcaaggtttgctcagcttactcggcgcaaatcgcgctgaggcccagcagaggagactgctgggccgtcatgagcaggtggtggaaagactcctggaaacccaggatggggcagaaaagcagctcagggagattctgacaatggaaaaagaggttgcccagtctctgctgaacgccaaagaacaggtgcaccagggcggagttgagttacagcagcttgaggccggactacaagaagcgggagaagaggatacacgtctcaaggcatctctgctccagttaacccgggaactcgaagaactcaaggaaatcgaagcagaccttgagcgccaagagaaggaggtggatgaagacacaacagtcacaattccctccgccgtatatgtggcgcagttgtaccatcaggtgtcaaaaatcgaatgggactacgaatgtgaacccggaatggtgaaaggaatacatcatggaccatctgtcgctcagcctatccacctggatagtacacagctgagcaggaaattcatctcagactatctctggagcctggtagacacagagtggtag

SEQ ID NO: 256123 - DNA, 594 bp, Artificial Sequence
  derived and/or modified sequence
atggcagccttccgagacattgaagaggtgtcccaggggctactgtcgctgcttggcgctaacagagcagaggcacagcaaagaaggctattgggacgacatgagcaggtcgttgagcgcctactggagactcaggatggtgccgagaaacagctgagagagatcctgactatggaaaaagaggtcgcgcagtcattgcttaatgcaaaagagcaggtgcaccaaggtggggtggaattgcagcagcttgaagccggtttgcaggaagctggtgaggaggataccaggcttaaggcctcactgctccaattgacacgagaactcgaggagctcaaggagattgaagcagacctagaaaggcaagaaaaggaggtggacgaagacaccaccgtcaccattccttccgccgtctatgtggcccagttgtaccatcaggttagcaaaatcgaatgggattatgaatgcgaaccaggcatggtaaaaggcatccatcacggaccgtctgtagcccagccaatccacttggattcaactcagctgtctcggaaattcatcagcgactatctgtggtctttggtagatactgagtggtag

SEQ ID NO: 256124 - DNA, 2315 bp, Artificial Sequence
  derived and/or modified sequence
caaatttgcgcgggttggagcctggcgtagtcatggccgccttccgcgacatagaggaggtgagccaggggctgctcagcctgctgggcgccaaccgcgcggaggcgcagcagcgacggctgctggggcgccacgagcaggtggtggagcggctgctggaaacgcaagacggtgccgagaagcagctgcgagagatcctcaccatggagaaggaagtggcccagagccttctcaatgcgaaggagcaggtgcaccagggaggcgtggagctgcagcagctggaagctgggcttcaggaggctggggaggaggacacccgtctgaaggccagcctccttcagctcaccagagagctggaagagctcaaggagattgaggcggatctggagcgacaggagaaggaggtcgacgaggacacgacagtcacaatcccctcggccgtgtacgtggctcaactttaccaccaagttagtaaaattgagtgggattatgagtgtgagccagggatggtcaaaggcatccatcatggccccagtgtggcccagcccatccacctggacagcacccagctctccaggaaattcatcagcgactacctctggagtctggtggacaccgagtggtagccaggagcctcgtggctgcgtcttgcacccagcgggcatctgccgtggtcagatccatttcaaatgaaatgtggggacatagatctttttttttttttttttgagacagagtttcactcttgttgtccagtctggagtgcaatggcacaatctcagctcacagcaacctctgcctcctgggttcaagcgattctcctgcctcagcctccaaagtagctgggattacaggcatgcgccaccacacccagctaattttttgtatttggtagagatggagtttcaccatggtggtcaggctggtcttgaactcctgacctcaggtgatccacccgcccgccttggcctcccaaagtgctaggattccaggcgtgagccatcgtgcccagctagacgtcttccttttttttttttttttgagacggagtctcactctgtcgcccaggctggagtgcagtggtgcgatctcagctcactgcaagctccgcctcctcccgggttcacgccattctcctgcctcagcctcctgagtagctgggactacaggcacctgccaccatgcgcagctaattttttgtatttttagtagagacggggtttcaccatgttagacaggatggtctccatctcctgagtttgtgatctgcccgccttggcctcccaaagtgctgggattacaggtgtgagtcaccgcgcctggccttttttttttttttttttactggatttctttttctcctgattttcggcctcagctcctagagtggcctcagctaggtaaccaacgggagtcgacttatctatgccaggcctgcagtttcacatctgtgacgggatgggacaaatgacaccgtggtattcgatgacagctcccaggtacttcaaggttggcccttactcattcagggggtatgtttgagtgccacggtgtgcccagactctgctaggcaccagagagacaagatacgagtgacatggttctcctcccactgctgacggaggaattaacacaaaagcagacaacactctagaactggagagaggtccagattgcgacaggagccacaccagagtgtgcaggcttcatggaggacagaagcgacttttgtgccgggacttaaaaagataaggaggccaggtgtggtggctcatgcctgcaatcccagcactgtagaaggcagaggccggcagatcacttgagcccaggagttggagaccagactggggaacatggcaagaccccatctctacaaaaaaattaaaaaatttggcctggtgtggtggctcatgcctgtgatcctagcactttgggagttaaaatacaacacttcccagctgcccttatagttaaggtctggccagtgaaatgtatgtggaaatgttacatgacacttctagaaggattcttaaaagacaaatacaccctttcttcccccttcctatttcctggaatgtgggtgtgatggctggagccctggcagccatactgccacgtgtacagacgagtgccgtcctttagggatgacaggagcctggttccctgatgatggcagagccagatatcagcacaaacttatttaaatgggagagagaaggggagaaccaatctcaacttctaccttgtgtaagctgctggttttgggggttttctatgacagataccaaaataaaccctaactgaacatgtactcc

SEQ ID NO: 256125 - protein, 633 aa, Artificial Sequence
  derived and/or modified sequence
MLRRGYKASERRRHLSERLSWHQDQALSSSIYLLREMGPTGFLLREEEPEYMDFRVFLGNPHVCNCSTFPKGGELCKHICWVLLKKFKLPRNHESALQLGLGEREISDLLRGIHRVQTPQPGTNDENEHVEEDGYIKQKEIDSEDICSICQELLLEKKLPVTFCRFGCGNSIHIKCMKILANYQSTSNTSMLKCPLCRKEFAPLKLILEEFKNSSKLVAAAEKERLDKHLGIPCNNCKQFPIEGKCYKCTECIEYHLCQECFDSCCHLSHTFTFREKRNQKWRSLEKRADEVVKYIDTKNEIEEKMSHFQEKQGQVYTPKHIVRSLPLQLITKNSKLLAPGYQCLLCLKAFHLGQHTRLLPCTHKFHRKCIDNWLFHKCNSCPIDGQVIYNPLTWKNSAVNGQAHQSVSNRDIIHLSKQKEPDLFIPGTGLVLKQNRLGILPSIPQCNFDELNTPQSPKDAYENTTIDNLCSIKLDNSNSKKLTYDYKISQHFPRYLQDLPTVSFGKIPSQTLLPPIVHKNIVCPTAMESPCISGKFHTSLSRMTKGCKCNNHNLKKTPATKIREDNKRSTLLPEDFNLIVNWSTAKLSLSKRYSNCMGEITRKCSHLSRQPVSHSVNTKSTELSLIIEGVQL

SEQ ID NO: 256126 - DNA, 1902 bp, Artificial Sequence
  derived and/or modified sequence
atgctgagaagaggctacaaggccagcgagagaagaagacacctgagcgagagactgagctggcaccaggaccaggccctgagcagcagcatctacctgctgagagagatgggccccaccggcttcctgctgagagaggaggagcccgagtacatggacttcagagtgttcctgggcaacccccacgtgtgcaactgcagcaccttccccaagggcggcgagctgtgcaagcacatctgctgggtgctgctgaagaagttcaagctgcccagaaaccacgagagcgccctgcagctgggcctgggcgagagagagatcagcgacctgctgagaggcatccacagagtgcagaccccccagcccggcaccaacgacgagaacgagcacgtggaggaggacggctacatcaagcagaaggagatcgacagcgaggacatctgcagcatctgccaggagctgctgctggagaagaagctgcccgtgaccttctgcagattcggctgcggcaacagcatccacatcaagtgcatgaagatcctggccaactaccagagcaccagcaacaccagcatgctgaagtgccccctgtgcagaaaggagttcgcccccctgaagctgatcctggaggagttcaagaacagcagcaagctggtggccgccgccgagaaggagagactggacaagcacctgggcatcccctgcaacaactgcaagcagttccccatcgagggcaagtgctacaagtgcaccgagtgcatcgagtaccacctgtgccaggagtgcttcgacagctgctgccacctgagccacaccttcaccttcagagagaagagaaaccagaagtggagaagcctggagaagagagccgacgaggtggtgaagtacatcgacaccaagaacgagatcgaggagaagatgagccacttccaggagaagcagggccaggtgtacacccccaagcacatcgtgagaagcctgcccctgcagctgatcaccaagaacagcaagctgctggcccccggctaccagtgcctgctgtgcctgaaggccttccacctgggccagcacaccagactgctgccctgcacccacaagttccacagaaagtgcatcgacaactggctgttccacaagtgcaacagctgccccatcgacggccaggtgatctacaaccccctgacctggaagaacagcgccgtgaacggccaggcccaccagagcgtgagcaacagagacatcatccacctgagcaagcagaaggagcccgacctgttcatccccggcaccggcctggtgctgaagcagaacagactgggcatcctgcccagcatcccccagtgcaacttcgacgagctgaacaccccccagagccccaaggacgcctacgagaacaccaccatcgacaacctgtgcagcatcaagctggacaacagcaacagcaagaagctgacctacgactacaagatcagccagcacttccccagatacctgcaggacctgcccaccgtgagcttcggcaagatccccagccagaccctgctgccccccatcgtgcacaagaacatcgtgtgccccaccgccatggagagcccctgcatcagcggcaagttccacaccagcctgagcagaatgaccaagggctgcaagtgcaacaaccacaacctgaagaagacccccgccaccaagatcagagaggacaacaagagaagcaccctgctgcccgaggacttcaacctgatcgtgaactggagcaccgccaagctgagcctgagcaagagatacagcaactgcatgggcgagatcaccagaaagtgcagccacctgagcagacagcccgtgagccacagcgtgaacaccaagagcaccgagctgagcctgatcatcgagggcgtgcagctgtag

SEQ ID NO: 256127 - DNA, 1902 bp, Artificial Sequence
  derived and/or modified sequence
atgctgaggcggggctataaggccagcgaacggaggcgccatctaagcgaacgactatcatggcaccaagatcaggctttatcatcctccatctatctactaagggagatgggaccgaccggatttctgttaagggaggaggagcccgaatacatggattttagggtgttcttaggtaacccccacgtgtgtaattgcagcacctttcccaaagggggagagctctgcaaacatatttgttgggtcctcctgaagaaattcaaacttcccaggaatcacgaatccgcactccagctgggactgggcgaaagggagataagtgacctgctgcgtggcatacacagggtccaaacgccgcagccaggaaccaacgatgaaaacgagcacgttgaggaggacgggtacatcaagcagaaggagattgacagcgaggacatctgttctatctgtcaggagctcctgctggagaagaaacttccagtgaccttttgcagatttggatgcggcaattcaatccacatcaagtgtatgaagattctcgctaattaccaaagcacaagcaataccagtatgttaaagtgcccactctgcaggaaggaattcgcccccttaaagctgatccttgaggagtttaaaaattcctcaaagctagtggcagcagccgagaaggaaaggctggataagcacctcggaatcccctgcaacaactgtaagcagttccctatcgagggtaagtgttacaagtgcactgagtgcatagagtaccacctgtgccaggagtgttttgatagctgctgtcatcttagtcacacctttacattccgagagaaaagaaatcagaagtggagatcattagagaaaagggcagatgaggtagtaaagtatattgacaccaagaacgagatcgaagagaaaatgtcccactttcaagagaagcaggggcaggtgtatacccctaagcacatcgttcgctcccttccattacagctgatcacaaagaactccaagctgctggcgcctggctaccagtgcctgctctgcctgaaagcatttcatctgggacagcacacccgcctcctaccctgtacacacaaattccatcgcaaatgcatagacaattggctcttccataaatgcaattcttgtccaatcgacggccaagttatctacaacccccttacctggaaaaatagtgccgtcaatgggcaggcacaccagtctgtaagcaatcgcgacatcatccacctttccaagcaaaaggagcctgatctgttcattcccggaactggtttagtgttgaaacagaaccggctgggcattcttccttcaatcccgcagtgcaactttgatgaactgaacacacctcagtctcctaaagacgcctacgaaaatactacgatagacaacctttgcagtatcaaattggataatagtaactctaagaaattgacctatgactataagattagtcagcactttccccggtaccttcaagacctccccacggttagcttcgggaaaatcccttcccagacactgctgccccctatagtccacaagaacatcgtgtgtccaaccgctatggaatccccatgcataagtggcaaattccatacttccctgagcaggatgacaaaggggtgcaagtgcaataatcataacctcaagaaaacaccggccaccaagatcagagaggataataaaagaagtacactgcttcctgaggacttcaatctgatcgtcaactggagtacagctaaattgtccctcagtaaacggtacagcaactgcatgggcgaaatcacccgtaagtgttcacacttgagtcgccaacccgtgagtcactccgtcaatactaaatcaacggagctctcactgatcatcgagggcgtacaactttag

SEQ ID NO: 256128 - DNA, 1902 bp, Artificial Sequence
  derived and/or modified sequence
atgctgcggcggggctacaaggccagcgagcggcggcggcacctgtctgagcggctgtcctggcaccaggaccaggccctgagcagcagcatctacctgctgcgggagatgggccccaccggcttcctgctgcgggaggaggagcctgagtacatggacttccgggtcttcctgggcaacccccacgtgtgcaactgcagcaccttccccaagggcggggagctgtgcaagcacatctgctgggtgctgctgaagaagttcaagctgcccagaaatcatgaaagtgccctgcagctgggcctgggggagcgggagatcagtgacctgctgcggggcatccaccgggtgcagaccccccagcccggcaccaatgatgaaaatgaacatgtggaggaggatggctacatcaagcagaaggagattgattctgaggacatctgcagcatctgccaggagctgctgctggagaagaagctgcctgtgaccttctgccgcttcggctgcggcaacagcatccacatcaagtgcatgaagatcctggccaactaccagagcaccagcaacacctccatgctgaagtgccccctgtgcaggaaggagtttgcccccctgaagctgatcctggaggagttcaagaacagcagcaagctggtggccgctgctgagaaggagcggctggacaagcacctgggcatcccctgcaacaactgcaagcagttccccatcgagggcaagtgctacaagtgcacagaatgtattgagtaccacctgtgccaggagtgctttgacagctgctgccacctgagccacaccttcaccttccgggagaagaggaaccagaagtggaggagcctggagaagagagcagatgaggtggtgaagtacatcgacaccaagaatgaaattgaggagaagatgagccacttccaggagaagcagggccaggtgtacacccccaagcacatcgtgcgcagcctgcccctgcagctgatcaccaagaacagcaagctgctggcccctggctaccagtgcctgctgtgcctgaaggccttccacctgggccagcacacccggctgctgccctgcacccacaagttccacaggaaatgtattgacaactggctgttccacaagtgcaacagctgccccattgatggccaggtgatctacaaccccctgacctggaagaacagcgctgtgaatggccaggcccaccagagcgtgagcaacagagacatcatccacctgagcaagcagaaggagccagacctcttcatccctggcaccggcctggtgctgaagcagaaccggctgggcatcctgcccagcatcccccagtgcaactttgatgagctgaacaccccccagagccccaaggatgcctatgagaacaccaccatcgacaacctgtgcagcatcaagctggacaacagcaacagcaagaagctgacctatgactacaagatcagccagcacttcccccgctacctgcaggacctgcccaccgtgtcctttgggaagatccccagccagaccctgctgccccccatcgtgcacaagaacatcgtgtgccccacagccatggagagcccctgcatcagcggcaagttccacaccagcctgagcaggatgaccaagggctgcaagtgcaacaaccacaacctgaagaagaccccagccaccaagatccgggaggacaacaagaggagcaccctgctgcctgaggacttcaacctgattgtgaactggagcacagccaagctgagcctgagcaagcgctacagcaactgcatgggagagatcaccaggaagtgcagccacctgagccggcagcctgtgagccacagcgtgaacaccaagagcacagagctgagcctcatcatcgagggcgtgcagctgtag

SEQ ID NO: 256129 - DNA, 1902 bp, Artificial Sequence
  derived and/or modified sequence
atgctgcggcggggctacaaggccagcgagcggcggcggcacctgtcagagcgcttgtcttggcaccaggaccaagctttgagttctagtatatatctgctgagagagatggggcctactgggtttctactcagggaggaggaaccggagtacatggacttccgcgttttcttgggcaatcctcacgtatgcaattgttctacttttcccaaaggcggagaactctgtaagcatatctgttgggtgctgcttaagaagtttaaactgccacgcaatcacgaatcagccctgcagttgggcttgggcgagcgcgaaatctcagacttgctgcgcggcattcatcgcgtgcagacaccacagcctggaaccaatgacgaaaacgagcatgtcgaagaggacgggtatatcaagcagaaggagatcgactccgaggacatctgcagtatatgccaggaactgctgcttgagaagaagctgcctgtcacgttctgcagattcgggtgtggcaacagcatccacatcaaatgcatgaagatcctcgctaattaccagtcaaccagcaacacttctatgttaaaatgcccgctctgccgcaaagaatttgcacctttgaagttgatcctcgaggagttcaagaatagcagcaaactcgtggccgccgccgagaaggagcgcctggacaaacacctaggcataccgtgtaacaattgcaaacagtttcccattgagggtaaatgttataaatgcaccgagtgcatcgaataccatctctgtcaggagtgttttgatagctgttgccatctgtctcatacattcacgtttagagagaaaaggaatcaaaaatggaggagtctcgagaagagagccgatgaagtcgtgaaatatattgatacaaagaacgaaatcgaggaaaaaatgtcccactttcaagaaaagcaggggcaagtgtatactcccaagcacatcgtgaggagcctgccccttcaactgatcaccaaaaatagcaagctgctggccccaggatatcaatgcctgctctgcctcaaggcattccacctgggccagcacactagattgctaccctgcacacacaagttccaccgtaaatgtattgacaactggctgttccacaaatgtaattcctgccccattgatggtcaagtcatttataatccgttaacttggaagaactcggccgttaacggacaggcccatcagtccgtgtctaatcgcgatatcatacacctgagcaagcagaaagaacccgatctcttcattccaggcaccggactcgttctaaaacaaaatagacttggcatcctgccttctatccctcagtgtaatttcgatgagttaaatactccccaaagcccaaaagacgcttacgagaacaccaccattgacaacctgtgctccattaaattggataacagcaattcaaagaaattaacttacgattataaaatctcccaacactttcctagatatctgcaggacttgcctacagtctcctttggtaaaatcccatctcagactctcctgccacccattgtgcacaaaaatatcgtgtgtccaacagctatggaaagcccatgcatctcgggaaagttccatacgtctctgtcgcgtatgacaaaggggtgcaaatgcaacaatcataacctcaaaaaaactcctgctaccaagatccgcgaagataacaaacgctccaccctgcttccagaggactttaatctgattgtgaactggagtaccgcaaaactgagtctctcaaaaaggtactctaattgcatgggggaaattacaaggaaatgcagccatctgtctcgccagccagtgtctcacagcgtaaataccaagtcaacagagctgtccttgatcatcgagggtgtccagctgtag

SEQ ID NO: 256130 - DNA, 1902 bp, Artificial Sequence
  derived and/or modified sequence
atgctgcggagaggttacaaggctagcgagagaaggcgacacctgagcgagcggctcagctggcaccaggaccaggcactgagttcgagcatttatctgctgagggagatgggcccaaccgggttcctgctaagggaagaagaaccggagtacatggatttccgcgtgttcctcggaaacccccacgtttgtaactgctccactttcccaaagggaggtgagctgtgcaaacatatctgctgggtgctcctcaaaaagttcaaactacctcgtaatcatgaaagcgccctacaactcggactcggagagagagaaatatcggatcttctgcgtgggattcatcgcgtgcagacaccccagccgggaacaaatgacgagaacgagcacgtggaggaagacggatatattaagcagaaggagattgactctgaggatatctgctcaatttgccaggaactcctcctggagaagaaacttccagtgacgttttgtcgcttcgggtgtggcaactccattcacatcaagtgtatgaaaatacttgccaattaccagagcacatctaacactagtatgttgaaatgtccactttgtagaaaagaatttgccccattaaagttgatcctcgaagaattcaaaaattcttcaaagctggtagcagctgcagaaaaagagcggcttgacaaacacctaggtataccttgtaacaactgcaagcagtttccaattgaaggtaagtgctacaagtgcaccgaatgcattgaatatcacctgtgtcaggaatgctttgattcttgttgtcacctgagccacacattcactttccgggagaagaggaaccaaaaatggaggagtctggaaaagagggctgatgaagtggtcaagtatatagacacgaagaatgaaattgaagagaaaatgtctcactttcaggagaagcagggccaggtgtacactcctaagcatatcgtgcgcagtttaccgctacaactcattacgaaaaattctaagctgctggccccagggtaccagtgtctgctgtgtctgaaggccttccacctcggccaacataccaggttgctgccctgtacacacaagtttcataggaaatgcattgataactggctctttcacaaatgtaattcgtgcccgattgacgggcaggttatatataatcccttgacctggaaaaacagcgctgtgaacggacaagcccatcaaagtgtgtcaaatcgggacatcatccacttgtctaagcagaaggagcctgatttgttcataccgggaacaggcctcgtgctgaagcaaaatcggttaggaatcctcccgagcattcctcagtgtaattttgatgaacttaatacaccccagtcacccaaggacgcttatgagaataccacaattgacaacctgtgttccataaaactggataattcaaattctaaaaagttaacttatgactacaagatttctcagcatttcccacgctatttgcaggacttgcctaccgtatctttcggcaaaatcccttctcagacccttctccctcccatagttcacaagaacatcgtatgccctacagccatggaatccccttgtatatcagggaagtttcacaccagcctcagtaggatgaccaagggctgcaagtgcaataatcacaacctgaaaaagaccccagccaccaaaatcagggaagataataaaaggtctactttgctgcccgaagacttcaacctaattgtgaattggtcgacagcaaagctgtcactgtcaaagagatattcaaattgtatgggcgaaatcacccgtaaatgttctcacctttccagacagcccgtgtcccacagtgtgaacaccaagtctacagagttatctttaattatcgagggcgtccaactttag

SEQ ID NO: 256131 - DNA, 2091 bp, Artificial Sequence
  derived and/or modified sequence
agtgagccgagcagaggggccgcctccgcccgcacccagcatgcttcgccgaggctataaggcctctgaaaggcgaagacacttgagcgagaggctcagctggcaccaagaccaggcgctgagtagcagcatctacctcctacgagagatgggccccactggcttcctgctgagggaggaggagccggaatacatggatttccgagtttttctaggaaatcctcacgtttgtaactgttccacatttccgaaaggaggggaactttgtaagcatatctgctgggtcttgttgaaaaaattcaagcttccaaggaaccatgaatctgctttacaactgggtcttggagaaagagagataagtgacttgcttcgggggatacatcgagttcaaactccccaaccaggaacaaatgacgaaaatgaacatgttgaagaagatgggtacattaaacagaaggaaattgattcagaggatatctgctctatttgtcaagagctacttttagagaaaaagcttcctgtcaccttttgcaggtttggctgtggcaatagtattcatataaaatgcatgaagatcttagctaattatcagagtacatcaaacacttccatgttgaaatgtcctctgtgcaggaaagagtttgcaccattaaaactgattttggaggaattcaaaaactctagcaaactagtagctgcagcagaaaaagagagactggacaaacaccttgggattccctgtaataactgcaaacagtttccaattgaggggaagtgttataagtgtaccgaatgcatagaatatcacttatgccaggaatgttttgatagctgctgccatctttcccacacgtttacatttcgtgagaaaagaaaccaaaaatggagatcactagaaaaaagagcagatgaagttgtaaaatacatagatactaaaaatgagattgaagaaaagatgtcacattttcaagaaaagcaaggccaagtttacacaccaaaacacattgtaagatcactgcctctccaactgattactaagaatagtaagctgcttgctccaggctaccagtgtctactttgtttgaaggcatttcatcttggtcaacatacaagattgctaccatgtactcacaagtttcacaggaagtgtattgacaactggttattccacaagtgcaattcatgccctattgatggacaagttatatataaccctttaacttggaaaaattcagcagtgaatggacaagcacatcagtctgtttcaaacagagacatcattcatctatcaaagcagaaagaaccagatctttttattcctggtactggattagtcttaaaacaaaatagacttggaattttacctagcatacctcagtgtaattttgatgaattgaatacacctcaaagcccaaaagatgcctatgaaaatacaacaatagataatctatgctctatcaaattagataattcaaattcaaaaaaattaacctatgattataaaattagccaacattttcccaggtatcttcaagatttacccactgtgtcatttgggaaaataccatctcaaacactgcttcctcctattgttcataagaatattgtgtgtcccactgcaatggaaagtccatgcatcagtggaaaatttcacactagtctaagccggatgaccaaaggctgtaaatgtaataaccacaacctaaagaagactcctgccactaaaataagagaggacaacaagagatcaactttacttccagaggatttcaatcttattgtcaattggagcacagctaaacttagtttgtctaaaaggtatagtaactgtatgggggaaattacacgaaaatgtagtcatctatcaagacagcctgtgtctcactctgtaaatacaaaaagtactgagctatctttaataatagaaggagttcaattgtgaaaaagtttactatctgaaaatatttgaatgttgaatataaaaaaatgttttatatagaacataaaaagcacacatagtcttgacaaatgtatataaaattctctgttggaatttgcctacttacctataaacagctcactacacttaaa

SEQ ID NO: 256132 - protein, 106 aa, Artificial Sequence
  derived and/or modified sequence
MALDPADQHLRHVEKDVLIPKIMREKAKERCSEQVQDFTKCCKNSGVLMVVKCRKENSALKECLTAYYNDPAFYEECKMEYLKEREEFRKTGIPTKKRLQKLPTSM

SEQ ID NO: 256133 - DNA, 321 bp, Artificial Sequence
  derived and/or modified sequence
atggccctggaccccgccgaccagcacctgagacacgtggagaaggacgtgctgatccccaagatcatgagagagaaggccaaggagagatgcagcgagcaggtgcaggacttcaccaagtgctgcaagaacagcggcgtgctgatggtggtgaagtgcagaaaggagaacagcgccctgaaggagtgcctgaccgcctactacaacgaccccgccttctacgaggagtgcaagatggagtacctgaaggagagagaggagttcagaaagaccggcatccccaccaagaagagactgcagaagctgcccaccagcatgtag

SEQ ID NO: 256134 - DNA, 321 bp, Artificial Sequence
  derived and/or modified sequence
atggccctggatcctgctgaccagcacctgcgtcatgtggagaaggacgtgctgatccccaaaatcatgagagaaaaggcaaaagaaagatgttcggaacaagtgcaggacttcactaagtgctgtaaaaattctggcgtgctgatggtggtcaaatgcaggaaggaaaactcagcactaaaagaatgcctgacagcttactataatgatcccgctttttatgaggagtgtaagatggagtatctcaaggagagggaggaattccggaagacagggatccccacgaaaaagagattgcaaaaacttcctacctctatgtag

SEQ ID NO: 256135 - DNA, 321 bp, Artificial Sequence
  derived and/or modified sequence
atggccctggaccctgctgaccagcacctgcggcacgtggagaaggatgtgctgatccccaagatcatgagggagaaggccaaggagcgctgcagcgagcaggtgcaggacttcaccaagtgctgcaagaacagcggcgtgctgatggtggtgaagtgcaggaaggagaacagcgccctgaaggagtgcctgacagcctactacaatgaccctgccttctatgaggagtgcaagatggagtacctgaaggagcgggaggagttcaggaagacaggcatccccaccaagaagaggctgcagaagctgcccacctccatgtag

SEQ ID NO: 256136 - DNA, 321 bp, Artificial Sequence
  derived and/or modified sequence
atggccctggaccccgccgaccagcacctgcggcacgtggagaaggacgttctgattccaaagatcatgagggagaaagctaaggagaggtgtagtgagcaggtgcaagactttacaaaatgctgcaaaaacagtggggtgctcatggtcgtcaagtgtaggaaagagaactccgccctaaaagagtgtcttacggcgtactataatgaccctgccttttatgaagagtgcaaaatggagtacctgaaggagagagaggagtttcgcaagaccggcatcccgacaaagaagagacttcagaagttgcctacatcgatgtag

SEQ ID NO: 256137 - DNA, 321 bp, Artificial Sequence
  derived and/or modified sequence
atggcattggaccctgccgatcagcaccttaggcacgttgaaaaggatgtactgatcccgaagatcatgcgagagaaagcgaaggaaagatgttcagagcaggtccaggacttcacaaagtgttgtaaaaattccggagtgctcatggtggtgaaatgtagaaaagagaacagcgctctgaaggagtgcctgactgcttattacaacgacccagctttctacgaggagtgtaagatggagtaccttaaggagcgcgaggagttcaggaagactggcattccaaccaaaaaacgactccagaaactgccaacatcgatgtag

SEQ ID NO: 256138 - protein, 729 aa, Artificial Sequence
  derived and/or modified sequence
MAAPDLAHGGHVSRDSVCLHEEQTQAAGMVAGWLINCYQDAVTFDDVAVDFTQEEWTLLDPSQRDLYRDVMLENYENLASVEWRLKTKGPALRQDRSWFRASNETQTARSHNGGQLCDRTQCGEAFSEHSGLSTHVRTQNTGDSCVSNHYERDFFIPCQKTLFKIGEQFSVLGQCGKAFSSTPNVVSQQACTRDRSLDYSSCGEVFLNQSYLQARAGSHNGEETWKWKPCGKALTHSMGCATPVEMHAVRNPHVCRECGKAFRYTAYLTGRVQVHPGEKPCELEECGKASPVSSSLTQHVRIHAAEKPCECKECGKAFTGLSGLSKHVQTDPGQKPYECKDCGKACGGFYLLNEHGKTHTREKPFACVVCGKYFRNSSCLNNHVRIHTGIKPYTCSYCGKAFTVRCGLTRHVRTHTGEKPYTCKDCGKAFCTSSGLTEHVRTHTGEKPYECKDCGKSFTVSSSLTEHARIHTGEKPYECKQCGKAFTGRSGLTKHMRTHTGEKPYECKDCGKAYNRVYLLNEHVKTHTEEKPFICTVCRKSFRNSSCLNKHIQIHTGIKPYECKDCGKTFTVSSSLTEHIRTHTGEKPYECKVCGKAFTTSSHLIVHIRTHTGEKPYICKECGKAFASSSHLIEHRRTHTGEKPYICNECGKAFRASSHLHKHGRIHTGQKPYKCKECGKAYNRFYLLKEHLKTYTEEQVFVCKDCGKSFKNSSCLNHHTQIHTDEKPF

SEQ ID NO: 256139 - DNA, 2190 bp, Artificial Sequence
  derived and/or modified sequence
atggccgcccccgacctggcccacggcggccacgtgagcagagacagcgtgtgcctgcacgaggagcagacccaggccgccggcatggtggccggctggctgatcaactgctaccaggacgccgtgaccttcgacgacgtggccgtggacttcacccaggaggagtggaccctgctggaccccagccagagagacctgtacagagacgtgatgctggagaactacgagaacctggccagcgtggagtggagactgaagaccaagggccccgccctgagacaggacagaagctggttcagagccagcaacgagacccagaccgccagaagccacaacggcggccagctgtgcgacagaacccagtgcggcgaggccttcagcgagcacagcggcctgagcacccacgtgagaacccagaacaccggcgacagctgcgtgagcaaccactacgagagagacttcttcatcccctgccagaagaccctgttcaagatcggcgagcagttcagcgtgctgggccagtgcggcaaggccttcagcagcacccccaacgtggtgagccagcaggcctgcaccagagacagaagcctggactacagcagctgcggcgaggtgttcctgaaccagagctacctgcaggccagagccggcagccacaacggcgaggagacctggaagtggaagccctgcggcaaggccctgacccacagcatgggctgcgccacccccgtggagatgcacgccgtgagaaacccccacgtgtgcagagagtgcggcaaggccttcagatacaccgcctacctgaccggcagagtgcaggtgcaccccggcgagaagccctgcgagctggaggagtgcggcaaggccagccccgtgagcagcagcctgacccagcacgtgagaatccacgccgccgagaagccctgcgagtgcaaggagtgcggcaaggccttcaccggcctgagcggcctgagcaagcacgtgcagaccgaccccggccagaagccctacgagtgcaaggactgcggcaaggcctgcggcggcttctacctgctgaacgagcacggcaagacccacaccagagagaagcccttcgcctgcgtggtgtgcggcaagtacttcagaaacagcagctgcctgaacaaccacgtgagaatccacaccggcatcaagccctacacctgcagctactgcggcaaggccttcaccgtgagatgcggcctgaccagacacgtgagaacccacaccggcgagaagccctacacctgcaaggactgcggcaaggccttctgcaccagcagcggcctgaccgagcacgtgagaacccacaccggcgagaagccctacgagtgcaaggactgcggcaagagcttcaccgtgagcagcagcctgaccgagcacgccagaatccacaccggcgagaagccctacgagtgcaagcagtgcggcaaggccttcaccggcagaagcggcctgaccaagcacatgagaacccacaccggcgagaagccctacgagtgcaaggactgcggcaaggcctacaacagagtgtacctgctgaacgagcacgtgaagacccacaccgaggagaagcccttcatctgcaccgtgtgcagaaagagcttcagaaacagcagctgcctgaacaagcacatccagatccacaccggcatcaagccctacgagtgcaaggactgcggcaagaccttcaccgtgagcagcagcctgaccgagcacatcagaacccacaccggcgagaagccctacgagtgcaaggtgtgcggcaaggccttcaccaccagcagccacctgatcgtgcacatcagaacccacaccggcgagaagccctacatctgcaaggagtgcggcaaggccttcgccagcagcagccacctgatcgagcacagaagaacccacaccggcgagaagccctacatctgcaacgagtgcggcaaggccttcagagccagcagccacctgcacaagcacggcagaatccacaccggccagaagccctacaagtgcaaggagtgcggcaaggcctacaacagattctacctgctgaaggagcacctgaagacctacaccgaggagcaggtgttcgtgtgcaaggactgcggcaagagcttcaagaacagcagctgcctgaaccaccacacccagatccacaccgacgagaagcccttctag

SEQ ID NO: 256140 - DNA, 2190 bp, Artificial Sequence
  derived and/or modified sequence
atggccgccccagacctggcccacgggggccatgtgtcccgggactccgtttgcctgcacgaagaacaaacccaggccgcaggaatggtagcgggctggcttatcaactgctaccaggacgctgttaccttcgacgacgttgctgttgatttcacgcaggaggaatggacgctgttggatccgagccaacgggacctctatagggacgtgatgctggaaaactacgaaaaccttgcctccgtggaatggaggcttaagaccaagggacctgcattgcgacaggacagatcatggttccgcgcaagtaatgaaacgcagaccgctcgaagccataatgggggtcagctgtgcgatcgtacacagtgtggtgaggctttttcagagcattccgggctaagtactcatgtgagaacccagaatactggggacagctgtgtgagcaaccattatgagagagacttttttataccctgccagaagactctcttcaagattggagaacagttcagtgttctgggccaatgcggaaaggccttttcctctacgccaaacgtcgtgtcacaacaagcctgcacccgggatcgaagtctcgattacagcagctgtggcgaggttttccttaatcagagctacttacaggcaagagctgggtcacataacggcgaagaaacatggaagtggaaaccctgcggcaaagcgctgacccactcaatgggctgtgcaacccctgttgaaatgcatgctgtacgtaacccccacgtgtgccgggaatgcggtaaggccttccgatacaccgcctatctcaccgggagagtccaagtccaccccggagagaagccctgtgagctagaggaatgcgggaaagcatctcccgtatcaagctctctcacccaacatgtgaggattcatgctgcagagaagccctgtgaatgtaaggaatgcggcaaggcgttcaccggcctgagtggactgtctaagcacgtgcagactgaccccggccagaaaccatacgaatgtaaagactgtggcaaggcatgtggtggtttctacctgctgaatgaacacggcaaaacccatactagagaaaaacctttcgcatgcgtggtgtgcgggaagtattttcggaacagctcttgtctcaacaaccacgtacgtatccacacaggaatcaaaccttatacctgctcctactgtggcaaggcgttcacagtgagatgtgggctgactcgacatgtgcgcacccacactggagagaaaccctatacatgtaaggattgcgggaaagccttttgtacgtccagtggcctgactgaacatgtgaggactcatacaggagagaagccatatgagtgcaaagattgcggaaaatcctttaccgtgagtagtagcctgactgagcacgcccgcatccacaccggcgaaaagccctatgaatgcaagcagtgcggcaaagccttcaccgggagatctggcctgactaagcatatgaggacccacaccggggagaagccatacgagtgcaaagattgtggaaaagcttacaaccgggtgtacctcctgaacgaacacgtcaagacacacaccgaagagaaacccttcatttgcacagtatgccgcaagtcatttcgtaacagcagttgcctgaataaacatattcagatccacacagggattaagccttacgagtgcaaggattgcggcaagacgtttaccgtgtcctcctctctgacagaacacatacgcactcacacaggagaaaaaccatacgagtgcaaggtgtgcggcaaggcctttacaacctcctcgcacctgattgtccacatcagaacacacactggcgagaagccatacatttgcaaggaatgtggtaaagcttttgcaagctcttctcacctgatcgagcatcggcggacacacaccggtgagaaaccttatatctgcaacgagtgcggcaaggcatttagagcgtcgtcacaccttcataagcatggccgcatccatacaggccagaagccatacaagtgtaaagagtgcggaaaggcatacaaccgtttttatttgctgaaggagcacctgaagacttatactgaggagcaggtgttcgtgtgcaaggactgcggcaagagctttaagaactcatcatgtctcaaccatcacacgcagatccacaccgatgaaaagcctttctag

SEQ ID NO: 256141 - DNA, 2190 bp, Artificial Sequence
  derived and/or modified sequence
atggccgccccagacctggcccacggcggccacgtgtcccgggacagcgtgtgcctgcacgaggagcagacccaggccgccggcatggtggccggctggctgatcaactgctaccaggatgctgtgacctttgatgatgtggccgtggacttcacccaggaggagtggaccctgctggaccccagccagagggacctgtacagagatgtgatgctggagaactatgagaacctggcctctgtggagtggaggctgaagaccaagggccctgccctgcggcaggaccgctcctggttccgggccagcaatgagacccagacagcccggagccacaacggcggccagctgtgtgacaggacccagtgtggggaggccttcagcgagcacagcggcctgagcacccacgtgaggacccagaacacaggagacagctgtgtgagcaaccactatgaaagagacttcttcatcccctgccagaagaccctcttcaagattggagagcagttctctgtgctgggccagtgtgggaaggccttcagcagcacccccaacgtggtgtcccagcaggcctgcacccgggacaggagcctggactacagcagctgtggggaggtgttcctgaaccagagctacctgcaggcccgggccggcagccacaacggggaggagacctggaagtggaagccctgtgggaaggccctgacccacagcatgggctgtgccacccctgtggagatgcatgctgtgaggaacccccacgtgtgcagagaatgtgggaaggccttccgctacacagcctacctgaccggccgggtgcaggtgcaccctggagagaagccctgtgagctggaggagtgtgggaaggccagccctgtgagcagcagcctgacccagcacgtgcgcatccacgccgctgagaagccctgtgagtgcaaggaatgtgggaaggccttcaccggcctgagcggcctgagcaagcacgtgcagacagaccccggccagaagccctatgagtgcaaggactgtgggaaggcctgtggcggcttctacctgctgaatgaacatggcaagacccacacccgggagaagccctttgcctgtgtggtgtgtgggaagtacttcaggaacagcagctgcctgaacaaccacgtgcgcatccacacaggcatcaagccctacacctgcagctactgtgggaaggccttcaccgtgcgctgtggcctgaccaggcatgtgaggacccacactggagagaagccctacacctgcaaggactgtgggaaggccttctgcaccagcagcggcctgacagaacatgtgaggacccacactggagagaagccctatgagtgcaaggactgtgggaagagcttcaccgtgagcagcagcctgacagaacatgcccgcatccacactggagagaagccctatgagtgcaagcagtgtgggaaggccttcaccggccgcagcggcctgaccaagcacatgaggacccacactggagagaagccctatgagtgcaaggactgtgggaaggcctacaacagagtgtacctgctgaatgaacatgtgaagacccacacagaggagaagcccttcatctgcaccgtgtgcaggaagagcttcaggaacagcagctgcctgaacaagcacatccagatccacacaggcatcaagccctatgagtgcaaggactgtgggaagaccttcaccgtgagcagcagcctgacagagcacatccgcacccacactggagagaagccctatgagtgcaaggtgtgtgggaaggccttcaccaccagcagccacctgattgtgcacatccgcacccacactggagagaagccctacatctgcaaggaatgtgggaaggcctttgccagcagcagccacctgattgagcacaggaggacccacactggagagaagccctacatctgcaatgaatgtgggaaggccttccgggccagcagccacctgcacaagcacggccgcatccacacaggccagaagccctacaagtgcaaggaatgtgggaaggcctacaaccgcttctacctgctgaaggagcacctgaagacctacacagaggagcaggtgtttgtgtgcaaggactgtgggaagagcttcaagaacagcagctgcctgaaccaccacacccagatccacacagatgagaagcccttctag

SEQ ID NO: 256142 - DNA, 2190 bp, Artificial Sequence
  derived and/or modified sequence
atggccgcccccgacctggcccacggcggccacgtgagccgggactcagtatgcttgcacgaggagcaaacacaggccgctggtatggttgccgggtggttgattaactgctatcaggatgccgtgaccttcgatgacgtagcagtcgattttacccaggaagaatggacccttctggacccctctcagcgagacctctaccgggacgtgatgttggagaactacgagaacttagcgagcgtggaatggcgtctgaagactaaaggccccgctttgagacaggatagatcctggtttagggcaagcaatgagacacagaccgcccgcagccacaacgggggacagctgtgtgaccgcacacagtgcggtgaagcctttagcgagcattctggactgtccactcacgtgcgcacacagaatacaggtgacagctgtgtgtctaaccattatgaacgggatttttttattccatgtcagaagaccttgtttaaaattggggagcagttctcagtactggggcagtgcgggaaggctttttcgagcactccgaatgtggtgagccagcaggcatgtacaagagatcgaagtcttgactatagttcctgcggcgaggttttcctaaatcagtcctacctgcaggcccgggcaggctcacacaacggggaagaaacctggaaatggaagccatgcgggaaagccctgacacacagcatggggtgtgcgacccccgttgaaatgcatgctgtgcgaaacccacatgtttgcagggaatgtggcaaggcttttaggtataccgcgtaccttacgggacgcgtgcaagtccatccaggcgagaagccatgtgaactcgaggagtgtggtaaagcaagtcccgtgagttctagcctaacacaacacgtgcggatccacgccgcagagaaaccctgcgaatgcaaggaatgtggaaaagcctttacaggtctttctggactctccaaacatgtacagaccgatcccgggcagaaaccatatgagtgtaaggactgcggaaaagcctgcggcggtttttatcttctaaatgagcatgggaagacgcacacgcgtgaaaagccctttgcatgcgtggtatgcggcaagtattttcgaaactctagctgcctgaacaaccacgtgcggatacataccgggataaagccttatacatgttcttattgtggtaaggcattcacagtgagatgcggattgacccgccacgtgaggacacacacgggcgagaagccatacacttgtaaagattgcggaaaggctttttgcacatcatccggtcttacggaacatgttcggacccacaccggtgagaaaccttacgaatgtaaggattgtggtaagtcattcaccgtgagctctagtcttacagaacatgccaggatccacacaggcgaaaagccttacgagtgtaagcagtgtggtaaagctttcaccggacgttccggcctgacaaaacatatgcggacccacactggcgaaaagccttatgaatgcaaagactgcgggaaagcctacaaccgtgtgtacctgttgaacgaacacgttaaaacacacaccgaggagaaacccttcatctgtaccgtgtgccgcaaatctttccgcaactcatcgtgccttaacaaacatatccagatccatactggaataaagccgtatgagtgcaaggattgtggaaagacttttacggtctcctcctccctgactgaacacatccggacgcatactggcgaaaagccatacgagtgtaaagtctgtggcaaggcctttacaacatcatctcatctcatcgttcacatcaggacccacacaggagagaaaccctatatttgtaaggaatgtggaaaggcttttgcctcttctagccacctaatagagcaccgccggacccatactggcgagaagccctatatctgtaacgaatgtggcaaggccttccgagcatcctcccatttgcacaagcacggacggatacataccggccagaaaccgtacaaatgcaaggagtgtggcaaagcttataacagattctacttgctgaaggagcacctgaagacgtataccgaggagcaggtttttgtctgtaaggactgtggaaaatcgttcaaaaattcgtcctgtttaaaccatcatacacaaatccacacagacgaaaaacccttttag

SEQ ID NO: 256143 - DNA, 2190 bp, Artificial Sequence
  derived and/or modified sequence
atggctgcccctgatttggctcatggtggccacgtgtccagagactcagtctgcctgcatgaggaacagacccaggctgctggaatggttgcagggtggctcatcaattgctaccaggatgcggtgacttttgacgatgtggcggttgactttacacaggaggagtggaccctcctggatccatcccagagggatctttatagagatgttatgctagagaattatgaaaatctcgcatcagtcgagtggcggctcaagacaaagggaccagctctaagacaggataggtcttggttcagggcctctaacgagacccagaccgcacggagtcacaacggcggacaactttgcgaccgcacccagtgcggggaagcttttagcgaacattccgggctctcgacacacgtgcggacacagaacacgggtgattcctgtgtatccaatcactacgaacgcgacttttttatcccatgtcaaaagaccttattcaagattggcgagcaatttagtgtcctcggtcagtgcggtaaggcttttagcagtacacctaacgttgtttctcaacaggcatgcacccgggacaggtctttggactatagcagctgcggtgaggtgttcctgaatcagtcctacttacaagcaagggccggaagtcataatggggaggagacttggaagtggaaaccatgcggcaaggcattgacccatagtatggggtgtgccactcccgtagaaatgcatgccgtacgcaatcctcacgtttgtcgggagtgtgggaaagcctttagatacaccgcgtacctaacgggcagggtgcaggtgcatcctggtgagaagccatgcgagctggaggagtgtggcaaggctagccctgtgagctccagcctgacgcagcacgtgcgcatacacgccgctgagaagccctgcgaatgcaaggagtgcgggaaggcgttcactggactatccggtctgtccaagcacgtccaaactgatccgggtcagaagccttatgaatgtaaagactgtggaaaggcttgtggtggcttctacctgctgaacgagcatggcaagacacatacacgggagaagccatttgcctgcgttgtgtgcggtaaatactttcgtaatagctcatgcctcaataatcatgtgaggatccacactggtatcaaaccatacacctgtagttattgcggtaaagcctttaccgtgcgctgtgggctaacccgtcacgttcggactcatactggagagaaaccctatacatgcaaagactgtgggaaggcattttgtacaagttctgggctgacagagcacgtgcggacccacacaggggaaaaaccttacgaatgcaaagattgcggcaagtcctttactgtcagtagcagtctcaccgaacacgctaggatccacaccggggaaaagccttacgagtgtaaacaatgtggcaaagcgttcactggtagaagcgggctcacaaaacacatgcgaacccataccggggaaaagccatacgaatgtaaagattgcggaaaggcgtacaacagggtttacctcctgaatgagcacgtgaaaactcacacagaggagaagccatttatctgtaccgtgtgccgcaaatcgttccgcaatagcagttgcctgaataagcacattcaaatccatactgggattaagccctatgaatgcaaagattgcggtaagacgttcacagtgtcgagtagtctgacagaacatattagaactcacaccggtgaaaaaccatatgagtgtaaggtgtgcggaaaggcttttacaactagctctcatttgattgtgcatatcagaacccataccggggaaaagccatacatctgcaaagagtgcgggaaggcctttgcctcatctagtcatctgattgagcacaggcgtacacacaccggggaaaagccatatatatgtaacgaatgtggaaaagctttccgggcttcttcccatttgcataagcatgggagaattcacaccggtcagaagccctacaaatgcaaagagtgtgggaaagcctacaaccgattttacttattgaaggagcatcttaaaacctacaccgaggaacaagtattcgtgtgtaaggactgcggaaagtcattcaagaattcatcatgcctcaatcatcacacccagatacatacagatgagaagccattctag

SEQ ID NO: 256144 - DNA, 2922 bp, Artificial Sequence
  derived and/or modified sequence
ctgtcttacagctgatccggttcttgcggcggtgcgtgctggcgccggagagttccgcgcgtgtcctcgggctgtccgcggggaagctggtccgggagtgggcgcccgcccgcctgcctcgcgccttgcgcccccggcaccgcttccagaagggaaagtcgccgccgctcgcggtagacccgggcagcgcttccattccgcggagctggaaatagggatccagccatccgtgggtcaggaggaatggagactgtaccttccacatagattcacaagctgccctgcagtggccttggcttcaggaaaggagcattcagacgcttccgtcagcctcccaggatggcagcccctgacctggcccacggaggtcatgtttctagggactcagtctgccttcatgaagaacagacacaggcagcagggatggtggctggctggctgataaattgttaccaggacgcggtgacctttgacgacgtggctgtggacttcacccaggaggaatggactttactggacccatctcagagagacctctacagagatgtgatgctggaaaactacgagaacctggcctcagtagaatggcgacttaaaaccaaagggccagcacttcggcaggatagatcttggttcagagcatcaaatgagacacagacggcaagaagccacaatggagggcagctctgtgaccgcacgcagtgtggagaagctttcagtgaacactcaggcctcagcacacacgtgagaactcaaaatacaggagacagttgtgtgtctaatcattatgaaagggacttttttattccatgccagaaaaccttgttcaaaattggagagcagttttccgtgttgggtcagtgtggaaaagccttcagctctactccaaatgttgtttcccagcaagcatgcactcgggacagatctcttgactacagcagctgtggggaagtgttccttaatcagtcataccttcaggcacgtgcgggaagtcacaacggagaagaaacatggaaatggaagccgtgtgggaaagctctaactcactccatgggctgcgccacacctgttgaaatgcatgccgtcaggaatccccacgtatgtagggaatgtgggaaggcctttaggtacactgcctaccttactggtcgcgtgcaagtccaccctggggaaaagccctgtgaattggaagaatgtggaaaagcctcccctgtttcttccagcctaactcaacatgtaagaattcatgctgcagagaaaccctgtgaatgtaaagaatgcggaaaagccttcactggactctcaggtctttctaaacacgtccaaacagaccctggacagaagccctatgaatgtaaggactgtgggaaagcctgcggtgggttttatctactgaatgagcatggaaaaactcacacgagggagaagccctttgcatgtgtggtttgcggaaaatattttagaaattcctcatgccttaataatcatgttcgaattcacactggaataaaaccctatacatgcagctactgtgggaaggccttcactgtgcgctgtggccttactagacacgtacgaacacacacgggcgagaagccatacacgtgtaaggactgcgggaaagccttctgtacatcctcgggccttactgagcatgtaaggactcacactggagagaaaccatatgaatgtaaagattgtgggaaatccttcactgtttcttcaagcctgactgagcacgcgagaatccataccggagagaaaccctacgaatgtaagcagtgtggcaaagccttcacagggcgctcaggcctcactaaacacatgcggacacacaccggggagaagccctatgaatgtaaggactgtgggaaagcctacaatagggtttatctactgaatgagcatgtgaaaactcacacagaggagaagccctttatatgtacggtatgcaggaaatccttcagaaattcctcgtgcctgaataagcacattcagattcacactggaataaaaccttatgaatgtaaggactgtgggaaaacattcactgtttcttcgagcctaaccgagcacatacgaactcacactggagagaaaccttatgaatgtaaagtatgcggaaaggccttcaccacatcctcacaccttatcgtgcacataagaacccacaccggtgagaaaccctacatatgtaaggagtgtgggaaagcctttgcttcctcctcacaccttatcgaacacagaaggactcacacaggagagaaaccttacatatgtaacgagtgtgggaaagccttccgtgcctcctctcacctgcataaacatggaagaattcacactgggcagaaaccctataaatgtaaggaatgtgggaaagcatacaataggttttatctactaaaagaacatttaaaaacttacactgaagagcaggtttttgtatgtaaggactgtggaaaatcttttaagaattcctcatgccttaaccatcacactcaaattcacactgatgagaaacctttctaatgtaaagaatgtggggaagctgtcagctacactcattcacgttgaagacatgaaagacctctcgttctccagatgtccatgacttgaggaatgtggctaggcaatcagcatctcatcacaacccggcaggcaggaactcaccctggagccctatgcagcagacacagagaaagccctcagtgttctctaaggtcttgctgaatatggatggtatccagtagagagaactctattgatgtgtgatatgcagcagcattgttgctgttctgctcagtactttgatgatcccttgtgatctcacaatgaagaaaaaccttaggagggtgagaattgttgggaagtcattttttacattacatctttcctcaccctttagtaaacgtggtgattgac

SEQ ID NO: 256145 - protein, 184 aa, Artificial Sequence
  derived and/or modified sequence
MKILVAFLVVLTIFGIQSHGYEVFNIISPSNNGGNVQETVTIDNEKNTAIINIHAGSCSSTTIFDYKHGYIASRVLSRRACFILKMDHQNIPPLNNLQWYIYEKQALDNMFSSKYTWVKYNPLESLIKDVDWFLLGSPIEKLCKHIPLYKGEVVENTHNVGAGGCAKAGLLGILGISICADIHV

SEQ ID NO: 256146 - DNA, 555 bp, Artificial Sequence
  derived and/or modified sequence
atgaagattctggttgcctttctggtggtgctgacaatttttggcatccagagtcacggatatgaagtatttaacataattagcccttctaataatggcggtaacgtccaggaaacggtgaccatcgataatgagaaaaatactgcgatcattaacatccatgccggatcttgctcctctacgaccatctttgattacaaacacggctatatcgcctctcgggtgctttcccgcagggcttgcttcattctgaagatggatcaccagaacattccgcctctcaacaatcttcaatggtacatttacgaaaagcaggctctggacaacatgttttcctctaaatatacttgggtgaagtacaatcctctcgagagcctcattaaagatgtcgactggtttctcctgggctctcccattgagaaactatgtaagcatatacctctgtataaaggagaagtcgttgagaacacccacaacgtaggcgcagggggatgcgcaaaggcgggactgctaggtatactcggtatatctatttgcgccgatattcacgtctag

SEQ ID NO: 256147 - DNA, 555 bp, Artificial Sequence
  derived and/or modified sequence
atgaaaatcttggtcgcatttctagtagttttaactatattcggcattcagtcccacggatatgaggtttttaatattatctccccaagcaacaacggaggcaatgtccaggagactgtcacgatagacaacgagaaaaatactgccattattaacattcatgctggctcctgctcctctactacaatcttcgattataagcacggatacatcgcatcccgcgttctctcccgcagagcctgctttatcttaaagatggaccatcaaaatattccgcctctgaacaacctccagtggtacatttacgaaaaacaggcactggataacatgtttagttccaagtacacctgggtgaagtataaccctctggaatcccttattaaggacgtcgattggtttcttctcggtagcccaattgagaaactctgtaaacacatccctttgtataaaggtgaggtggtggaaaatacccacaatgtgggggcgggagggtgtgccaaagcagggctgctcgggattttgggtataagcatttgtgctgacattcatgtgtag

SEQ ID NO: 256148 - DNA, 555 bp, Artificial Sequence
  derived and/or modified sequence
atgaagattctcgtggcctttcttgtggtgctaactatctttggaattcaatcacatgggtatgaggtgttcaacattattagcccgtcgaataacggaggaaatgttcaggagactgtcactatcgacaacgagaaaaacaccgccattattaatattcacgctggctcttgcagctcgacaacaattttcgattacaagcacgggtatattgcctccagagttctaagtcgccgagcttgctttatccttaaaatggatcatcaaaatattccccctctgaacaatctgcagtggtacatttacgagaagcaggctctggacaacatgttttctagcaagtacacttgggtgaaatacaatcctctggaaagccttattaaagacgtcgattggtttttgctgggttctcctattgagaaactgtgtaagcacataccactgtacaaaggggaagttgtcgagaatacacacaatgtaggagccggaggatgcgccaaagctggattactgggaattcttggcatatctatctgcgccgatatacacgtatag

SEQ ID NO: 256149 - DNA, 555 bp, Artificial Sequence
  derived and/or modified sequence
atgaagatcctggtggccttcctggtggtgctgaccatcttcggcatccagagccacggctacgaggtgttcaacatcatcagccccagcaacaacggcggcaacgtgcaggagaccgtgaccatcgacaacgagaagaacaccgccatcatcaacatccacgccggcagctgcagcagcaccaccatcttcgactacaagcacggctacatcgccagcagagtgctgagcagaagagcctgcttcatcctgaagatggaccaccagaacatcccccccctgaacaacctgcagtggtacatctacgagaagcaggccctggacaacatgttcagcagcaagtacacctgggtgaagtacaaccccctggagagcctgatcaaggacgtggactggttcctgctgggcagccccatcgagaagctgtgcaagcacatccccctgtacaagggcgaggtggtggagaacacccacaacgtgggcgccggcggctgcgccaaggccggcctgctgggcatcctgggcatcagcatctgcgccgacatccacgtgtag

SEQ ID NO: 256150 - DNA, 800 bp, Artificial Sequence
  derived and/or modified sequence
ccaaagtgatcatttgaaaaagagatatccacatcttcaagcccatataaaggatagaagctgcacagggcagctttacttactccagcaccttcctctcccaggcaaaatgaaaatacttgtggcatttctggtggtgctgaccatctttgggatacaatctcatggatacgaggtttttaacatcatcagcccaagcaacaatggtggcaatgttcaggagacagtgacaattgataatgaaaaaaataccgccatcattaacatccatgcaggatcatgctcttctaccacaatttttgactataaacatggctacattgcatccagggtgctctcccgaagagcctgctttatcctgaagatggaccatcagaacatccctcctctgaacaatctccaatggtacatctatgagaaacaggctctggacaacatgttctccagcaaatacacctgggtcaagtacaaccctctggagtctctgatcaaagacgtggattggttcctgcttgggtcacccattgagaaactctgcaaacatatccctttgtataagggggaagtggttgaaaacacacataatgtcggtgctggaggctgtgcaaaggctgggctcctgggcatcttgggaatttcaatctgtgcagacattcatgtttaggatgattagccctcttgttttatcttttcaaagaaatacatccttggtttacactcaaaagtcaaattaaattctttcccaatgccccaactaattttgagattcagtcagaaaatataaatgctgtatttataga

SEQ ID NO: 256151 - DNA, 555 bp, Artificial Sequence
  derived and/or modified sequence
atgaaaattcttgtcgcattcctcgtagtgctgacgatcttcggcatccagtcccacggctacgaggttttcaatataataagtccctcaaacaacggtggcaatgtgcaggagacggtgactatcgataacgaaaaaaacaccgcaattattaacattcatgcgggatcatgcagtagcaccaccatcttcgattataaacatggatacatcgccagtcgcgtactgagcagacgcgcctgcttcatcctgaagatggatcaccagaacatccctcctctgaataatctccaatggtatatctacgaaaagcaggcacttgacaacatgttctcatcaaagtatacatgggtgaagtataaccccttggagtcccttattaaggatgtcgattggttcctcctgggcagcccaatagagaaactctgtaagcatatcccgctgtataagggcgaggtggtggagaatactcataacgtcggcgctggaggctgtgcaaaggccggcctgctgggaatcctcggaatctcaatttgtgctgacatccacgtatag

SEQ ID NO: 256152 - DNA, 555 bp, Artificial Sequence
  derived and/or modified sequence
atgaagatcctggtggccttcctggtggtgctgaccatcttcggcatccagagccacggctatgaggtgttcaacatcatcagccccagcaacaacggcggcaatgtgcaggagaccgtgaccatcgacaatgagaagaacacagccatcatcaacatccatgctggcagctgcagcagcaccaccatctttgactacaagcacggctacatcgccagccgggtgctgagccggcgggcctgcttcatcctgaagatggaccaccagaacatcccccccctgaacaacctgcagtggtacatctatgagaagcaggccctggacaacatgttcagcagcaagtacacctgggtgaagtacaaccccctggagagcctcatcaaggatgtggactggttcctgctgggcagccccatcgagaagctgtgcaagcacatccccctgtacaagggggaggtggtggagaacacccacaacgtgggcgctgggggctgtgccaaggccggcctgctgggcatcctgggcatcagcatctgtgccgacatccacgtgtag

SEQ ID NO: 256153 - DNA, 555 bp, Artificial Sequence
  derived and/or modified sequence
atgaagatcctggtggccttcctggtggtgctgaccatcttcggcatccagagccatggatacgaggtttttaatattatctcgccaagtaataacggcggcaacgtgcaggagactgtaaccatcgataatgagaagaacacagcaatcattaacattcacgcaggtagctgcagctccaccacgatctttgattacaaacacggttacattgcatcaagagttctgtcccgtagggcctgtttcattttgaagatggatcatcagaatatacctcctctgaacaaccttcagtggtacatttacgaaaagcaggccttggataatatgttctctagcaagtacacatgggttaaatacaaccccctggagagtctcatcaaagatgtggactggttccttctggggtcccctatcgagaagctttgcaaacacataccactgtacaagggggaggtcgtggaaaatacacacaatgtcggggcaggcgggtgtgcgaaagctggcctgttgggaatcttggggatcagtatttgtgcagatattcacgtgtag

SEQ ID NO: 256154 - RNA, 555 nt, Artificial Sequence
  derived and/or modified sequence
augaaaaucuuggucgcauuucuaguaguuuuaacuauauucggcauucagucccacggauaugagguuuuuaauauuaucuccccaagcaacaacggaggcaauguccaggagacugucacgauagacaacgagaaaaauacugccauuauuaacauucaugcuggcuccugcuccucuacuacaaucuucgauuauaagcacggauacaucgcaucccgcguucucucccgcagagccugcuuuaucuuaaagauggaccaucaaaauauuccgccucugaacaaccuccagugguacauuuacgaaaaacaggcacuggauaacauguuuaguuccaaguacaccugggugaaguauaacccucuggaaucccuuauuaaggacgucgauugguuucuucucgguagcccaauugagaaacucuguaaacacaucccuuuguauaaaggugaggugguggaaaauacccacaaugugggggcgggagggugugccaaagcagggcugcucgggauuuuggguauaagcauuugugcugacauucauguguag

SEQ ID NO: 256155 - RNA, 555 nt, Artificial Sequence
  derived and/or modified sequence
augaagauucucguggccuuucuuguggugcuaacuaucuuuggaauucaaucacauggguaugagguguucaacauuauuagcccgucgaauaacggaggaaauguucaggagacugucacuaucgacaacgagaaaaacaccgccauuauuaauauucacgcuggcucuugcagcucgacaacaauuuucgauuacaagcacggguauauugccuccagaguucuaagucgccgagcuugcuuuauccuuaaaauggaucaucaaaauauucccccucugaacaaucugcagugguacauuuacgagaagcaggcucuggacaacauguuuucuagcaaguacacuugggugaaauacaauccucuggaaagccuuauuaaagacgucgauugguuuuugcuggguucuccuauugagaaacuguguaagcacauaccacuguacaaaggggaaguugucgagaauacacacaauguaggagccggaggaugcgccaaagcuggauuacugggaauucuuggcauaucuaucugcgccgauauacacguauag

SEQ ID NO: 256156 - protein, 279 aa, Artificial Sequence
  derived and/or modified sequence
MASMSIVKATSNTISQCGWSASANWTPSISPSMDRGERSPSALSPTQVAIRRRCRPSPYVVNFLVPSGILIAIDALSFYLPLESGNCAPFKMTVLLGYSVFLLMMNDLLPATSTSSHASLVRPHPSRDQKRGVYFALCLSLMVGSLLETIFITHLLHVATTQPLPLPRWLHSLLLHCTGQGRCCPTAPQKGNKGPGLTPTHLPGVKEPEVSAGQMPGPGEAELTGGSEWTRAQREHEAQKQHSVELWVQFSHAMDALLFRLYLLFMASSIITVICLWNT

SEQ ID NO: 256157 - DNA, 840 bp, Artificial Sequence
  derived and/or modified sequence
atggcatcgatgagcatcgtaaaggccacatccaataccatcagtcagtgcggctggtccgcatcagcaaactggacgccctccatctcaccgagtatggaccgaggagagcgtagtccaagcgccttgtcaccaacccaggtggcaattcgtcgacgatgccgcccctccccctacgtggtgaacttcctggtcccctccggtatcctcattgccattgacgccctcagtttttatctccccctggagtcaggcaattgtgctccatttaaaatgactgtcctactaggatattccgtcttcctgctgatgatgaatgatttgctgcccgccaccagtacttcctctcacgcctcactcgttaggccacatccaagccgtgaccaaaagagaggagtgtacttcgcactctgcctgtcactaatggtggggagcctcctcgaaacgatcttcattacacacctgctgcatgtggccactacccagcctctgcccctgcctcggtggctgcacagcctcttgctccattgtacaggccagggcaggtgctgtcctactgcgcctcagaagggaaacaagggtccgggactcacccctacccacctgcccggagtcaaggagccagaggtctccgccggacagatgcctggccccggtgaggccgagctgaccggaggctctgagtggactcgagctcagcgcgagcatgaagcccaaaaacaacattctgtcgaactctgggtgcagtttagtcacgcaatggacgcccttctcttccgcctctatttgctgtttatggcttcttctataatcacggtaatctgcctgtggaacacgtag

SEQ ID NO: 256158 - DNA, 702 bp, Artificial Sequence
  derived and/or modified sequence
atggtcgccatccgacgaaggtgccgaccaagcccatacgtggtgaatttcctggttccttccgggatactgattgcaatagacgccctgtctttctaccttcccctggaaagcgggaattgcgccccttttaagatgaccgtgttactggggtattctgtgtttctcctgatgatgaatgatctgctgccagcaaccagcaccagttcccacgcatctttggtccggccccacccttccagggatcaaaagagaggtgtttattttgctctgtgtctcagcttaatggtgggatctttgctggagactatattcattactcaccttttgcacgtagcaactacccaacctttgccgctaccccgatggctgcattcgcttttgctgcactgcacagggcaggggcgctgttgtcctacagccccacagaaaggtaataagggacccggcttgactccaacacaccttcccggggttaaagagcccgaggtgtctgccgggcagatgcccggtcctggcgaagccgagttgacaggtggttcagaatggactagagctcagagagaacacgaggcccagaagcagcattcagtggagctgtgggttcaattctctcacgcaatggatgctctactgtttcggctctatctgctgttcatggcttcttcaattatcacagtaatctgtctgtggaacacctag

SEQ ID NO: 256159 - DNA, 840 bp, Artificial Sequence
  derived and/or modified sequence
atggcctccatgagcatcgtgaaggccaccagcaacaccatcagccagtgtggctggagcgccagcgccaactggacccccagcatcagccccagcatggacagaggagagaggagccccagcgccctgagccccacccaggtggccatcagaagacgctgccggcccagcccctacgtggtgaacttcctggtgcccagcggcatcctgattgccattgatgccctgtccttctacctgcccctggagagcggcaactgtgcccccttcaagatgacagtgctgctgggctacagcgtcttcctgctgatgatgaatgacctgctgcctgccaccagcaccagcagccacgccagcctggtgcggccccaccccagccgggaccagaagaggggcgtgtactttgccctgtgcctgagcctgatggtgggcagcctgctggagaccatcttcatcacccacctgctgcacgtggccaccacccagcccctgcccctgccccgctggctgcacagcctgctgctgcactgcaccggccagggccgctgctgccccacagccccccagaagggcaacaagggccctggcctgacccccacccacctgcccggggtgaaggagcctgaggtgtctgctggccagatgcctggccctggagaggccgagctgaccggcggcagcgagtggacccgggcccagcgggagcacgaggcccagaagcagcacagcgtggagctgtgggtgcagttcagccacgccatggatgccctgctcttccggctgtacctgctcttcatggccagcagcatcatcaccgtcatctgcctgtggaacacctag

SEQ ID NO: 256160 - DNA, 702 bp, Artificial Sequence
  derived and/or modified sequence
atggtggccatcagaagacgctgccggcccagcccctacgtggtgaacttcctggtgcccagcggcatcctgattgccattgatgccctgtccttctacctgcccctggagagcggcaactgtgcccccttcaagatgacagtgctgctgggctacagcgtcttcctgctgatgatgaatgacctgctgcctgccaccagcaccagcagccacgccagcctggtgcggccccaccccagccgggaccagaagaggggcgtgtactttgccctgtgcctgagcctgatggtgggcagcctgctggagaccatcttcatcacccacctgctgcacgtggccaccacccagcccctgcccctgccccgctggctgcacagcctgctgctgcactgcaccggccagggccgctgctgccccacagccccccagaagggcaacaagggccctggcctgacccccacccacctgcccggggtgaaggagcctgaggtgtctgctggccagatgcctggccctggagaggccgagctgaccggcggcagcgagtggacccgggcccagcgggagcacgaggcccagaagcagcacagcgtggagctgtgggtgcagttcagccacgccatggatgccctgctcttccggctgtacctgctcttcatggccagcagcatcatcaccgtcatctgcctgtggaacacctag

SEQ ID NO: 256161 - DNA, 840 bp, Artificial Sequence
  derived and/or modified sequence
atggccagcatgagcatcgtgaaggccaccagcaacaccatcagccagtgtggatggtctgcgtccgccaattggaccccaagcatcagccccagcatggacaggggcgagaggagcccctcagcactatctcctacccaagtagcaatccggcgcaggtgtcgtcccagcccctacgttgtcaacttcttggtcccaagcgggatcctgatagccatagatgccttatccttttacctacctctggaatcaggaaattgcgctccctttaagatgaccgtcctgctgggctattccgtgttcctgctgatgatgaacgacttactgcccgcaactagcacctctagccacgccagcctggtccgccctcatccatccagggaccagaagagaggcgtgtattttgctttatgtctgtcattaatggtgggctcccttctggagactattttcattacccatctgcttcacgtggccactactcaaccacttccactgccacgctggctgcattctcttctactgcattgcacaggacaaggccgctgctgtcccacagcccctcaaaaaggaaataagggcccgggattgacccctactcatttgcccggagtcaaggaacctgaggtgtctgccggccaaatgccaggacctggagaggccgaacttaccggtggatctgaatggaccagagcacaaagagagcacgaggcacagaaacagcactcagtggagctctgggttcagttctcacacgccatggatgccctgctgttccggctttacctgcttttcatggcgagtagcataatcaccgttatatgtctatggaacacatag

SEQ ID NO: 256162 - DNA, 702 bp, Artificial Sequence
  derived and/or modified sequence
atggtggccatccggcggcggtgccggcccagcccctacgtggtgaattttctggtcccgtcagggatcctcattgcaatcgatgcactgagtttttatctcccgttggaatccgggaactgcgcacccttcaagatgacagtcttgctggggtattcagtttttttgctgatgatgaacgacctccttccagccacatctacttcttcacatgcctcactggtcagaccccacccttcacgagatcagaagcggggggtgtattttgctctgtgcctgagccttatggtgggatccctgctcgagacaattttcatcacccacctgctgcatgtggccacaacacagccgctcccactcccaaggtggctccactccctgctgctgcattgcacaggccaagggcgatgctgccccaccgcaccgcaaaaggggaacaaagggccaggcctgaccccaacccatctgcccggggtcaaagagccggaggttagcgctggacagatgcccggacctggcgaggccgagctgaccggagggtccgaatggacaagggctcaacgagagcacgaggcccagaaacagcactccgtcgagctgtgggtacagttttctcacgctatggatgccctcctgtttcgcctctatctacttttcatggcctcctcaatcattactgtgatctgcctctggaacacctag

SEQ ID NO: 256163 - DNA, 840 bp, Artificial Sequence
  derived and/or modified sequence
atggccagtatgagtattgtgaaagcaacctcgaacacaatctcccaatgcggatggagtgcttctgccaactggacgcccagcatttcaccaagcatggacaggggggaaaggagtccgagcgccctcagcccgacccaagtagcaattcgtcgcaggtgcaggccatccccctacgtggtgaactttctcgtgccaagcggcattcttattgccattgacgcactatccttctaccttcctctggagtccggtaattgtgctccctttaagatgacagtcttactgggatacagtgtgttccttctgatgatgaacgacctgctccctgccacatcgacatcatcccacgcgtctctcgtaagacctcatccctctcgagaccagaagaggggcgtctatttcgctctgtgtttgagcctaatggttgggtccctgctcgagaccattttcatcactcacttgctgcacgtcgccaccactcagcctttaccattacctcggtggctgcacagtctcttgctgcactgtacgggacagggaagatgttgtccaaccgcaccgcagaagggtaataaggggcctggcctgactccaacccacctcccgggtgtcaaagagcctgaagttagtgctggccagatgcccggaccaggcgaagcagagctgacaggtggctctgagtggacgagggctcagcgggaacacgaagcccagaagcagcattcggtggaactgtgggtgcagttcagccatgccatggacgccttgctgttccgcttgtatctcctgtttatggcatcgtccattattacagttatttgcttgtggaatacctag

SEQ ID NO: 256164 - DNA, 702 bp, Artificial Sequence
  derived and/or modified sequence
atggtggcaatccgacgtaggtgcaggccttctccatacgtggtgaactttttggtgccatctgggattctgatcgcaatagatgcactgagcttttatctgcccctcgaaagtggtaattgtgctcctttcaagatgaccgtgctgctgggttacagtgttttcctgctgatgatgaatgacttgctccccgcaacatccacatcctcccacgcctcattggttaggccgcacccgagccgggatcaaaaaagaggcgtgtacttcgccctctgcttatcactgatggtcggttcactgctggagacaatctttataactcacctcctgcacgtagcaaccacccagccacttccactgcctaggtggctgcactccctcctgctccactgcactggccagggaagatgctgtcctacagctccccagaaaggcaacaaaggtcctggattgacacctacgcacctccccggtgtgaaagaacctgaggtgagcgcaggccagatgcctggcccaggggaggctgagctcacaggaggaagcgagtggaccagggcccagcgtgagcatgaggcccaaaaacaacactcagtagagctctgggtgcagttcagtcacgcaatggatgccctactttttcggctgtatctcctttttatggcttcctccattattacagttatttgcctgtggaacacttag

SEQ ID NO: 256165 - DNA, 1459 bp, Artificial Sequence
  derived and/or modified sequence
ctagattcaggcccagttaaagcacaggtggcttagatcaaaaatcattattgccacatggaccagccttggaagtgaacaaggagagggtggtggcatgggacctgccttcctggagttaatcatctagatgaaagctgctattccaggattcacaccttcaactggtgacatcgttcctgtggctaaatatgcatcagtgtggatcagacacctgcaggtctcatggctagtatgtcaatagtgaaggccacatcaaacacaataagccaatgtgggtggtcagcatctgcaaactggacaccttctatttccccttccatggacagaggtgaacgctctccttcagccctttcacctacacaggtggccatcaggcgcaggtgcaggcccagcccctacgtggtaaactttctggtgcccagtggcattctgattgccatcgatgccctcagtttctacctgccactggaaagtgggaattgtgccccattcaagatgactgttctgctgggctacagcgtcttcctgctcatgatgaatgacttgctcccagccactagcacttcatcacatgcttcactagtacgtcctcatccatcaagagaccaaaagcgaggtgtctacttcgccctgtgcctgtccctgatggtgggcagcctgctggagaccatcttcatcacccacctgctgcacgtggccaccacccagcccctacctctgcctcggtggctccactccctgctgctgcactgcaccggccaagggagatgctgtcccactgcgccccagaagggaaataagggcccgggtctcacccccacccacctgcccggtgtgaaggagccagaggtatcagcagggcagatgccaggccctggggaggcagagctgacagggggctcagaatggacaagggcccagcgggaacacgaggcccagaagcagcactcggtggagctgtgggtgcagttcagccacgcgatggacgccctgctcttccgcctctacctgctcttcatggcctcctccatcatcaccgtcatatgcctctggaacacctaggcaggtgctcacctgcaaacttcagtctggacttctttttgccagagaactccagaaaccagtcaggctctcagtcagccttgtggccctgtcaaccgcctcatttttaacccagtcctctgtgtagtttcagaccagacctgaatagtctcctatgccctccaaaagtcgggtccttgctcctgcatgccatcagccccactcagccctcccatacctccctggctcctcaggattcaggttcctagggtacgtccttgattaaatcaccccaatatgcccctttgcagaaagtattggcttttccctgaattctgttatggtaaaaaaaatcttgggattgagagtcttcttgcagaaacttctcagccaaagtaaaaaggattttctctta

SEQ ID NO: 256166 - DNA, 1043 bp, Artificial Sequence
  derived and/or modified sequence
tgaacaaggagagggtggtggcatgggacctgccttcctggagttaatcatctagatgaaagctgctattccaggattcacaccttcaactggtgacatcgttcctgtggctaaatatggtggccatcaggcgcaggtgcaggcccagcccctacgtggtaaactttctggtgcccagtggcattctgattgccatcgatgccctcagtttctacctgccactggaaagtgggaattgtgccccattcaagatgactgttctgctgggctacagcgtcttcctgctcatgatgaatgacttgctcccagccactagcacttcatcacatgcttcactagtacgtcctcatccatcaagagaccaaaagcgaggtgtctacttcgccctgtgcctgtccctgatggtgggcagcctgctggagaccatcttcatcacccacctgctgcacgtggccaccacccagcccctacctctgcctcggtggctccactccctgctgctgcactgcaccggccaagggagatgctgtcccactgcgccccagaagggaaataagggcccgggtctcacccccacccacctgcccggtgtgaaggagccagaggtatcagcagggcagatgccaggccctggggaggcagagctgacagggggctcagaatggacaagggcccagcgggaacacgaggcccagaagcagcactcggtggagctgtgggtgcagttcagccacgcgatggacgccctgctcttccgcctctacctgctcttcatggcctcctccatcatcaccgtcatatgcctctggaacacctaggcaggtgctcacctgcaaacttcagtctggacttctttttgccagagaactccagaaaccagtcaggctctcagtcagccttgtggccctgtcaaccgcctcatttttaacccagtcctctgtgtagtttcagaccagacctgaatagtctcctatgccctccaaaagtcgggtccttgctcctgcatgccatcagccccactcagccctcccatacctccctgg

SEQ ID NO: 256167 - DNA, 840 bp, Artificial Sequence
  derived and/or modified sequence
atggccagcatgagcatcgtgaaggccaccagcaacaccatcagccagtgcggctggagcgccagcgccaactggacccccagcatcagccccagcatggacagaggcgagagaagccccagcgccctgagccccacccaggtggccatcagaagaagatgcagacccagcccctacgtggtgaacttcctggtgcccagcggcatcctgatcgccatcgacgccctgagcttctacctgcccctggagagcggcaactgcgcccccttcaagatgaccgtgctgctgggctacagcgtgttcctgctgatgatgaacgacctgctgcccgccaccagcaccagcagccacgccagcctggtgagaccccaccccagcagagaccagaagagaggcgtgtacttcgccctgtgcctgagcctgatggtgggcagcctgctggagaccatcttcatcacccacctgctgcacgtggccaccacccagcccctgcccctgcccagatggctgcacagcctgctgctgcactgcaccggccagggcagatgctgccccaccgccccccagaagggcaacaagggccccggcctgacccccacccacctgcccggcgtgaaggagcccgaggtgagcgccggccagatgcccggccccggcgaggccgagctgaccggcggcagcgagtggaccagagcccagagagagcacgaggcccagaagcagcacagcgtggagctgtgggtgcagttcagccacgccatggacgccctgctgttcagactgtacctgctgttcatggccagcagcatcatcaccgtgatctgcctgtggaacacctag

SEQ ID NO: 256168 - DNA, 702 bp, Artificial Sequence
  derived and/or modified sequence
atggtggccatcagaagaagatgcagacccagcccctacgtggtgaacttcctggtgcccagcggcatcctgatcgccatcgacgccctgagcttctacctgcccctggagagcggcaactgcgcccccttcaagatgaccgtgctgctgggctacagcgtgttcctgctgatgatgaacgacctgctgcccgccaccagcaccagcagccacgccagcctggtgagaccccaccccagcagagaccagaagagaggcgtgtacttcgccctgtgcctgagcctgatggtgggcagcctgctggagaccatcttcatcacccacctgctgcacgtggccaccacccagcccctgcccctgcccagatggctgcacagcctgctgctgcactgcaccggccagggcagatgctgccccaccgccccccagaagggcaacaagggccccggcctgacccccacccacctgcccggcgtgaaggagcccgaggtgagcgccggccagatgcccggccccggcgaggccgagctgaccggcggcagcgagtggaccagagcccagagagagcacgaggcccagaagcagcacagcgtggagctgtgggtgcagttcagccacgccatggacgccctgctgttcagactgtacctgctgttcatggccagcagcatcatcaccgtgatctgcctgtggaacacctag

SEQ ID NO: 256169 - protein, 696 aa, Artificial Sequence
  derived and/or modified sequence
MSAENNQLSGASPPHPPTTPQYSTQNLPSEKEDTEVELDEESLQDESPFSPEGESLEDKEYLEEEEDLEEEEYLGKEEYLKEEEYLGKEEHLEEEEYLEKAGYLEEEEYIEEEEYLGKEGYLEEEEYLGKEEHLEEEEYLGKEGYLEKEDYIEEVDYLGKKAYLEEEEYLGKKSYLEEEKALEKEENLEEEEALEKEENLDGKENLYKKYLKEPKASYSSQTMLLRDARSPDAGPSQVTTFLTVPLTFATPSPVSESATESSELLLTLYRRSQASQTDWCYDRTAVKSLKSKSETEQETTTKLAPEEHVNTKVQQKKEENVLEFASKENFWDGITDESIDKLEVEDLDENFLNSSYQTVFKTIIKEMAAHNELEEDFDIPLTKLLESENRWKLVIMLKKNYEKFKETILRIKRRREAQKLTEMTSFTFHLMSKPTPEKPETEEIQKPQRVVHHRKKLERDKEWIQKKTVVHQGDGKLILYPNKNVYQILFPDGTGQIHYPSGNLAMLILYAKMKKFTYIILEDSLEGRIRALINNSGNATFYDENSDIWLNLSSNLGYYFPKDKRQKAWNWWNLNIHVHAPPVQPISLKINEYIQVQIRSQDKIIFCFTYEQKQICLNLGTRYKFVIPEVLSEMKKKTILEAEPGPTAQKIRVLLGKMNRLLNYATTPDLENFIEAVSISLMDNKYLKKMLSKLWF

SEQ ID NO: 256170 - DNA, 2091 bp, Artificial Sequence
  derived and/or modified sequence
atgagcgccgagaacaaccagctgagcggcgccagccccccccacccccccaccaccccccagtacagcacccagaacctgcccagcgagaaggaggacaccgaggtggagctggacgaggagagcctgcaggacgagagccccttcagccccgagggcgagagcctggaggacaaggagtacctggaggaggaggaggacctggaggaggaggagtacctgggcaaggaggagtacctgaaggaggaggagtacctgggcaaggaggagcacctggaggaggaggagtacctggagaaggccggctacctggaggaggaggagtacatcgaggaggaggagtacctgggcaaggagggctacctggaggaggaggagtacctgggcaaggaggagcacctggaggaggaggagtacctgggcaaggagggctacctggagaaggaggactacatcgaggaggtggactacctgggcaagaaggcctacctggaggaggaggagtacctgggcaagaagagctacctggaggaggagaaggccctggagaaggaggagaacctggaggaggaggaggccctggagaaggaggagaacctggacggcaaggagaacctgtacaagaagtacctgaaggagcccaaggccagctacagcagccagaccatgctgctgagagacgccagaagccccgacgccggccccagccaggtgaccaccttcctgaccgtgcccctgaccttcgccacccccagccccgtgagcgagagcgccaccgagagcagcgagctgctgctgaccctgtacagaagaagccaggccagccagaccgactggtgctacgacagaaccgccgtgaagagcctgaagagcaagagcgagaccgagcaggagaccaccaccaagctggcccccgaggagcacgtgaacaccaaggtgcagcagaagaaggaggagaacgtgctggagttcgccagcaaggagaacttctgggacggcatcaccgacgagagcatcgacaagctggaggtggaggacctggacgagaacttcctgaacagcagctaccagaccgtgttcaagaccatcatcaaggagatggccgcccacaacgagctggaggaggacttcgacatccccctgaccaagctgctggagagcgagaacagatggaagctggtgatcatgctgaagaagaactacgagaagttcaaggagaccatcctgagaatcaagagaagaagagaggcccagaagctgaccgagatgaccagcttcaccttccacctgatgagcaagcccacccccgagaagcccgagaccgaggagatccagaagccccagagagtggtgcaccacagaaagaagctggagagagacaaggagtggatccagaagaagaccgtggtgcaccagggcgacggcaagctgatcctgtaccccaacaagaacgtgtaccagatcctgttccccgacggcaccggccagatccactaccccagcggcaacctggccatgctgatcctgtacgccaagatgaagaagttcacctacatcatcctggaggacagcctggagggcagaatcagagccctgatcaacaacagcggcaacgccaccttctacgacgagaacagcgacatctggctgaacctgagcagcaacctgggctactacttccccaaggacaagagacagaaggcctggaactggtggaacctgaacatccacgtgcacgccccccccgtgcagcccatcagcctgaagatcaacgagtacatccaggtgcagatcagaagccaggacaagatcatcttctgcttcacctacgagcagaagcagatctgcctgaacctgggcaccagatacaagttcgtgatccccgaggtgctgagcgagatgaagaagaagaccatcctggaggccgagcccggccccaccgcccagaagatcagagtgctgctgggcaagatgaacagactgctgaactacgccaccacccccgacctggagaacttcatcgaggccgtgagcatcagcctgatggacaacaagtacctgaagaagatgctgagcaagctgtggttctag

SEQ ID NO: 256171 - DNA, 2091 bp, Artificial Sequence
  derived and/or modified sequence
atgagcgctgagaacaatcagttatcaggtgcttcgcccccccaccctcctacgaccccccagtatagtacccagaatcttccatctgaaaaagaagatactgaggttgagctggatgaagagtccctgcaggacgagagcccattctcccccgagggggaatccttagaagataaggaatacctcgaagaggaggaggatctggaggaagaagaatatctgggcaaggaagaatacctgaaagaagaggagtatctggggaaagaggaacacctggaagaagaggagtatctcgagaaggctggctacctagaggaggaggagtacattgaggaggaagagtacttgggaaaagagggatacttggaagaagaggagtacctagggaaagaagagcatctggaggaagaggagtacttgggaaaggagggatatttagagaaggaggactatatcgaagaagtagattatttgggaaaaaaggcatatcttgaggaggaagaatacttgggaaagaagtcttatttggaagaggagaaggccttggaaaaagaggaaaatctagaggaagaagaggctttagagaaagaagagaatctggacggcaaagagaacttgtataaaaagtatctgaaagagccaaaagccagttatagtagccagactatgctcttgagagacgcccgttcccccgatgccggcccatcccaggttactacatttctcaccgtccccctcacttttgccacacctagccccgtgtctgagagcgcgactgagagttccgaattgttactgaccctgtacaggcgatcacaagcttcgcagactgactggtgctacgatagaacagccgtgaagtctctgaaatctaaatcagaaaccgaacaggagactaccactaagctggcccccgaggaacacgttaataccaaggtgcaacagaagaaggaggagaacgtgctggagtttgcaagtaaagagaatttctgggacgggattactgacgagtccatcgacaagctggaagtcgaagatctggacgaaaattttttgaatagctcctaccagactgtgtttaagacgataattaaggaaatggcagcccacaacgaactcgaagaagattttgatatccccctcaccaagctgctggagtcggaaaatcgatggaagctggtgatcatgctaaagaagaactacgagaagtttaaagagacaatcttgagaatcaagaggcgccgcgaggcacagaagcttaccgaaatgaccagcttcaccttccatctgatgtctaagccaactccagaaaaacccgaaacagaagagattcagaaaccccaacgtgtggtacaccatcgcaagaaactggaacgcgataaggagtggatccagaagaagaccgtggtgcaccagggagacggcaagttaattctgtacccaaacaaaaatgtgtatcagatattgttcccggacggcacagggcagatacattacccgtctggcaacctggccatgctgatcctttatgcaaagatgaagaagtttacctacattatcttggaagactcattggagggacgcattagagcactcatcaataactccggtaacgcgacattctacgatgagaattcagatatctggctgaacctgagctccaatctgggctattactttcctaaggacaagaggcagaaggcatggaactggtggaacctgaatatacacgtgcacgctcctccagttcaacctatcagtctgaaaatcaacgaatacatccaagtgcagataaggtcacaagacaagatcatcttttgtttcacatacgaacaaaagcagatatgtttaaacctggggacacgctacaaattcgttattccagaggtgctgtcagaaatgaaaaagaaaactatactggaagctgaacctggacctaccgctcaaaaaattcgcgtgctgctggggaagatgaataggcttctcaattacgctactactcctgatctggaaaattttatcgaagccgttagtataagcctcatggataataaatacttgaagaaaatgctgtctaagctctggttctag

SEQ ID NO: 256172 - DNA, 2421 bp, Artificial Sequence
  derived and/or modified sequence
cacaaacgccggggcctgagatcgcggtggatgcacgcgcgggagcctggcttggctgttattgttgaaaactctcttggcttggactcagtttaccccctgacattgataataaagtgacgttggctgctgcagaaggagttcaccacctacgacttccccagcatgtctgctgaaaataatcagttatcaggagcatcacctcctcaccctcccacaactccccaatattccacacagaacttgccttcagagaaagaggatactgaagtagaactagatgaggaaagtctacaggatgaatctccattttctccagagggagagtctctggaggacaaagagtatctggaggaggaagaggatctggaagaggaagagtatctggggaaagaagaatacttgaaggaggaagagtatctggggaaggaagagcatctggaggaggaagagtatctggagaaggcagggtatctggaggaggaagagtatattgaagaggaagagtatctggggaaggaagggtatctggaggaggaagagtacctggggaaggaagagcatctggaggaggaagagtatctggggaaggaagggtatctggagaaggaagattatattgaggaggtagattatctggggaagaaagcgtatctggaggaggaggagtatctggggaagaaatcatatctagaagaggaaaaggctctggagaaggaagagaatctggaggaggaagaagctctggagaaggaagagaatctggatggaaaagaaaatctgtataaaaagtatctgaaagaacccaaggcaagttattcatcacaaaccatgcttcttcgtgatgcaaggagtccagacgctggcccctctcaggtgaccaccttcttgactgtcccgttgactttcgctaccccttctcctgtctctgaatctgccacagagtcttctgagttgcttctgacattgtacaggaggagccaggccagtcagacagactggtgctacgacagaactgccgtaaaatctttaaaatcgaaatcagaaacagagcaagaaaccaccacgaagctggctccggaagagcatgttaacactaaagtacagcaaaaaaaggaagaaaatgtcctggagtttgcttctaaagagaacttttgggatggtataacagatgagtccattgacaagctggaagtggaagatttagatgaaaactttttgaacagctcctatcagacagtatttaaaacaataatcaaagaaatggctgctcacaatgaactggaagaggattttgacattcccctaactaagctactggaaagtgaaaacagatggaaactggtaattatgctgaagaaaaattatgaaaagttcaaggaaacaatcttacggattaagaggagacgtgaagctcaaaagttaacagagatgaccagtttcacatttcatttaatgagcaaaccaacacctgagaagcctgagacagaagaaatccaaaagcctcaacgtgttgttcatcataggaagaaattagaacgagataaggaatggatacagaagaagacagtggtgcatcaaggtgatggaaaattaattctctaccccaacaagaatgtctatcaaattctctttcctgatgggacaggccagatacattatccatcaggaaacctggctatgctcatcttatatgcgaaaatgaaaaagttcacatacatcattctggaagacagtctagaagggaggatccgggcccttatcaacaactcaggcaatgctaccttctatgatgaaaatagtgatatctggttgaacctgagctccaacctgggctactacttccccaaagacaaacgccagaaggcctggaactggtggaatctgaacatccatgtccacgcaccccctgtccagcccatctccttgaaaatcaatgagtacatccaggtacaaataaggagccaggataagatcatcttctgcttcacctatgaacagaagcagatttgtttaaacctgggcaccaggtacaagtttgtgatcccagaggtgctgagcgaaatgaagaagaaaaccatcctggaggcagaacccggcccaacagcccagaagatccgggtccttctggggaaaatgaataggctcctgaattacgcgaccacccctgatctggaaaacttcatagaggccgtcagtatatcactgatggacaacaagtacctgaagaagatgctctctaaactctggttttaaggcggggcttatctggcatccaccaaatgccttaggaagttggagaccttgggagctccagggaaaaaaaacccaaagacctgttgaccttttatgagagttggtttgtaatttgggacctgtcgtggctccttgatttgaagtaaacatttttggcagaagggc

SEQ ID NO: 256173 - DNA, 2091 bp, Artificial Sequence
  derived and/or modified sequence
atgtctgctgagaacaaccagctgagcggggccagccccccccacccccccaccaccccccagtacagcacccagaacctgcccagcgagaaggaggacacagaggtggagctggatgaggagagcctgcaggatgagagccccttcagccctgagggggagagcctggaggacaaggagtacctggaggaggaggaggacctggaggaggaggagtacctgggcaaggaggagtacctgaaggaggaggagtacctgggcaaggaggagcacctggaggaggaggagtacctggagaaggccggctacctggaggaggaggagtacatcgaggaggaggagtacctgggcaaggagggctacctggaggaggaggagtacctgggcaaggaggagcacctggaggaggaggagtacctgggcaaggagggctacctggagaaggaggactacatcgaggaggtggactacctgggcaagaaggcctacctggaggaggaggagtacctgggcaagaagagctacctggaggaggagaaggccctggagaaggaggagaacctggaggaggaggaggccctggagaaggaggagaacctggatggcaaggagaacctgtacaagaagtacctgaaggagcccaaggccagctacagcagccagaccatgctgctgagagatgcccggagcccagatgctggccccagccaggtgaccaccttcctgactgtgcccctgacctttgccacccccagccctgtgtctgagagcgccacagagagcagcgagctgctgctgaccctgtaccgccgcagccaggccagccagacagactggtgctatgacagaacagctgtgaagagcctgaagagcaagtcagaaacagagcaggagaccaccaccaagctggcccctgaggagcacgtgaacaccaaggtgcagcagaagaaggaggagaatgtgctggagtttgccagcaaggagaacttctgggatggcatcacagatgagagcattgacaagctggaggtggaggacctggatgagaacttcctgaacagcagctaccagaccgtcttcaagaccatcatcaaggagatggccgcccacaatgagctggaggaggactttgacatccccctgaccaagctgctggagagcgagaaccgctggaagctggtgatcatgctgaagaagaactatgagaagttcaaggagaccatcctgcgcatcaagagaagaagagaggcccagaagctgacagagatgaccagcttcaccttccacctgatgagcaagcccaccccagagaagccagagacagaggagatccagaagccccagagggtggtgcaccacaggaagaagctggagcgggacaaggagtggatccagaagaagacagtggtgcaccagggagatggcaagctgatcctgtaccccaacaagaatgtgtaccagatcctcttcccagatggcaccggccagatccactaccccagcggcaacctggccatgctgatcctgtatgccaagatgaagaagttcacctacatcatcctggaggacagcctggagggccgcatccgggccctgatcaacaacagcggaaatgccaccttctatgatgagaacagcgacatctggctgaacctgagcagcaacctgggctactacttccccaaggacaagaggcagaaggcctggaactggtggaacctgaacatccacgtgcacgcccctcctgtgcagcccatcagcctgaagatcaatgagtacatccaggtgcagatccgcagccaggacaagatcatcttctgcttcacctatgagcagaagcagatctgcctgaacctgggcacccgctacaagtttgtgattcctgaggtgctgtctgagatgaagaagaagaccatcctggaggccgagcccggccccacagcccagaagatccgggtgctgctgggcaagatgaaccggctgctgaactatgccaccaccccagacctggagaacttcatcgaggccgtgtccatcagcctgatggacaacaagtacctgaagaagatgctgagcaagctgtggttctag

SEQ ID NO: 256174 - DNA, 2091 bp, Artificial Sequence
  derived and/or modified sequence
atgagcgccgagaacaaccagctgagcggcgccagccccccccacccccccacaaccccgcagtatagtacgcagaacctgcctagcgagaaggaggacactgaggtcgagctggatgaggagtctctgcaggacgagagtccattctccccagaaggtgagagcctcgaggataaagagtatctggaagaagaagaagatttggaggaagaggagtaccttggtaaagaggaatatctcaaggaagaggaatatctggggaaggaagagcatctcgaggaggaagagtacctcgaaaaagctggatacctcgaggaggaggaatatattgaggaggaagaatatctcggcaaggagggctacctcgaggaggaagagtacctgggcaaggaagagcacctcgaggaggaggagtatctgggtaaggaaggatacctagaaaaagaagattatattgaagaagtggactaccttgggaagaaagcttacctggaggaagaggagtacctcggtaagaagagctatctggaagaggaaaaggccctggaaaaagaagaaaatcttgaggaggaagaggctttagagaaggaagaaaacctcgacggaaaagaaaacctctataaaaaatacctgaaggaacctaaggcgagctacagctcccaaaccatgctgctgcgcgacgctcgtagccctgacgcgggcccaagtcaggtcaccacgttcctcactgttccattgacctttgctacacctagccccgtgagcgagtcagctactgagtcgagcgagttacttctgactctctatcggcgttcccaggcgtctcagaccgactggtgttatgaccggacagcagttaaatctctgaaaagcaaaagtgagaccgaacaggagaccacgacaaagctggccccagaagagcacgtcaataccaaggtccagcagaaaaaagaggagaacgtgttggagttcgctagcaaggaaaatttctgggacgggatcaccgatgagtccattgataagctcgaggttgaagatctcgacgaaaacttcctgaactccagctatcagactgtcttcaagacgatcattaaggagatggcggcacacaacgagctggaggaagactttgacatcccactaactaaacttctggagtctgaaaatcgctggaagctggttataatgttgaaaaagaactacgaaaaattcaaagagaccatcctccgcataaagagaaggagggaggctcagaagctgacagaaatgaccagcttcacttttcacctgatgtcgaaaccaacgccagaaaaacctgagaccgaggagatacaaaagccgcagagggtggttcatcacaggaagaagctcgagcgagataaggaatggattcagaaaaagacagtggtccaccagggggacggcaaactgatcctatatccgaataaaaacgtttaccaaattctctttccagacggcacaggtcagatccattacccctcagggaatctcgcaatgttaatcctgtatgccaagatgaaaaagttcacgtatatcatccttgaggactcccttgaagggagaatccgagcgctcatcaataactcagggaacgcaacgttttacgatgaaaattcagatatatggctgaacttaagtagcaacttgggttactactttcccaaggacaagcgccagaaagcctggaactggtggaacctgaacatccacgtgcacgccccgccggtgcagccaataagtctgaaaattaatgaatacattcaggtgcagatccgatctcaggacaagattatcttttgttttacctacgagcagaagcaaatttgcctgaatctgggcacacgatataagttcgtgatacccgaggtgctgtcggaaatgaagaagaaaactattctggaggccgagcccgggcctaccgcccagaaaattcgcgtgctactaggcaagatgaacaggctattaaattacgctacaacacccgacctcgagaatttcatcgaagccgtgtcaatcagcctcatggacaataagtacctcaagaagatgcttagcaagctctggttctag

SEQ ID NO: 256175 - DNA, 2091 bp, Artificial Sequence
  derived and/or modified sequence
atgtcagcagagaataatcagttgagcggcgcatcgccccctcatccccctacaactccccagtactctacacagaacttgccgagcgaaaaggaggacacagaggtggagcttgatgaagagtctctgcaggacgaatcccccttttctcccgagggggagtctttagaggataaagaatacctggaggaggaggaggatcttgaggaagaagagtacctcggaaaggaagaatatcttaaagaagaagagtatctaggcaaagaagaacatctggaggaggaggaatacttggagaaggccggatacctggaagaggaggaatatattgaggaagaggagtatctaggcaaggagggctaccttgaagaggaagagtacctgggcaaagaagagcaccttgaggaagaagagtacctcgggaaagagggatatctagagaaagaagattacattgaagaggtggattacctcggcaagaaggcctatctcgaagaagaagagtacctgggcaagaaaagctacctggaagaagagaaggccctggaaaaagaggagaacttggaggaggaggaagccttggaaaaggaagaaaacctggacgggaaagaaaacctctacaaaaagtacctgaaagagccgaaggcctcttacagctcccagaccatgctgctaagagacgcacgaagcccagacgctggcccaagtcaggttacaacttttctcactgtgccgttaacatttgctaccccgagccccgtctctgagagcgcaacggaatcgagcgaactgctcctgactttgtaccggaggtcacaggccagtcagacggactggtgttacgatcgaaccgcggtcaagtcgctgaagtcaaagtccgagaccgagcaggaaaccaccacgaagctcgcaccagaggagcacgtgaacactaaagtgcagcagaagaaagaggagaatgtgctggagttcgccagcaaagagaacttctgggacggtattaccgacgagtctatcgacaagctggaagttgaagatttggacgaaaactttctgaattcttcctatcaaacagtgtttaaaacgattattaaggaaatggctgctcacaatgagctggaggaagattttgatattcctctgactaagttgctcgagagcgagaacaggtggaagctggtgattatgctgaaaaagaattacgagaagttcaaggagacaatacttcgaataaagaggagaagggaggcacagaagctgactgaaatgacaagctttactttccatctaatgtccaagcccacgccggaaaagcctgagacagaagagatacagaagccccagagggtggtccaccatcgaaaaaagctcgaaagggacaaggagtggatccagaaaaagacagtagtgcaccagggggacggtaagctgatcttgtaccctaataagaatgtttaccagattctgtttcccgatggcaccggccagattcactacccctcagggaacctcgcaatgcttatcctgtatgctaagatgaagaagtttacttacatcattctggaagacagtttggagggaagaattagagcactcatcaataattccggcaacgcaaccttctatgacgagaattcagatatatggctcaatctctcctccaatcttggctattattttccaaaggacaaacggcagaaggcctggaactggtggaatctcaacatccacgttcacgctcccccagttcagcccatctccctgaagatcaacgaatatattcaggttcagattcggtcccaggataaaataatcttctgtttcacttacgaacagaagcagatatgtctgaatctcggcaccagatataagtttgtcattccagaagtcctgagcgagatgaagaagaaaactatccttgaagctgagccaggacccacagcccagaagatcagagtgctgctcgggaagatgaatcgcctgctgaattatgctaccactcctgatcttgaaaactttattgaggctgtgtccattagtctgatggacaataaataccttaaaaaaatgttgtcaaagctctggttttag

SEQ ID NO: 256176 - protein, 211 aa, Artificial Sequence
  derived and/or modified sequence
MAGVGAGPLRAMGRQALLLLALCATGAQGLYFHIGETEKRCFIEEIPDETMVIGNYRTQGMHVEVKDPDGKVVLSRQYGSEGRFTFTSHTPGDHQICLHSNSTRMALFAGGKLRVHLDIQVGEHANNYPEIAAKDKLTELQLRARQLLDQVEQIQKEQDYQRYREERFRLTSESTNQRVLWWSIAQTVILILTGIWQMRHLKSFFEAKKLV

SEQ ID NO: 256177 - protein, 227 aa, Artificial Sequence
  derived and/or modified sequence
MAGVGAGPLRAMGRQALLLLALCATGAQGLYFHIGETEKRCFIEEIPDETMVIGNYRTQMWDKQKEVFLPSTPGLGMHVEVKDPDGKVVLSRQYGSEGRFTFTSHTPGDHQICLHSNSTRMALFAGGKLRVHLDIQVGEHANNYPEIAAKDKLTELQLRARQLLDQVEQIQKEQDYQRYREERFRLTSESTNQRVLWWSIAQTVILILTGIWQMRHLKSFFEAKKLV

SEQ ID NO: 256178 - DNA, 636 bp, Artificial Sequence
  derived and/or modified sequence
atggccggcgtgggcgccggccccctgagagccatgggcagacaggccctgctgctgctggccctgtgcgccaccggcgcccagggcctgtacttccacatcggcgagaccgagaagagatgcttcatcgaggagatccccgacgagaccatggtgatcggcaactacagaacccagggcatgcacgtggaggtgaaggaccccgacggcaaggtggtgctgagcagacagtacggcagcgagggcagattcaccttcaccagccacacccccggcgaccaccagatctgcctgcacagcaacagcaccagaatggccctgttcgccggcggcaagctgagagtgcacctggacatccaggtgggcgagcacgccaacaactaccccgagatcgccgccaaggacaagctgaccgagctgcagctgagagccagacagctgctggaccaggtggagcagatccagaaggagcaggactaccagagatacagagaggagagattcagactgaccagcgagagcaccaaccagagagtgctgtggtggagcatcgcccagaccgtgatcctgatcctgaccggcatctggcagatgagacacctgaagagcttcttcgaggccaagaagctggtgtag

SEQ ID NO: 256179 - DNA, 684 bp, Artificial Sequence
  derived and/or modified sequence
atggccggcgtgggcgccggccccctgagagccatgggcagacaggccctgctgctgctggccctgtgcgccaccggcgcccagggcctgtacttccacatcggcgagaccgagaagagatgcttcatcgaggagatccccgacgagaccatggtgatcggcaactacagaacccagatgtgggacaagcagaaggaggtgttcctgcccagcacccccggcctgggcatgcacgtggaggtgaaggaccccgacggcaaggtggtgctgagcagacagtacggcagcgagggcagattcaccttcaccagccacacccccggcgaccaccagatctgcctgcacagcaacagcaccagaatggccctgttcgccggcggcaagctgagagtgcacctggacatccaggtgggcgagcacgccaacaactaccccgagatcgccgccaaggacaagctgaccgagctgcagctgagagccagacagctgctggaccaggtggagcagatccagaaggagcaggactaccagagatacagagaggagagattcagactgaccagcgagagcaccaaccagagagtgctgtggtggagcatcgcccagaccgtgatcctgatcctgaccggcatctggcagatgagacacctgaagagcttcttcgaggccaagaagctggtgtag

SEQ ID NO: 256180 - DNA, 636 bp, Artificial Sequence
  derived and/or modified sequence
atggccggagtgggtgctgggccacttcgggcaatggggagacaagctctcctccttctggcattatgtgctactggcgctcagggactgtactttcacatcggcgaaaccgaaaaacgttgctttatcgaagaaatacccgatgaaacaatggtcatcggaaactacagaacccaagggatgcacgtagaagtcaaggacccagatggcaaggtcgtgctttccaggcagtatggatccgagggtcgattcacgttcactagccataccccaggagaccaccaaatctgtttgcactccaactctacaaggatggccctttttgccggaggtaagcttagggtccatctggacattcaggtgggtgagcatgcaaacaactaccccgagatagcggctaaagacaaactcacggaattgcagttgcgtgcccgtcagcttctagaccaggtagagcagattcaaaaggagcaggactatcagcggtatcgtgaagagagatttcgtctcacatctgaatcaaccaaccagagggtcctctggtggtcgatcgcacagacggtgatccttatcttgacaggaatttggcagatgcgccacctcaaaagtttctttgaggccaaaaaactcgtgtag

SEQ ID NO: 256181 - DNA, 684 bp, Artificial Sequence
  derived and/or modified sequence
atggctggagtgggtgcaggccctcttcgtgctatgggacgccaggctcttctgctgctggctctctgcgctacaggagcacagggtctgtattttcatatcggagagaccgagaaaaggtgtttcattgaagagatcccagacgaaactatggttataggcaattacaggacccagatgtgggataagcagaaagaagtgttcctgccctccaccccaggtcttggcatgcacgttgaagtgaaagatccggacggtaaagtcgtgctgagccgccagtatgggtcggaagggaggtttacttttaccagtcacacaccaggcgatcatcagatttgcctccactcgaatagtaccaggatggctctgttcgccggcggtaaactcagagtgcacttggacatacaggtgggtgagcacgcgaataattatcctgaaatcgctgcaaaggacaaacttacagagttacagctgcgggctcgccagctcctggaccaggtggagcagattcagaaagagcaggactatcagcggtaccgagaggagcgttttagactgacaagcgagagcacgaaccagcgggtgctgtggtggtcaatcgctcaaaccgtcatattgatcctgaccgggatatggcagatgcggcacttgaaaagcttctttgaggccaaaaagctcgtgtag

SEQ ID NO: 256182 - DNA, 636 bp, Artificial Sequence
  derived and/or modified sequence
atggccggcgtgggcgccggccccctgcgggccatgggccggcaggccctgctgctgctggccctgtgtgccactggagcccagggcctgtacttccacatcggggagacagagaagcgctgcttcatcgaggagatcccagatgagaccatggtgattggcaactaccgcacccagggcatgcacgtggaggtgaaggaccctgatggcaaggtggtgctgagccggcagtatggcagcgagggccgcttcaccttcaccagccacacccctggggaccaccagatctgcctgcacagcaacagcaccaggatggccctgtttgctgggggcaagctgcgggtgcacctggacatccaggtgggggagcacgccaacaactacccagaaattgctgccaaggacaagctgacagagctgcagctgcgggcccggcagctgctggaccaggtggagcagatccagaaggagcaggactaccagcgctaccgggaggagcgcttccggctgaccagcgagagcaccaaccagagggtgctgtggtggagcatcgcccagaccgtcatcctgatcctgaccggcatctggcagatgaggcacctgaagagcttctttgaggccaagaagctggtgtag

SEQ ID NO: 256183 - DNA, 684 bp, Artificial Sequence
  derived and/or modified sequence
atggccggcgtgggcgccggccccctgcgggccatgggccggcaggccctgctgctgctggccctgtgtgccactggagcccagggcctgtacttccacatcggggagacagagaagcgctgcttcatcgaggagatcccagatgagaccatggtgattggcaactaccgcacccagatgtgggacaagcagaaggaggtgttcctgcccagcaccccaggcctgggcatgcacgtggaggtgaaggaccctgatggcaaggtggtgctgagccggcagtatggcagcgagggccgcttcaccttcaccagccacacccctggggaccaccagatctgcctgcacagcaacagcaccaggatggccctgtttgctgggggcaagctgcgggtgcacctggacatccaggtgggggagcacgccaacaactacccagaaattgctgccaaggacaagctgacagagctgcagctgcgggcccggcagctgctggaccaggtggagcagatccagaaggagcaggactaccagcgctaccgggaggagcgcttccggctgaccagcgagagcaccaaccagagggtgctgtggtggagcatcgcccagaccgtcatcctgatcctgaccggcatctggcagatgaggcacctgaagagcttctttgaggccaagaagctggtgtag

SEQ ID NO: 256184 - DNA, 636 bp, Artificial Sequence
  derived and/or modified sequence
atggccggcgtgggcgccggccccctgcgggccatgggccggcaggctttgcttctgctcgcactctgcgccaccggagcccagggactctatttccacattggggagaccgaaaagagatgttttattgaggagattccagacgagacaatggtcattggaaactaccggacccaggggatgcatgtggaggtgaaggatcccgatggcaaagtcgtgctgagcaggcagtatggcagcgaagggaggtttacgttcacgtcgcacactccaggagaccatcagatttgcctgcattccaactctaccagaatggctctgttcgcgggaggtaaactgagagtccatttggacattcaggtaggagagcatgcaaacaactaccctgaaatcgcagccaaggataagcttacggaattacaacttagagcacgacagcttctggaccaggttgagcaaatccagaaggagcaggattatcaaaggtatagagaagaaagattcaggctcacatctgagagcactaaccagcgcgtgttgtggtggagtattgcacaaaccgttattctaatcctgaccggcatctggcaaatgaggcaccttaaaagttttttcgaggctaagaaactggtctag

SEQ ID NO: 256185 - DNA, 684 bp, Artificial Sequence
  derived and/or modified sequence
atggccggcgtgggcgccggccccctgcgggccatgggccggcaggctctcctgcttttggctctctgcgccacaggggctcagggcttgtattttcacatcggggagacagaaaagcggtgttttatagaagaaattcccgacgaaacaatggtgattggaaactatagaacccagatgtgggataaacagaaagaagtgtttctgccttcgacgcctggattgggcatgcatgtggaagtgaaagacccagacggtaaggtggtgctgagccgccaatatggatccgagggccggtttacttttacttcacacacaccaggggaccaccagatttgcctacacagcaactctacccgcatggcgctcttcgctggaggcaagttgcgcgttcacctcgatattcaggttggcgagcatgcgaacaactaccccgaaattgcggcgaaagacaagttaaccgaactccagctccgcgccagacaactgcttgaccaggtagagcagattcagaaggagcaggactatcagcggtaccgggaggaacgctttcgcctgacttccgagtcaaccaatcaacgggtgctgtggtggtcaatcgcccaaaccgtaatactgatattgacgggaatctggcagatgaggcacctgaagtcattcttcgaagccaagaagcttgtttag

SEQ ID NO: 256186 - DNA, 636 bp, Artificial Sequence
  derived and/or modified sequence
atggcgggagtgggagctggacccctgcgtgcaatgggcaggcaagccctgttactgctggccctgtgcgccaccggggcacaagggctatattttcacattggagaaacggaaaaacggtgctttatcgaagaaattccagacgaaactatggtcatcggaaactatagaacccagggcatgcacgtagaagtcaaggaccctgatggcaaggtcgtgctgagccggcagtatggaagtgagggacgattcacattcaccagtcacacacctggagaccaccagatctgtctgcactccaactcaacacgcatggctctattcgctggcggaaagttgagagttcacctagacatacaagttggcgagcatgctaataactatccagagatcgcagcaaaggacaagttaacagagcttcagttgcgtgcgcgacaattgctggaccaagttgaacagatccagaaggaacaagactaccagcggtatcgcgaggaacgatttcgcctaacatctgaatcaactaaccagagagtgctctggtggtcaattgcccagaccgtaatactgattctaaccggaatttggcaaatgcgccacctgaaatcattctttgaggccaaaaaactggtgtag

SEQ ID NO: 256187 - DNA, 684 bp, Artificial Sequence
  derived and/or modified sequence
atggcgggagtgggagctggcccattacgggctatgggtcgccaagctctactgctgctagccctgtgcgcaaccggggcacaaggactgtacttccacatcggagagaccgaaaagagatgttttattgaggaaattccagatgaaacgatggtgataggaaattatcgtacccagatgtgggataagcagaaagaggtgttcctcccatctacacccggtttgggaatgcacgttgaagtcaaggatccggacggcaaagtggttttgagtcggcagtacgggtcagagggtcgatttacattcacaagtcacacaccaggggatcatcagatctgcctgcattcaaattcaactcgcatggccctctttgccggtggaaagcttagagtgcatctcgatatccaggttggcgagcacgctaataactatccagagatagcagctaaagacaaactgacggagctccagcttagagctcgacaactgctggaccaggtcgaacagatacagaaggagcaggattaccagcgctaccgggaggagcgttttcggctcacgtcagagtccacaaatcagcgagtgctttggtggtccatcgcccagaccgtcatcctgatcctgactgggatttggcagatgagacatcttaagtcgttctttgaagccaagaaattggtttag

SEQ ID NO: 256188 - DNA, 1826 bp, Artificial Sequence
  derived and/or modified sequence
ggcgcttaggggctgaggcgcgatggcaggtgtcggggctgggcctctgcgggcgatggggcggcaggccctgctgcttctcgcgctgtgcgccacaggcgcccaggggctctacttccacatcggcgagaccgagaagcgctgtttcatcgaggaaatccccgacgagaccatggtcatcggcaactatcgtacccagggcatgcacgtggaagtgaaggaccccgacggcaaggtggtgctgtcccggcagtacggctcggagggccgcttcacgttcacctcccacacgcccggtgaccatcaaatctgtctgcactccaattctaccaggatggctctcttcgctggtggcaaactgcgggtgcatctcgacatccaggttggggagcatgccaacaactaccctgagattgctgcaaaagataagctgacggagctacagctccgcgcccgccagttgcttgatcaggtggaacagattcagaaggagcaggattaccaaaggtatcgtgaagagcgcttccgactgacgagcgagagcaccaaccagagggtcctatggtggtccattgctcagactgtcatcctcatcctcactggcatctggcagatgcgtcacctcaagagcttctttgaggccaagaagctggtgtagtgccctctttgtatgacccttcctttttacctcatttatttggtactttccccacacagtcctttatccacctggatttttagggaaaaaaatgaaaaagaataagtcacattggttccatggccacaaaccattcagatcagccacttgctgaccctggttcttaaggacacatgacattagtccaatctttcaaaatcttgtcttagggcttgtgaggaatcagaactaacccaggactcagtcctgcttcttttgcctcgagtgattttcctctgtttttcactaaataagcaaatgaaaactctctccattaccttctgctttctctttgtccacttacgcagtaggtgactggcatgtgccacagagcaggccctgcctcactgtctgctggtcagttctgggttcacttaatggctttgtgaatgtaaataaggggcaggtcttggccctagaggattgagatgtttttctaaatcttagaactatttttggataaattatatattttccttcctagtagaagtgttactgcctgtaactagctcaaaataccaatgcagtttctgcattctgggttttgtttttccttttttttttttttttttttttttgagttttgctcttgtcgcccaggctggagtgcaatggcgtgatctcagctcactggcaacatctgcctcccgggttcaaatgattctcctgcctcagtctcctgagtagctgggattacaggtgcccgccaccacgctcagctaatttttgtatttttagtagagatggggttttaccatgttggccaggctggtcttagactcctgacctcagttgatccacctgcctcagcctctgcattcagtttattcacatatttttggtaactcccatggcagctcctaggatttcagcggtctgtgggccagaaagcaggcaccagggctgacctcaaggccgtatcagagggccaagcagagttcttttggatacctgcttttcatcccacagggccttagagtcagaggtaaggtagcaacagagctagaatggggcaatgcactcttaccctccttctcaacttttatttaagctgtgctaaatgttttcttcaagggaaccagatttagttctttacagaattttccagtgaaataaaacatgttgtaat

SEQ ID NO: 256189 - DNA, 2322 bp, Artificial Sequence
  derived and/or modified sequence
gcaggcgcagagcgatgcgcaaatgtgcgcaggcgcttaggggctgaggcgcgatggcaggtgtcggggctgggcctctgcgggcgatggggcggcaggccctgctgcttctcgcgctgtgcgccacaggcgcccaggggctctacttccacatcggcgagaccgagaagcgctgtttcatcgaggaaatccccgacgagaccatggtcatcggcaactatcgtacccagatgtgggataagcagaaggaggtcttcctgccctcgacccctggcctgggcatgcacgtggaagtgaaggaccccgacggcaaggtggtgctgtcccggcagtacggctcggagggccgcttcacgttcacctcccacacgcccggtgaccatcaaatctgtctgcactccaattctaccaggatggctctcttcgctggtggcaaactgcgggtgcatctcgacatccaggttggggagcatgccaacaactaccctgagattgctgcaaaagataagctgacggagctacagctccgcgcccgccagttgcttgatcaggtggaacagattcagaaggagcaggattaccaaaggtatcgtgaagagcgcttccgactgacgagcgagagcaccaaccagagggtcctatggtggtccattgctcagactgtcatcctcatcctcactggcatctggcagatgcgtcacctcaagagcttctttgaggccaagaagctggtgtagtgccctctttgtatgacccttcctttttacctcatttatttggtactttccccacacagtcctttatccacctggatttttagggaaaaaaatgaaaaagaataagtcacattggttccatggccacaaaccattcagatcagccacttgctgaccctggttcttaaggacacatgacattagtccaatctttcaaaatcttgtcttagggcttgtgaggaatcagaactaacccaggactcagtcctgcttcttttgcctcgagtgattttcctctgtttttcactaaataagcaaatgaaaactctctccattaccttctgctttctctttgtccacttacgcagtaggtgactggcatgtgccacagagcaggccctgcctcactgtctgctggtcagttctgggttcacttaatggctttgtgaatgtaaataaggggcaggtcttggccctagaggattgagatgtttttctaaatcttagaactatttttggataaattatatattttccttcctagtagaagtgttactgcctgtaactagctcaaaataccaatgcagtttctgcattctgggttttgtttttccttttttttttttttttttttttttgagttttgctcttgtcgcccaggctggagtgcaatggcgtgatctcagctcactggcaacatctgcctcccgggttcaaatgattctcctgcctcagtctcctgagtagctgggattacaggtgcccgccaccacgctcagctaatttttgtatttttagtagagatggggttttaccatgttggccaggctggtcttagactcctgacctcagttgatccacctgcctcagcctctgcattcagtttattcacatatttttggtaactcccatggcagctcctaggatttcagcggtctgtgggccagaaagcaggcaccagggctgacctcaaggccgtatcagagggccaagcagagttcttttggatacctgcttttcatcccacagggccttagagtcagaggtaaggtagcaacagagctagaatggggcaatgcactcttaccctccttctcaacttttatttaagctgtgctaaatgttttcttcaagggaaccagatttagttctttacagaattttccagtgaaataaaacatgttgtaatagctgtgtttgagatgaaataagaggttgtgggtagaggggaggcacctaaaggaaaagaggaaaggtgcctgggctacctatgcagataacctggagtggacttcactgtggactcgtggtactaaggcttggcctggacaggcagtctagggggtatgggaatacacggtgtggttgttcaactatttgcaaaggtcaaccaaatagaccacatgttcgcaaagtatcatctgaggaaattaagtaccttcttagccctctcagtcataaatttgaacaaattttaatacacttccctcatgcccttctatataaaacttaataccattagttccccattcttgacattttatttcagtttttattatatatttatttgaaatatttattaaattatctgacctacagaactaaa

SEQ ID NO: 256190 - protein, 219 aa, Artificial Sequence
  derived and/or modified sequence
MVKLLPAQEAAKIYHTNYVRNSRAVGVMWGTLTICFSVLVMALFIQPYWIGDSVNTPQAGYFGLFSYCVGNVLSSELICKGGPLDFSSIPSRAFKTAMFFVALGMFLIIGSIICFSLFFICNTATVYKICAWMQLAAATGLMIGCLVYPDGWDSSEVRRMCGEQTGKYTLGHCTIRWAFMLAILSIGDALILSFLAFVLGYRQDKLLPDDYKADGTEEV

SEQ ID NO: 256191 - DNA, 660 bp, Artificial Sequence
  derived and/or modified sequence
atggtgaaactcctgccagcacaggaggccgctaaaatctatcatacaaactatgtcagaaatagtcgtgccgtgggcgtgatgtggggcacactgacgatctgttttagcgttctggtgatggcgctttttattcagccatactggatcggtgatagtgtgaatacacctcaggccgggtactttggcctcttttcatactgcgtgggtaatgtcctgtctagcgaactgatttgcaaagggggccccctggatttcagctctattccctcgcgggccttcaagacagctatgtttttcgtggccctagggatgttccttatcataggaagcatcatttgcttttcactgttctttatatgcaacaccgctacagtgtacaagatttgcgcgtggatgcagctagcagcggccactggactgatgatcggttgcctggtgtatccagacggatgggatagttctgaggtaaggaggatgtgcggcgaacaaacgggaaaatatacacttggccactgcaccatccggtgggcttttatgcttgctatcttgagcatcggcgacgcgcttattctttcattcttggcctttgtccttggataccgccaggataagctgctgccagacgactataaagccgatgggaccgaagaagtctag

SEQ ID NO: 256192 - DNA, 660 bp, Artificial Sequence
  derived and/or modified sequence
atggtgaaactgctccccgctcaggaagcggccaaaatctatcacactaattacgtcaggaactcgcgggctgtgggcgtgatgtggggcaccctgacaatatgttttagtgtgctggtcatggccttgttcatacagccttattggataggggattctgtgaataccccccaagccgggtattttggactcttcagctattgcgtcggaaatgttttatcctccgaactgatctgcaagggcggaccgctcgacttcagctcaatcccaagtagggcctttaagacagccatgtttttcgtggccttggggatgtttctgatcataggctcaataatatgcttctccctgtttttcatctgcaacaccgccacagtgtataagatttgcgcctggatgcagctggccgcagctactggcctgatgatcggatgcctggtgtacccagacgggtgggactccagtgaagtgagaagaatgtgtggagaacagacaggcaaatacacattggggcactgtaccatcaggtgggcctttatgctcgcaatcttgtcaatcggagacgccctgattttgtcctttctggcttttgtgctcggatataggcaggacaaactacttcccgacgattacaaggccgacggcactgaagaagtgtag

SEQ ID NO: 256193 - DNA, 660 bp, Artificial Sequence
  derived and/or modified sequence
atggtgaagctgctgcctgcccaggaggccgccaagatctaccacaccaactacgtgaggaacagcagagctgtgggcgtgatgtggggcaccctgaccatctgcttctctgtgctggtgatggccctcttcatccagccctactggattggagacagcgtgaacaccccccaggccggctacttcggcctcttctcctactgtgtgggcaatgtgctgagcagcgagctgatctgcaagggcggccccctggacttcagcagcatccccagccgggccttcaagacagccatgttctttgtggccctgggcatgttcctgatcatcggcagcatcatctgcttcagcctcttcttcatctgcaacacagccaccgtgtacaagatctgtgcctggatgcagctggccgccgccaccggcctgatgattggctgcctggtgtacccagatggctgggacagcagcgaggtgcggaggatgtgtggggagcagacaggcaagtacaccctgggccactgcaccatccgctgggccttcatgctggccatcctgagcattggagatgccctgatcctgtccttcctggcctttgtgctgggctaccggcaggacaagctgctgcctgatgactacaaggcagatggaacagaggaggtgtag

SEQ ID NO: 256194 - DNA, 2147 bp, Artificial Sequence
  derived and/or modified sequence
gggcgctggccgcggtgctgaaacggcgccctccgcggacggaggagggggcggggctctcgggagccgtgagccgggaagagggagacgggcagggcggcgccagcaggccctggtgggcttgggaggaggcaggagactggagacagcctcggctagagcggacacaggcacctggcaagctttccttgaccaaatcaaggttgtccttgtcctattaagcctcttccccttgccttgaagggacctcacctggtgccctgacctcagcctcctccccaaaccccgctggggagtgacctgcttctaggcctccatccacaaagctacggacttgcagcccacgggaccccagcccagggcctgctgccctcaccatggtgaaattgctgccggcccaggaggcagccaagatctaccataccaactatgtgcggaactcgcgagccgtgggcgtgatgtggggtaccctcaccatctgcttctccgtactggtcatggccctcttcatccagccctactggatcggcgacagcgtcaacacaccgcaggcaggctacttcggccttttctcctactgcgtgggtaacgtgctgtcctccgagctcatctgcaagggcggccccctagacttctcctccatcccctctagagccttcaagactgccatgttctttgtggccttgggcatgttcctcatcattggctccatcatctgcttcagcctgttcttcatctgcaacacggccacagtctataagatctgtgcatggatgcagctggctgcggccacaggcctaatgattggctgcctggtctaccctgatggttgggactcaagtgaggtgcggcgcatgtgtggggagcagacgggcaagtacacgctgggccactgcaccatccgctgggccttcatgctggccatcctcagcattggcgacgccctcatcctctccttcctggccttcgtgttgggctaccggcaggacaagctcctccctgacgactacaaggcagatggaaccgaggaggtgtgaagcagctgaagggtcggtcatctatttcccagacacaggaaaactagggaatcaaattcttcagagataagaacttgttcttccaagtttccttgttcctggctactataggcctgaagcctgaagccttttattataacactaaaactggacagtctcctgagacaagacctcctactgtactctttctggggaagcagaactgcagtgacccacttcaaagatattcagaggctgagcggtgcagggagtgctcagttgctggggatgggatccaagtccatttcttagttccacacagcagcaaatcgcttcaccttcttgaagcctctcctctgtaaagcgagagggctaaatgggtccatctctaggggccttccctcccaggtctgtgtctgatagcatacacacacacatatatatacacacacacacacacacacacacacacacacacacatacatacacacacacatatatatacacacacacacacacacacacacacacactctctctctctctcaaacacacacaaatgcccaaccagctctaagagggcactgaagaggtggctggacatgtgctgggtcatttttagggtgaggtgtagggggtcttttgcttctcccttctcatattttgttttcttattgctgctcagaggggggtaaggaatggaggggccatcagaacttgaatcctttaacatccaccaggaagttttatgaagagtgggtgataggatctaaaatctctgcagacttttttcctcccgggagccaaatatcacatttccttatggtgcccacactgactcaaccagaactggctaccagcttcagaaatgtgttacttatgttcaagtaatttgttataggaatagatgacatttttttttttcaaaaactttggatttggcatatagtcatctatagggggattggttccaggatcccctgcagatgccaaaatacatggatgcccaagtcctcagctaaaaatagcgtagtatttgcatataacctatgcacatcctcctgtatactttaaatcatctctagattacttataatacctaatacaatgtaaatgctatgtaaatactc

SEQ ID NO: 256195 - DNA, 1038 bp, Artificial Sequence
  derived and/or modified sequence
ggggcgctggccgcggtgctgaaacggcgccctccgcggacggaggagggggcggggctctcgggagccgtgagccgggaagagggagacgggcagggcggcgccagcaggccctggtgggcttgggaggaggcaggagactggagacagcctcggctagagcggacacaggcacctggcaagctttccttgaccaaatcaaggttgtccttgtcctattaagcctcttccccttgccttgaagggacctcacctggtgccctgacctcagcctcctccccaaaccccgctggggagtgacctgcttctaggcctccatccacaaagctacggacttgcagcccacgggaccccagcccagggcctgctgccctcaccatggtgaaattgctgccggcccaggaggcagccaagatctaccataccaactatgtgcggaactcgcgagccgtgggcgtgatgtggggtaccctcaccatctgcttctccgtactggtcatggccctcttcatccagccctactggatcggcgacagcgtcaacacaccgcaggcaggctacttcggccttttctcctactgcgtgggtaacgtgctgtcctccgagctcatctgcaagggcggccccctagacttctcctccatcccctctagagccttcaagactgccatgttctttgtggccttgggcatgttcctcatcattggctccatcatctgcttcagcctgttcttcatctgcaacacggccacagtctataagatctgtgcatggatgcagctggctgcggccacaggcctaatgattggctgcctggtctaccctgatggttgggactcaagtgaggtgcggcgcatgtgtggggagcagacgggcaagtacacgctgggccactgcaccatccgctgggccttcatgctggccatcctcagcattggcgacgccctcatcctctccttcctggccttcgtgttgggctaccggcaggacaagctcctccctgacgactacaaggcagatggaaccgaggaggtgtga

SEQ ID NO: 256196 - DNA, 660 bp, Artificial Sequence
  derived and/or modified sequence
atggtgaagctgctgcccgcccaggaggccgccaagatctaccacactaactacgtgagaaactctcgggcggtcggtgttatgtggggcacattaacaatctgttttagtgtccttgtgatggccctgtttattcagccctactggattggtgactctgtgaataccccgcaagccggctactttggtctcttttcatactgtgtagggaatgtactgtcttcggagctcatatgcaagggtgggccgttggacttctcgagcattccatcacgcgcctttaagacagcaatgtttttcgtagctctcggaatgtttctcataataggcagtatcatttgcttctctttattctttatctgcaacactgctaccgtctacaagatatgcgcatggatgcagctcgcagctgcaaccggacttatgataggctgtctcgtgtacccagatggttgggatagctccgaagtgagaagaatgtgcggcgaacagacaggaaaatacactctgggccactgtaccattagatgggcctttatgttagccattctttctattggcgacgccctgatattgtcattcctggcattcgttctgggatatagacaggacaagctgctcccggatgattacaaggccgacgggactgaggaagtgtag

SEQ ID NO: 256197 - DNA, 660 bp, Artificial Sequence
  derived and/or modified sequence
atggtgaagctgctgcccgcccaggaggccgccaagatctaccacaccaactatgtaaggaattctcgggcagtgggcgtcatgtggggtaccctgaccatttgttttagcgtccttgtcatggccctctttattcaaccttattggatcggagactctgtgaatacaccccaggcagggtacttcggcctctttagttactgtgtgggtaatgtgctgtcctccgaactcatttgtaagggcggccctctggatttttcttccattccttcgagagccttcaagactgccatgttctttgtggctctgggtatgttcctcatcattggctcaattatctgtttttctctcttttttatctgcaatacagccactgtgtacaaaatatgtgcttggatgcagctcgcagccgccactggcctcatgattggctgcttggtttaccctgacgggtgggacagttcggaggttcgaagaatgtgtggggagcagaccggcaagtacaccctcggccattgcaccattaggtgggcttttatgctcgctatcttatctataggagacgcgctaatcctgtcctttttggcctttgtcctgggctaccggcaggataaactacttcccgatgactataaggcagatggaaccgaagaagtctag

SEQ ID NO: 256198 - DNA, 660 bp, Artificial Sequence
  derived and/or modified sequence
atggttaaactcctgcctgcacaggaggccgctaagatttaccacaccaactatgtgcggaattcccgcgcagtgggtgttatgtggggtaccctcacaatatgcttcagcgtgctcgtgatggcactctttatccagccgtactggatcggcgacagtgtgaataccccccaagcaggctactttggtttattttcctactgcgtgggcaacgtcttgagctcggaattgatatgcaagggagggcctctggactttagctccattccctctagagccttcaagacagcaatgttcttcgtggccctaggcatgttcctgatcatcggatcaatcatctgtttcagccttttttttatttgtaacaccgcaacagtgtataagatctgcgcctggatgcagcttgccgctgccacaggactcatgattgggtgtttagtctacccagacggctgggacagttcggaggttcgaagaatgtgtggcgagcagacaggcaaatacactctaggccactgcactatcagatgggcctttatgctcgccatattgtctataggcgatgcgcttatcctatcattcttggcatttgttctcggataccgacaggataaacttttgcctgacgattataaagccgacgggactgaagaagtctag

SEQ ID NO: 256199 - DNA, 660 bp, Artificial Sequence
  derived and/or modified sequence
atggttaagttgttgccggcacaggaggccgcaaagatctatcacactaattatgtacgaaacagccgggctgtgggggtaatgtggggaacactgacaatatgcttctctgtgctcgttatggcactgttcattcagccgtactggattggtgacagcgtaaatacaccacaagccggatacttcgggttgtttagctactgtgttggtaacgtcttgtctagtgaactgatttgcaaaggcggaccccttgacttcagtagcattccctctagggcctttaagacagccatgttttttgtggcacttggaatgtttcttattattggatccataatctgcttctccctgtttttcatctgtaatactgctaccgtgtataaaatctgtgcctggatgcaattggctgcagccacgggcctaatgatcggatgcctagtatatcccgacggctgggactcctccgaggtcagaaggatgtgcggggaacaaactgggaagtatacccttggacattgtactatccgatgggccttcatgcttgccattctttctataggcgacgctctcatcctttcttttcttgcctttgtcttagggtacaggcaggacaagctgctgcccgacgactacaaggcggatggcacagaagaagtgtag

SEQ ID NO: 256200 - DNA, 660 bp, Artificial Sequence
  derived and/or modified sequence
atggtgaagctgctgcccgcccaggaggccgccaagatctaccacaccaactacgtgagaaacagcagagccgtgggcgtgatgtggggcaccctgaccatctgcttcagcgtgctggtgatggccctgttcatccagccctactggatcggcgacagcgtgaacaccccccaggccggctacttcggcctgttcagctactgcgtgggcaacgtgctgagcagcgagctgatctgcaagggcggccccctggacttcagcagcatccccagcagagccttcaagaccgccatgttcttcgtggccctgggcatgttcctgatcatcggcagcatcatctgcttcagcctgttcttcatctgcaacaccgccaccgtgtacaagatctgcgcctggatgcagctggccgccgccaccggcctgatgatcggctgcctggtgtaccccgacggctgggacagcagcgaggtgagaagaatgtgcggcgagcagaccggcaagtacaccctgggccactgcaccatcagatgggccttcatgctggccatcctgagcatcggcgacgccctgatcctgagcttcctggccttcgtgctgggctacagacaggacaagctgctgcccgacgactacaaggccgacggcaccgaggaggtgtag

SEQ ID NO: 256201 - protein, 414 aa, Artificial Sequence [sequence omitted]

SEQ ID NO: 256202 - protein, 308 aa, Artificial Sequence
  derived and/or modified sequence
MHSRGREIVVLLNPWSINEAVSSYCTYFIKQDSKSFGIMVSWKGIYFILTLFWGSFFGSIFMLSPFLPLMFVNPSWYRWINNRLVATWLTLPVALLETMFGVKVIITGDAFVPGERSVIIMNHRTRMDWMFLWNCLMRYSYLRLEKICLKASLKGVPGFGWAMQAAAYIFIHRKWKDDKSHFEDMIDYFCDIHEPLQLLIFPEGTDLTENSKSRSNAFAEKNGLQKYEYVLHPRTTGFTFVVDRLREGRRQSEGSKGPLQGELQITAQGNQRGHKQMEKHSMLMDWKNQYREIGHTAQSNLQIQCYSH

SEQ ID NO: 256203 - protein, 376 aa, Artificial Sequence
  derived and/or modified sequence
MVSWKGIYFILTLFWGSFFGSIFMLSPFLPLMFVNPSWYRWINNRLVATWLTLPVALLETMFGVKVIITGDAFVPGERSVIIMNHRTRMDWMFLWNCLMRYSYLRLEKICLKASLKGVPGFGWAMQAAAYIFIHRKWKDDKSHFEDMIDYFCDIHEPLQLLIFPEGTDLTENSKSRSNAFAEKNGLQKYEYVLHPRTTGFTFVVDRLREGKNLDAVHDITVAYPHNIPQSEKHLLQGDFPREIHFHVHRYPIDTLPTSKEDLQLWCHKRWEEKEERLRSFYQGEKNFYFTGQSVIPPCKSELRVLVVKLLSILYWTLFSPAMCLLIYLYSLVKWYFIITIVIFVLQERIFGGLEIIELACYRLLHKQPHLNSKKNE

SEQ ID NO: 256204 - protein, 330 aa, Artificial Sequence
  derived and/or modified sequence
MVSWKGIYFILTLFWGSFFGSIFMLSPFLPLMFVNPSWYRWINNRLVATWLTLPVALLETMFGVKVIITGDAFVPGERSVIIMNHRTRMDWMFLWNCLMRYSYLRLEKICLKASLKGVPGFGWAMQAAAYIFIHRKWKDDKSHFEDMIDYFCDIHEPLQLLIFPEGTDLTENSKSRSNAFAEKNGLQKYEYVLHPRTTGFTFVVDRLREGKNLDAVHDITVAYPHNIPQSEKHLLQGDFPREIHFHVHRYPIDTLPTSKEDLQLWCHKRWEEKEERLRSFYQGEKNFYFTGQSVIPPCKSELRVLVVKLYTVLDPVQPCNVPTHIFVQSC

SEQ ID NO: 256205 - protein, 153 aa, Artificial Sequence
  derived and/or modified sequence
MHSRGREIVVLLNPWSINEAVSSYCTYFIKQDSKSFGIMVSWKGIYFILTLFWGSFFGSIFMLSPFLPLMFVNPSWYRWINNRLVATWLTLPVALLETMFGVKVIITGDAFVPGERSVIIMNHRTRMDWMFLWNCLMRYSYLRLEKICLKASL

SEQ ID NO: 256206 - DNA, 1245 bp, Artificial Sequence
  derived and/or modified sequence
atgcatagtagaggacgggaaatcgtggtgcttctgaacccttggtctattaatgaggcagtcagctcatattgcacatattttattaaacaggacagtaaatccttcggtatcatggtgtcttggaaaggaatttatttcattttgactctgttttgggggagcttttttggctctatctttatgctgtcgcctttcctccccctcatgtttgtaaatccttcctggtatcgttggattaacaacaggctggtcgccacctggctgaccttacccgtggcccttctggagacaatgttcggcgtcaaagtcatcattactggagacgcctttgtgcccggggaacgctccgtcattattatgaatcaccgaaccagaatggattggatgttcctgtggaactgtctgatgaggtacagttacttacgcctggagaagatctgcctgaaggcctctctgaaaggcgtgccaggtttcgggtgggcaatgcaggctgctgcctacatcttcattcacagaaagtggaaagacgataaatcccactttgaggatatgattgactatttttgtgatattcatgagccgctccagctactaatcttccctgaaggaactgacttgaccgagaattcgaaatcgaggtctaacgcttttgccgagaagaatgggctccaaaagtatgagtacgtgcttcaccccaggaccacaggcttcacctttgtcgttgataggctgcgggaaggaaaaaacttggacgctgtgcatgacattaccgtggcctacccacacaatattccgcagagcgagaaacatctgctgcaaggagacttcccgagggagattcatttccacgtacatcgatatcctattgatactctcccaacaagcaaagaggatttgcagctgtggtgtcacaagcggtgggaggaaaaggaggaacgcctgcggtccttttaccagggagagaagaacttttacttcactggtcaaagcgttattccaccgtgcaagtccgaactacgtgtgttggtggtaaaactgctgtctattctgtactggacacttttttctcctgccatgtgtctgctgatctacttatacagcctggtgaagtggtactttatcatcacaatagtgatattcgtgcttcaggagcgcatatttggtggcctagagatcatcgaactggcctgctaccggctgctgcacaagcaaccacatcttaattcgaagaagaatgaatag

SEQ ID NO: 256207 - DNA, 927 bp, Artificial Sequence
  derived and/or modified sequence
atgcactcccggggcagagaaatcgtggtcctgctgaatccgtggtcgatcaatgaagcagtctcctcttactgcacctacttcatcaagcaggactccaagtcattcggaatcatggtttcatggaagggcatatattttattctgaccctcttctgggggtccttttttggcagtatctttatgctgtccccctttcttccactcatgtttgtgaatccctcctggtatcgttggatcaacaataggcttgtcgccacctggcttaccctgccagttgctttattagagacaatgttcggcgtgaaagtcattataaccggtgacgctttcgtacccggcgaaaggtccgtcatcatcatgaaccaccgcacccgtatggactggatgtttctctggaactgcttgatgaggtattcatacctgagactcgagaagatctgcttgaaggcgtccttgaagggggtaccgggtttcggatgggccatgcaggctgcagcgtatatcttcatccatcgcaagtggaaagacgataagagccactttgaggacatgatagactacttctgcgacatccatgaacccctacaactcctaatcttccccgaggggactgatttgacagagaactcaaagagccggagtaatgcttttgccgagaagaatggtctccagaagtatgagtatgtcctccaccctcggaccactggtttcacctttgttgtggataggctcagagaggggcggcgtcagtcagaaggatctaaaggaccgctccagggagagctgcagatcactgcccagggaaaccaacgcggtcacaaacagatggagaaacattcaatgctgatggactggaagaaccagtaccgagagatcggccatacagcccaatccaacttgcagattcagtgttactcacattag

SEQ ID NO: 256208 - DNA, 927 bp, Artificial Sequence
  derived and/or modified sequence
atgcattcccgcggtcgggaaatcgtggttctcctcaacccttggagcatcaacgaggcagtttcctcatactgcacatactttattaaacaggattccaaatcatttggcatcatggtgtcctggaagggaatttatttcatcttgactcttttttgggggagctttttcgggtccattttcatgctgtcccccttccttccccttatgtttgtgaacccatcctggtatcggtggatcaataaccggctagtggccacctggctgaccctgcctgtggcattgcttgagactatgtttggcgttaaagtgatcatcacaggggacgcatttgtgccaggcgagcggtctgtaatcattatgaatcacagaactagaatggactggatgttcctctggaactgtctaatgaggtactcctatctgagacttgaaaagatctgtcttaaggcatctctcaagggggtgcctggatttgggtgggccatgcaggcagccgcctacatctttatccaccggaagtggaaggacgataagtcacacttcgaggatatgattgactacttctgtgacattcatgagcctttgcagttgttgattttccctgagggcaccgatctcaccgaaaactctaagagtcgaagtaacgcctttgcagaaaaaaacggactgcaaaagtacgaatatgtcctccaccctcgcacgactggattcacctttgtggtggaccgcctccgggagggccgacggcagtctgaaggcagtaaggggcctctccagggagagctacagatcaccgcacaggggaaccagcgggggcataagcaaatggaaaaacactcaatgcttatggactggaagaatcagtaccgcgagatcggccacacggcccaatcaaatctgcagattcaatgctatagccactag

SEQ ID NO: 256209 - DNA, 1245 bp, Artificial Sequence
  derived and/or modified sequence
atgcacagccggggccgggagatcgtggtgctgctgaacccctggagcatcaatgaggccgtgtcctcctactgcacctacttcatcaagcaggacagcaagagctttggcatcatggtgtcctggaagggcatctacttcatcctgaccctcttctggggcagcttcttcggcagcatcttcatgctgagccccttcctgcccctgatgtttgtgaaccccagctggtaccgctggatcaacaaccggctggtggccacctggctgaccctgcctgtggccctgctggagaccatgtttggagtgaaggtgatcatcactggagatgcctttgtgcctggagagaggagcgtcatcatcatgaaccacaggaccaggatggactggatgttcctgtggaactgcctgatgagatacagctacctgcggctggagaagatctgcctgaaggccagcctgaagggcgtgcccggcttcggctgggccatgcaggccgccgcctacatcttcatccacaggaagtggaaggatgacaagagccactttgaggacatgattgactacttctgtgacatccacgagcccctgcagctgctgatcttccctgagggcacagacctgacagagaacagcaagagccgcagcaatgcctttgctgagaagaatggcctgcagaagtatgaatatgtgctgcaccccaggaccaccggcttcacctttgtggtggaccggctgcgggagggcaagaacctggatgctgtgcatgacatcaccgtggcctacccccacaacatcccccagagcgagaagcacctgctgcagggcgacttcccccgggagatccacttccacgtgcaccgctaccccatcgacaccctgcccaccagcaaggaggacctgcagctgtggtgccacaagcgctgggaggagaaggaggagcggctgcgctccttctaccagggcgagaagaacttctacttcaccggccagagcgtcatccccccctgcaagtctgagctgcgggtgctggtggtgaagctgctgagcatcctgtactggaccctcttcagccctgccatgtgcctgctgatctacctgtacagcctggtgaagtggtacttcatcatcaccatcgtcatctttgtgctgcaggagcgcatctttggaggcctggagatcatcgagctggcctgctaccgcctgctgcacaagcagccccacctgaacagcaagaagaatgaatag

SEQ ID NO: 256210 - DNA, 927 bp, Artificial Sequence
  derived and/or modified sequence
atgcacagccggggccgggagatcgtggtgctgctgaacccctggagcatcaatgaggccgtgtcctcctactgcacctacttcatcaagcaggacagcaagagctttggcatcatggtgtcctggaagggcatctacttcatcctgaccctcttctggggcagcttcttcggcagcatcttcatgctgagccccttcctgcccctgatgtttgtgaaccccagctggtaccgctggatcaacaaccggctggtggccacctggctgaccctgcctgtggccctgctggagaccatgtttggagtgaaggtgatcatcactggagatgcctttgtgcctggagagaggagcgtcatcatcatgaaccacaggaccaggatggactggatgttcctgtggaactgcctgatgagatacagctacctgcggctggagaagatctgcctgaaggccagcctgaagggcgtgcccggcttcggctgggccatgcaggccgccgcctacatcttcatccacaggaagtggaaggatgacaagagccactttgaggacatgattgactacttctgtgacatccacgagcccctgcagctgctgatcttccctgagggcacagacctgacagagaacagcaagagccgcagcaatgcctttgctgagaagaatggcctgcagaagtatgaatatgtgctgcaccccaggaccaccggcttcacctttgtggtggaccggctgcgggagggccggcggcagagcgagggcagcaagggccccctgcagggcgagctgcagatcacagcccagggcaaccagaggggccacaagcagatggagaagcacagcatgctgatggactggaagaaccagtaccgggagatcggccacacagcccagagcaacctgcagatccagtgctacagccactag

SEQ ID NO: 256211 - DNA, 5060 bp, Artificial Sequence
  derived and/or modified sequence
ggccggacgcctccgcgttacgggatgaattaacggcgggttccgcacggaggttgtgacccctacggagccccagcttgcccacgcaccccactcggcgtcgcgcggcgtgccctgcttgtcacaggtgggaggctggaactatcaggctgaaaaacagagtgggtactctcttctgggaagctggcaacaaatggatgatgtgatatatgcattccaggggaagggaaattgtggtgcttctgaacccatggtcaattaacgaggcagtttctagctactgcacgtacttcataaagcaggactctaaaagctttggaatcatggtgtcatggaaagggatttactttatactgactctgttttggggaagcttttttggaagcattttcatgctgagtccctttttacctttgatgtttgtaaacccatcttggtatcgctggatcaacaaccgccttgtggcaacatggctcaccctacctgtggcattattggagaccatgtttggtgtaaaagtgattataactggggatgcatttgttcctggagaaagaagtgtcattatcatgaaccatcggacaagaatggactggatgttcctgtggaattgcctgatgcgatatagctacctcagattggagaaaatttgcctcaaagcgagtctcaaaggtgttcctggatttggttgggccatgcaggctgctgcctatatcttcattcataggaaatggaaggatgacaagagccatttcgaagacatgattgattacttttgtgatattcacgaaccacttcaactcctcatattcccagaagggactgatctcacagaaaacagcaagtctcgaagtaatgcatttgctgaaaaaaatggacttcagaaatatgaatatgttttacatccaagaactacaggctttacttttgtggtagaccgtctaagagaaggtaagaaccttgatgctgtccatgatatcactgtggcgtatcctcacaacattcctcaatcagagaagcacctcctccaaggagactttcccagggaaatccactttcacgtccaccggtatccaatagacaccctccccacatccaaggaggaccttcaactctggtgccacaaacggtgggaagagaaagaagagaggctgcgttccttctatcaaggggagaagaatttttattttaccggacagagtgtcattccaccttgcaagtctgaactcagggtccttgtggtcaaattgctctctatactgtattggaccctgttcagccctgcaatgtgcctactcatatatttgtacagtcttgttaagtggtattttataatcaccattgtaatctttgtgctgcaagagagaatatttggtggactggagatcatagaacttgcatgttaccgacttttacacaaacagccacatttaaattcaaagaaaaatgagtaagattataaggtttgccatgtgaaaacctagagcatattttggaaatgttctaaacctttctaagctcagatgcatttttgcatgactatgtcgaatatttcttactgccatcattatttgttaaagatattttgcacttaattttgtgggaaaaatattgctacaattttttttaatctctgaatgtaatttcgatactgtgtacatagcagggagtgatcggggtgaaataacttgggccagaatattattaaacaatcatcaggcttttagcgacaaggaacacacacatttttcttaaaggcccaatcctaacagactccccgtaccagaggcagatctggaactcgtcaacaacagcccggatcacatgctgttactggactgcccaggtcacctcattgaggtgagcgctgtccctccaggtactcaggcaggtggtgcccaggctccctcccttggcgtccttcttcctgcgccaaacccatctcatccttaagatcagaaaatggaaccccctttgtcgtgaaaccgatcaagcattttgacaggaagcccttcattattcataacattgtatgctgaccaagacgtcagaagaccacctgtgcccttttctctcgtggaagataaaacctggactcagggagcaaccacaggctctccactttgaaactttagtttgaattttaaaagataggaagtaatacagtttaagttcctttctcacactcagtattgcatgcttagtgctggttttcttacaacattttggcaggtgtagctttttctgttaaaaatggtatacatgaagtcacatacttttttaaaggaacactcagaacattctgtcattccagtcagaaactgtcttttgaaatatttctttacaacctaccaaaaaaggaaggttgttttttctacatgtgcttgggtatctaacatctaccattaaaacaacaaatggcttgcagacagggcagtaatggtttatcctaaattactcaaccccttgtagccttgacaaattttaccttaaaaccaaaatgaaacacaaaaattaatccttaataatgatagcaagtgatctttctttttagttttagccttcctttttcaatagtaatatttaaacccacttttgaccaattgtttgcccaaatattcttgtcatttggagtcagtggaaaatccagcacaccaagcaccagtcttcttctgaggcaaaagaaaagtgttgtcattttcactctgttggagctgcacacttttttttctttttttttttctttttttttttgtcgtgtaagaaggatgctggtcagagctgcagaaaatatgaggcaattaaaagtctttagctgttagcaaacctgttagttttacttctgcattgaaccagcctcagaagctacttactgctttatgtactctttgggcattaatgccttctctgtaattatatctcgtttttgcttgacagtgacctacccaataattgcatcgtgcattgccatgaaaggtaaacacattgtgaactgaacttaccaagcagattctgtgagaaagcactggttgaggctgaacactgttgacacatcatttttattggaagagtattaactggtgcctcttctgaaacacaccaacccatattcctctgctcccccaaagctgtttctgatcctgctgggagcaactaactagttattatgcacatctgctccagacccagctctttaacttcatggttttacagcttgttttttctttttcttttctttttttttttttttttttaaaaaagcacctttttttgttgtttccccttaataaaagaggtttctaatttatgtttctctaagatttcctttggttgtatttagaaacacaaatagttttataatcaggattgcatttgtgctgggtaaaagaggagagctgtgctttctaccccaaagttgttggtaatggagccggtctgcccttcctacaaactcaagaggctcattgttcaaggtgtaacaacatttaattgcatgtcctctaacgctttgaaacctttagagggaagatcctcattttttacaattttgttccttttcatcatagaaaacatgtttaagataaaatacaaactttacctaccccaaattcataaagtacatttagtgctgtatagcactaaaacttagagatacagacactgtacttactttttaagaattagagacagtaactccaaaaataattgtccttttttctttctttctttttttacaataaggctcttgaaaattgtcattacttgtgttttcctatacattcatctgtgtgaaagcctttttcttctttgatttaaaaaaattaactatacagttaatggtttagaacttagaactacttagaattaatgctaaagtgtcaggaagaaattaatttagcttcaataattgtgactggcctcaggaattctcccttccacacctgcccacctcacctcactgcaccgcaccgcaccagagccagagcagctgcttgtctgcagcaggacacagttcctacatacgtttcagttctttcatggtaagctcaatggactttgaattgtttacagtgctgtatgtccaattgttaaatgtaccattctgaacgatgttaaagcaagtgtggtttatttatggcatgaaccatgtaacttgaaatatgaacttacaaggaggggcactcattaggtaacaagttcttacaccaaacttccttgatgaaataagccaaaataatcctaaaattcattagaagaacttgataaaagactcaaataaatgttagaaagagcccgtaattttaggactcctataaaattcttccttgtttgttaatgctattaaaactcagattcaagggaaataccagcttccacttgagtcactttgaaatagttaattcaacagcaccatgttagaaatatattggcagccaagactctgaactctgcagaaacatttgtttcacccagacttcaaactctagccctgactatgatgcccctgtgtgcatttacaataaagactccaacggagggagcctgttggtgttaaattgtttacatttctttatacaaataatgtgctttcagtgccttagttacagctccctttctgtttcttgttccaaggattctgtagtatgtagtgtgtttcttaggtaaagtctctttttgctactgaaagggaaatggtctctaaacactggtcactgtagcaggtaaacactactctaacgtggagaaatgagcttcatgctgaggtagtggttgccttagagctgttatttatgctgtagaaaacgaaaatggttttgctacctgataagcttcagattagatatagccctaaagttatcctgtacctgcattaaattttcattttagaagagaatcttggttttggtaattcatttttttttaagatcattatgtgcaaaacaccaagttttaaaaataactcacagaatggccttagttttcaatgtctgatggtatatttgtgagttgtgttatctgtaatatacatcccagaataaaggagtgaattaaatagttta

SEQ ID NO: 256212 - DNA, 2774 bp, Artificial Sequence
  derived and/or modified sequence
attactagggcgacggccggacgcctccgcgttacgggatgaattaacggcgggttccgcacggaggttgtgacccctacggagccccagcttgcccacgcaccccactcggcgtcgcgcggcgtgccctgcttgtcacaggctgaaaaacagagtgggtactctcttctgggaagctggcaacaaatggatgatgtgatatatgcattccaggggaagggaaattgtggtgcttctgaacccatggtcaattaacgaggcagtttctagctactgcacgtacttcataaagcaggactctaaaagctttggaatcatggtgtcatggaaagggatttactttatactgactctgttttggggaagcttttttggaagcattttcatgctgagtccctttttacctttgatgtttgtaaacccatcttggtatcgctggatcaacaaccgccttgtggcaacatggctcaccctacctgtggcattattggagaccatgtttggtgtaaaagtgattataactggggatgcatttgttcctggagaaagaagtgtcattatcatgaaccatcggacaagaatggactggatgttcctgtggaattgcctgatgcgatatagctacctcagattggagaaaatttgcctcaaagcgagtctcaaaggtgttcctggatttggttgggccatgcaggctgctgcctatatcttcattcataggaaatggaaggatgacaagagccatttcgaagacatgattgattacttttgtgatattcacgaaccacttcaactcctcatattcccagaagggactgatctcacagaaaacagcaagtctcgaagtaatgcatttgctgaaaaaaatggacttcagaaatatgaatatgttttacatccaagaactacaggctttacttttgtggtagaccgtctaagagaaggcaggaggcagagcgagggaagtaaaggaccacttcaaggagaactacaaatcactgctcaaggaaatcagagaggacacaaacaaatggaaaaacactccatgctcatggattggaagaatcaatatcgtgaaattggccatactgcccaaagcaatttacagattcaatgctattcccattaaactgccgttgacattcttcatagaattagaaaaaactcttaaaattcatatggaaccaacaaaaagcccatatagccaagacaatcttaagcaaaaagaacacagctggaggcatcacattacctgacttcaaactatactacagggctacagtaaccaaaatagcatggtactgttacaaaaacagacacatagaccaatggaacagaatagagaactcagaaataagtccgtgcaactacagccatctgatctttgacaaacctgacaaaaacaagcaatggggaaaggattccctatttaataaatggtgctgggagaactggctagccatatgcagaaaactgaaactggaccccttccttacaccttatgcaaaaattaactcaagatggattaaagacttaaatgaaaaacccaaaactataaaaaccctagaaaaaaatctaggcaataccattcaggacataagcatgggcaaagatttcatgatgaagatgacaaaagcaattgcaaccaaagcaaaaattgacaaatgggatctgattaaactaaagggcttctgcacaggaaaagaaactatcatcagagcaaacagacattctacagaaagggagaaaatttttgcaatctatccatctgacaaaggtctaatattcagagtcaacaagaaactaaaacaaatttacaagaaaaaacaaccccattaaaaaagtgggcaagggacatgaacagacacttctcaaaagaagacatttatatggctaataaacttatgaaaaaaagctcaacatcactgatcatcagagaaatgcaaatcaaaaccacaatgagataccatctcacaccagtccaaatggcaattatttaaaagtcatgaaacaacagatgctggcaaggctgtggagcgagaggaatgcttttacattgttggtgggaatgtatattagttcaaccattgtgtagctgggactacaggcgtccactaccacgcccggctaatttttttgtatttttagtagagacagggtttcaccatgttagccaggatggtctcgatctcctgacctcatgatccacccgcctcagcttcccaaagtgctgggattacaggcatgagccaccgcgcccagccaaggaaatatctttatagatgtcttcttgtgtacctgtgtaagaattcctttgggatatacagtcatgcaacacataatgacgttctagttagtggcaaaccacatatatgatggcagtctcataagatcataatggagctagaaaattcctatcacctggtgacatcatcacatgtttgtgatgatgctgatgtaaaccactatgctaccagttgtgtaaaacagtagcacataaaattatataccgtaatgataatgactatgttactgatttacatagttactgtactatactttttattgttacttgagtgtattccttctgcttatagtaaaagcagtaaaacagccccaggcaggtccttcaggaggtattccagaagaaggcattgctgtcataggacatgacagctccatgcttgttattacctctgaagaccttgcagtgagacaagatgtggaggtgaagacagtgatattgatgatcctgaccctgtgtaggcctaggc

SEQ ID NO: 256213 - DNA, 1136 bp, Artificial Sequence
  derived and/or modified sequence
ggccggacgcctccgcgttacgggatgaattaacggcgggttccgcacggaggttgtgacccctacggagccccagcttgcccacgcaccccactcggcgtcgcgcggcgtgccctgcttgtcacaggtgggaggctggaactatcaggctgaaaaacagagtgggtactctcttctgggaagctggcaacaaatggatgatgtgatatatgcattccaggggaagggaaattgtggtgcttctgaacccatggtcaattaacgaggcagtttctagctactgcacgtacttcataaagcaggactctaaaagctttggaatcatggtgtcatggaaagggatttactttatactgactctgttttggggaagcttttttggaagcattttcatgctgagtccctttttacctttgatgtttgtaaacccatcttggtatcgctggatcaacaaccgccttgtggcaacatggctcaccctacctgtggcattattggagaccatgtttggtgtaaaagtgattataactggggatgcatttgttcctggagaaagaagtgtcattatcatgaaccatcggacaagaatggactggatgttcctgtggaattgcctgatgcgatatagctacctcagattggagaaaatttgcctcaaagcgagtctcaaaggtgttcctggatttggttgggccatgcaggctgctgcctatatcttcattcataggaaatggaaggatgacaagagccatttcgaagacatgattgattacttttgtgatattcacgaaccacttcaactcctcatattcccagaagggactgatctcacagaaaacagcaagtctcgaagtaatgcatttgctgaaaaaaatggacttcagaaatatgaatatgttttacatccaagaactacaggctttacttttgtggtagaccgtctaagagaaggcaggaggcagagcgagggaagtaaaggaccacttcaaggagaactacaaatcactgctcaaggaaatcagagaggacacaaacaaatggaaaaacactccatgctcatggattggaagaatcaatatcgtgaaattggccatactgcccaaagcaatttacagattcaatgctattcccattaa

SEQ ID NO: 256214 - DNA, 4883 bp, Artificial Sequence
  derived and/or modified sequence
gggacgcattactagggcgacggccggacgcctccgcgttacgggatgaattaacggcgggttccgcacggaggttgtgacccctacggagccccagcttgcccacgcaccccactcggcgtcgcgcggcgtgccctgcttgtcacagaatcatggtgtcatggaaagggatttactttatactgactctgttttggggaagcttttttggaagcattttcatgctgagtccctttttacctttgatgtttgtaaacccatcttggtatcgctggatcaacaaccgccttgtggcaacatggctcaccctacctgtggcattattggagaccatgtttggtgtaaaagtgattataactggggatgcatttgttcctggagaaagaagtgtcattatcatgaaccatcggacaagaatggactggatgttcctgtggaattgcctgatgcgatatagctacctcagattggagaaaatttgcctcaaagcgagtctcaaaggtgttcctggatttggttgggccatgcaggctgctgcctatatcttcattcataggaaatggaaggatgacaagagccatttcgaagacatgattgattacttttgtgatattcacgaaccacttcaactcctcatattcccagaagggactgatctcacagaaaacagcaagtctcgaagtaatgcatttgctgaaaaaaatggacttcagaaatatgaatatgttttacatccaagaactacaggctttacttttgtggtagaccgtctaagagaaggtaagaaccttgatgctgtccatgatatcactgtggcgtatcctcacaacattcctcaatcagagaagcacctcctccaaggagactttcccagggaaatccactttcacgtccaccggtatccaatagacaccctccccacatccaaggaggaccttcaactctggtgccacaaacggtgggaagagaaagaagagaggctgcgttccttctatcaaggggagaagaatttttattttaccggacagagtgtcattccaccttgcaagtctgaactcagggtccttgtggtcaaactctatactgtattggaccctgttcagccctgcaatgtgcctactcatatatttgtacagtcttgttaagtggtattttataatcaccattgtaatctttgtgctgcaagagagaatatttggtggactggagatcatagaacttgcatgttaccgacttttacacaaacagccacatttaaattcaaagaaaaatgagtaagattataaggtttgccatgtgaaaacctagagcatattttggaaatgttctaaacctttctaagctcagatgcatttttgcatgactatgtcgaatatttcttactgccatcattatttgttaaagatattttgcacttaattttgtgggaaaaatattgctacaattttttttaatctctgaatgtaatttcgatactgtgtacatagcagggagtgatcggggtgaaataacttgggccagaatattattaaacaatcatcaggcttttagcgacaaggaacacacacatttttcttaaaggcccaatcctaacagactccccgtaccagaggcagatctggaactcgtcaacaacagcccggatcacatgctgttactggactgcccaggtcacctcattgaggtgagcgctgtccctccaggtactcaggcaggtggtgcccaggctccctcccttggcgtccttcttcctgcgccaaacccatctcatccttaagatcagaaaatggaaccccctttgtcgtgaaaccgatcaagcattttgacaggaagcccttcattattcataacattgtatgctgaccaagacgtcagaagaccacctgtgcccttttctctcgtggaagataaaacctggactcagggagcaaccacaggctctccactttgaaactttagtttgaattttaaaagataggaagtaatacagtttaagttcctttctcacactcagtattgcatgcttagtgctggttttcttacaacattttggcaggtgtagctttttctgttaaaaatggtatacatgaagtcacatacttttttaaaggaacactcagaacattctgtcattccagtcagaaactgtcttttgaaatatttctttacaacctaccaaaaaaggaaggttgttttttctacatgtgcttgggtatctaacatctaccattaaaacaacaaatggcttgcagacagggcagtaatggtttatcctaaattactcaaccccttgtagccttgacaaattttaccttaaaaccaaaatgaaacacaaaaattaatccttaataatgatagcaagtgatctttctttttagttttagccttcctttttcaatagtaatatttaaacccacttttgaccaattgtttgcccaaatattcttgtcatttggagtcagtggaaaatccagcacaccaagcaccagtcttcttctgaggcaaaagaaaagtgttgtcattttcactctgttggagctgcacacttttttttctttttttttttctttttttttttgtcgtgtaagaaggatgctggtcagagctgcagaaaatatgaggcaattaaaagtctttagctgttagcaaacctgttagttttacttctgcattgaaccagcctcagaagctacttactgctttatgtactctttgggcattaatgccttctctgtaattatatctcgtttttgcttgacagtgacctacccaataattgcatcgtgcattgccatgaaaggtaaacacattgtgaactgaacttaccaagcagattctgtgagaaagcactggttgaggctgaacactgttgacacatcatttttattggaagagtattaactggtgcctcttctgaaacacaccaacccatattcctctgctcccccaaagctgtttctgatcctgctgggagcaactaactagttattatgcacatctgctccagacccagctctttaacttcatggttttacagcttgttttttctttttcttttctttttttttttttttttttaaaaaagcacctttttttgttgtttccccttaataaaagaggtttctaatttatgtttctctaagatttcctttggttgtatttagaaacacaaatagttttataatcaggattgcatttgtgctgggtaaaagaggagagctgtgctttctaccccaaagttgttggtaatggagccggtctgcccttcctacaaactcaagaggctcattgttcaaggtgtaacaacatttaattgcatgtcctctaacgctttgaaacctttagagggaagatcctcattttttacaattttgttccttttcatcatagaaaacatgtttaagataaaatacaaactttacctaccccaaattcataaagtacatttagtgctgtatagcactaaaacttagagatacagacactgtacttactttttaagaattagagacagtaactccaaaaataattgtccttttttctttctttctttttttacaataaggctcttgaaaattgtcattacttgtgttttcctatacattcatctgtgtgaaagcctttttcttctttgatttaaaaaaattaactatacagttaatggtttagaacttagaactacttagaattaatgctaaagtgtcaggaagaaattaatttagcttcaataattgtgactggcctcaggaattctcccttccacacctgcccacctcacctcactgcaccgcaccgcaccagagccagagcagctgcttgtctgcagcaggacacagttcctacatacgtttcagttctttcatggtaagctcaatggactttgaattgtttacagtgctgtatgtccaattgttaaatgtaccattctgaacgatgttaaagcaagtgtggtttatttatggcatgaaccatgtaacttgaaatatgaacttacaaggaggggcactcattaggtaacaagttcttacaccaaacttccttgatgaaataagccaaaataatcctaaaattcattagaagaacttgataaaagactcaaataaatgttagaaagagcccgtaattttaggactcctataaaattcttccttgtttgttaatgctattaaaactcagattcaagggaaataccagcttccacttgagtcactttgaaatagttaattcaacagcaccatgttagaaatatattggcagccaagactctgaactctgcagaaacatttgtttcacccagacttcaaactctagccctgactatgatgcccctgtgtgcatttacaataaagactccaacggagggagcctgttggtgttaaattgtttacatttctttatacaaataatgtgctttcagtgccttagttacagctccctttctgtttcttgttccaaggattctgtagtatgtagtgtgtttcttaggtaaagtctctttttgctactgaaagggaaatggtctctaaacactggtcactgtagcaggtaaacactactctaacgtggagaaatgagcttcatgctgaggtagtggttgccttagagctgttatttatgctgtagaaaacgaaaatggttttgctacctgataagcttcagattagatatagccctaaagttatcctgtacctgcattaaattttcattttagaagagaatcttggttttggtaattcatttttttttaagatcattatgtgcaaaacaccaagttttaaaaataactcacagaatggccttagttttcaatgtctgatggtatatttgtgagttgtgttatctgtaatatacatcccagaataaaggagtgaattaaatagttt

SEQ ID NO: 256215 - DNA, 1245 bp, Artificial Sequence
  derived and/or modified sequence
atgcacagccggggccgggagatcgtggtgctgctgaacccctggtctatcaacgaagccgtatcttcctattgcacgtattttattaagcaggacagcaagagcttcggaattatggtttcatggaaggggatctattttatactgactttgttctgggggtcattctttgggtcgatcttcatgctgtcgccgtttctgcctctcatgttcgtgaatccgtcctggtataggtggatcaataatagattggtcgcaacttggttgaccctcccggtggccctcctggaaacaatgttcggtgtcaaggtaatcatcacaggagatgcttttgtccctggcgagcgaagcgtgataatcatgaatcacagaactcgcatggactggatgtttctgtggaattgtctgatgagatattcctacctgcgcctggagaaaatctgtttgaaagcaagccttaagggcgtgcccgggttcggctgggctatgcaggccgcagcgtacattttcatccacagaaaatggaaggatgacaagtcacacttcgaagacatgattgactacttttgtgacatccacgagcccctccaacttctgatcttcccagagggcacggatcttactgagaactcaaaatccagatcaaacgcatttgcagagaagaacggcctacaaaagtatgaatacgtgctgcatcctagaacaactgggtttaccttcgtggtcgatagactgagggagggtaaaaatttggacgctgtgcatgatattaccgtggcgtatcctcacaacatccctcaaagtgagaaacacctcctgcaaggcgactttcccagagaaatccatttccacgtgcaccgctatcccatcgacacgcttccgacatccaaagaagacctgcaactctggtgtcacaaaaggtgggaggagaaggaggagcgactccgctcgttctatcaaggagagaagaacttctactttacaggacagagcgtgatcccaccatgcaagtccgagctgcgcgttctggtagtaaaactcctgtccatcctgtattggactctgttctcccctgctatgtgcctgctcatatatttgtacagtctcgtgaaatggtatttcatcataacaattgtgatttttgtgcttcaagagcgaatcttcgggggactagaaatcatagagttggcttgttatagactcctgcataagcagccccacctgaactccaagaagaacgagtag

SEQ ID NO: 256216 - DNA, 927 bp, Artificial Sequence
  derived and/or modified sequence
atgcacagccggggccgggagatcgtggtgctgctgaacccctggtccattaatgaggcagtctcttcttactgcacatattttattaagcaggactctaagtccttcggcatcatggtgagctggaagggaatttatttcatcctcaccctattttggggatccttcttcggctccatctttatgttgtccccattcttaccgctgatgtttgttaatcctagctggtacagatggatcaacaacaggctggtggcaacgtggctgacactgcccgtggcgctgctcgagaccatgttcggggtcaaggtcatcatcacaggtgatgctttcgtgcctggagaacgaagtgttattataatgaaccacaggacgcgcatggattggatgtttttgtggaactgcctgatgagatacagttacctgcgtttggaaaaaatctgtctgaaggcctctctaaagggagttccaggttttggctgggccatgcaggccgccgcctacattttcatacaccggaaatggaaggacgacaaaagtcactttgaagatatgatcgattatttctgcgacattcatgagccattacagctgctcattttccccgaagggacggatctgactgaaaatagcaagtcaaggtctaacgcctttgccgagaagaacggccttcaaaaatacgagtacgtactccacccacgcaccactggctttacattcgtcgtggatcggctcagggagggccgcaggcagtctgagggcagtaagggtcccctgcagggcgagcttcagattactgcacaggggaaccagcgcggccataaacaaatggaaaagcactctatgctgatggattggaagaaccagtaccgtgagataggacatacggcccagagtaacctacagattcagtgctatagtcactag

SEQ ID NO: 256217 - DNA, 927 bp, Artificial Sequence
  derived and/or modified sequence
atgcacagccggggccgggagatcgtggtgctgctgaacccctggtctatcaacgaggctgtctcctcttactgtacatacttcattaaacaagattctaagagctttgggatcatggttagctggaaagggatctactttatacttacactcttctggggttcgttcttcgggagcatcttcatgcttagtccgtttctgccactgatgttcgtcaacccatcatggtaccggtggattaacaaccgtctggtcgccacatggctcacacttccagttgccctcctagagaccatgttcggtgtgaaagtcatcattacaggggacgcattcgtacccggcgaacgatctgtgatcattatgaatcatcggacccggatggactggatgttcctgtggaattgcctgatgcggtattcttacttaaggctggaaaagatttgcctgaaggcctccctgaaaggtgtgcctgggttcgggtgggcaatgcaagccgccgcatacatttttatccacaggaagtggaaagatgataaaagtcattttgaggacatgattgactatttctgcgacatacacgagcccctccagctcctcatttttcctgaaggtacggacctcaccgagaacagcaagtctagaagtaatgctttcgcagaaaagaacggcctgcagaaatacgagtacgtgcttcatcccagaacaaccgggtttaccttcgtggtggatcggctgagagagggaagacgccagtcagaggggtctaaaggtccacttcagggcgaactgcagatcacggcccagggtaatcagcggggacacaagcaaatggaaaaacatagcatgctgatggactggaagaaccagtacagagaaattgggcacaccgcccagtccaacctgcagatccagtgttactcgcactag

SEQ ID NO: 256218 - DNA, 1245 bp, Artificial Sequence
  derived and/or modified sequence
atgcattcccgaggcagagagattgttgtcctactcaatccatggtccatcaacgaagctgtgtcatcttactgtacttacttcattaaacaagacagcaagtcgtttggaattatggtgtcgtggaaaggtatctacttcattttgactctcttctggggctcctttttcgggtcgatctttatgttgagcccttttcttccactcatgtttgtcaacccatcttggtaccgctggatcaacaataggctggtcgccacatggctaacactgcccgtggctttgcttgagaccatgttcggggtgaaggtgattatcaccggagacgcctttgtgcccggtgagcggagcgttatcataatgaatcaccggacaagaatggactggatgttcctgtggaattgccttatgaggtacagctatctgaggcttgagaagatctgcttgaaggccagtctcaagggggtaccgggttttggttgggccatgcaggccgctgcttacatcttcattcataggaaatggaaggatgataaaagtcacttcgaggacatgattgactacttctgcgacatccacgagccccttcagctgctgatttttcctgaaggcactgacctgaccgaaaacagtaagagtcgctcaaatgccttcgccgagaagaatgggttgcaaaaatatgagtacgtcctgcatccacggacaaccgggttcacgtttgtcgtggaccggcttcgcgaggggaagaaccttgacgccgtgcatgacatcactgtggcctacccacacaatattcctcagagcgagaaacacctgctacagggggatttccctagggagattcacttccatgtgcaccgttatcccattgacacactcccgacctcaaaagaggatctacaactttggtgtcataaacgatgggaggagaaagaagaacgactcaggagtttctaccaaggcgagaaaaatttctattttaccgggcagtcagttatacccccatgtaagagtgagttgcgcgttctcgtagtcaagctgttgagcatattgtactggacactattttctcctgccatgtgtttgttgatctacctgtatagcctcgtgaagtggtactttataataaccatcgtcatctttgtgctgcaggagaggatcttcgggggactcgagatcatcgagctggcctgctatagattgctacataagcagcctcaccttaatagcaaaaagaatgaatag

SEQ ID NO: 256219 - DNA, 927 bp, Artificial Sequence
  derived and/or modified sequence
atgcacagtagaggcagggaaattgtcgtcctgctcaacccgtggtccataaacgaagctgttagctcttattgtacctatttcatcaaacaagactccaaaagttttggcataatggtcagttggaaaggtatctacttcattctgactctcttctgggggtccttctttgggtcaatctttatgctaagcccatttctaccactgatgtttgtgaatccttcctggtaccgatggatcaacaatcggctcgttgcaacctggttgactttgcccgtggccctacttgagaccatgttcggcgtgaaagtcattataacaggcgatgcctttgtcccgggagagagaagtgtgatcattatgaaccacagaacaagaatggactggatgttcttatggaattgtcttatgcgctactcctacttacggctggagaagatttgtctcaaggcaagcctgaagggggtcccaggctttggatgggccatgcaggccgctgcttacattttcatccacaggaaatggaaagatgataagtcacacttcgaagacatgattgattacttttgcgacatccatgaaccgctgcaactcctcatcttccctgagggcacggacctcactgagaactcaaagtccaggtctaatgcatttgccgagaagaacggactgcaaaagtatgaatatgtgcttcatccccgaaccacaggattcacattcgttgtggaccgtcttagagaaggtcggaggcaatcagaggggagtaagggccctttacagggggaactgcagatcaccgcacaaggaaatcagcggggacataagcagatggagaagcattcaatgttgatggactggaagaaccaatatcgagagataggtcatactgcacagagtaacctgcagatacagtgctattcgcactag

SEQ ID NO: 256220 - DNA, 927 bp, Artificial Sequence
  derived and/or modified sequence
atgcattccagaggccgagaaatagtcgtgctgcttaatccctggagcatcaatgaggcagtgtccagctattgcacgtatttcattaagcaggatagcaaatctttcggtatcatggtttcctggaagggtatctacttcatactgactcttttctggggatcttttttcggctccatattcatgctgagtccctttctgcctctgatgttcgtgaacccaagctggtacagatggatcaataaccgcctggtggccacctggttgaccctgcccgtcgccctgcttgagaccatgttcggcgtcaaggtgataattaccggagatgccttcgtgcccggtgagcggagcgtgatcatcatgaaccaccggaccaggatggactggatgttcctgtggaattgcctgatgcgttacagctacctccgccttgaaaaaatatgcctgaaagctagcctgaagggggtgccaggcttcgggtgggccatgcaggccgctgcgtatattttcatccatcgcaagtggaaggacgacaagtcacactttgaggatatgatagactatttctgtgatatccacgaacctctgcaactgctcatcttccctgaagggactgatctcacagagaacagtaagtcacggtcaaacgcatttgctgagaaaaacggactgcagaagtatgagtacgttctgcaccctcgaaccaccggtttcacatttgttgtcgacaggttgcgcgagggccgaaggcaaagtgagggctcaaaagggccacttcagggagaactgcagatcacagcacagggaaaccaacgcggtcataaacagatggaaaagcattccatgctgatggattggaagaaccagtatagggaaatcggacacaccgcacagagcaatctacagatccagtgctactctcactag

SEQ ID NO: 256221 - DNA, 1245 bp, Artificial Sequence
  derived and/or modified sequence
atgcacagcagaggcagagagatcgtggtgctgctgaacccctggagcatcaacgaggccgtgagcagctactgcacctacttcatcaagcaggacagcaagagcttcggcatcatggtgagctggaagggcatctacttcatcctgaccctgttctggggcagcttcttcggcagcatcttcatgctgagccccttcctgcccctgatgttcgtgaaccccagctggtacagatggatcaacaacagactggtggccacctggctgaccctgcccgtggccctgctggagaccatgttcggcgtgaaggtgatcatcaccggcgacgccttcgtgcccggcgagagaagcgtgatcatcatgaaccacagaaccagaatggactggatgttcctgtggaactgcctgatgagatacagctacctgagactggagaagatctgcctgaaggccagcctgaagggcgtgcccggcttcggctgggccatgcaggccgccgcctacatcttcatccacagaaagtggaaggacgacaagagccacttcgaggacatgatcgactacttctgcgacatccacgagcccctgcagctgctgatcttccccgagggcaccgacctgaccgagaacagcaagagcagaagcaacgccttcgccgagaagaacggcctgcagaagtacgagtacgtgctgcaccccagaaccaccggcttcaccttcgtggtggacagactgagagagggcaagaacctggacgccgtgcacgacatcaccgtggcctacccccacaacatcccccagagcgagaagcacctgctgcagggcgacttccccagagagatccacttccacgtgcacagataccccatcgacaccctgcccaccagcaaggaggacctgcagctgtggtgccacaagagatgggaggagaaggaggagagactgagaagcttctaccagggcgagaagaacttctacttcaccggccagagcgtgatccccccctgcaagagcgagctgagagtgctggtggtgaagctgctgagcatcctgtactggaccctgttcagccccgccatgtgcctgctgatctacctgtacagcctggtgaagtggtacttcatcatcaccatcgtgatcttcgtgctgcaggagagaatcttcggcggcctggagatcatcgagctggcctgctacagactgctgcacaagcagccccacctgaacagcaagaagaacgagtag

SEQ ID NO: 256222 - DNA, 927 bp, Artificial Sequence
  derived and/or modified sequence
atgcacagcagaggcagagagatcgtggtgctgctgaacccctggagcatcaacgaggccgtgagcagctactgcacctacttcatcaagcaggacagcaagagcttcggcatcatggtgagctggaagggcatctacttcatcctgaccctgttctggggcagcttcttcggcagcatcttcatgctgagccccttcctgcccctgatgttcgtgaaccccagctggtacagatggatcaacaacagactggtggccacctggctgaccctgcccgtggccctgctggagaccatgttcggcgtgaaggtgatcatcaccggcgacgccttcgtgcccggcgagagaagcgtgatcatcatgaaccacagaaccagaatggactggatgttcctgtggaactgcctgatgagatacagctacctgagactggagaagatctgcctgaaggccagcctgaagggcgtgcccggcttcggctgggccatgcaggccgccgcctacatcttcatccacagaaagtggaaggacgacaagagccacttcgaggacatgatcgactacttctgcgacatccacgagcccctgcagctgctgatcttccccgagggcaccgacctgaccgagaacagcaagagcagaagcaacgccttcgccgagaagaacggcctgcagaagtacgagtacgtgctgcaccccagaaccaccggcttcaccttcgtggtggacagactgagagagggcagaagacagagcgagggcagcaagggccccctgcagggcgagctgcagatcaccgcccagggcaaccagagaggccacaagcagatggagaagcacagcatgctgatggactggaagaaccagtacagagagatcggccacaccgcccagagcaacctgcagatccagtgctacagccactag

SEQ ID NO: 256223 - protein, 1499 aa, Artificial Sequence
  derived and/or modified sequence
MRILANKTRLPHPRRREAPGSPPLSPRGHCPPAPAKPMHPENKLTNHGKTGNGGAQSQHQNVNQGPTCNVGSKGVGAGNHGAKANQISPSNSSLKNPQAGVPPFSSLKGKVKRDRSVSVDSGEQREAGTPSLDSEAKEVAPRSKRRCVLERKQPYSGDEWCSGPDSEEDDKPIGATHNCNVADPAMAAPQLGPGQTTQLPLSESSVPGAPHGPPPGLRPDAPGGGGGGGGVPGKPPSQFVYVFTTHLANTAAEAVLQGRADSILAYHQQNVPRAKLDQAPKVPPTPEPLPLSTPSAGTPQSQPPPLPPPPPPAPGSAPPALPPEGPPEDSSQDLAPNSVGAASTGGGTGGTHPNTPTATTANNPLPPGGDPSSAPGPALLGEAAAPGNGQRSLVGSEGLSKEQLEHRERSLQTLRDIERLLLRSGETEPFLKGPPGGAGEGGPPAQAPPPPQQPPTAPPSGLKKYEEPLQSMISQTQSLGGPPLEHEVPGHPPGGDMGQQMNMMIQRLGQDSLTPEQVAWRKLQEEYYEEKRRKEEQIGLHGSRPLQDMMGMGGMMVRGPPPPYHSKPGDQWPPGMGAQLRGPMDVQDPMQLRGGPPFPGPRFPGNQIQRVPGFGGMQSMPMEVPMNAMQRPVRPGMGWTEDLPPMGGPSNFAQNTMPYPGGQGEAERFMTPRVREELLRHQLLEKRSMGMQRPLGMAGSGMGQSMEMERMMQAHRQMDPAMFPGQMAGGEGLAGTPMGMEFGGGRGLLSPPMGQSGLREVDPPMGPGNLNMNMNVNMNMNMNLNVQMTPQQQMLMSQKMRGPGDLMGPQGLSPEEMARVRAQNSSGVMGGPQKMLMPSQFPNQGQQGFSGGQGPYQAMSQDMGNTQDMFSPDQSSMPMSNVGTTRLSHMPLPPASNPPGTVHSAPNRGLGRRPSDLTISINQMGSPGMGHLKSPTLSQVHSPLVTSPSANLKSPQTPSQMVPLPSANPPGPLKSPQVLGSSLSVRSPTGSPSRLKSPSMAVPSPGWVASPKTAMPSPGVSQNKQPPLNMNSSTTLSNMEQGTLPPSGPRSSSSAPPANPPSGLMNPSLPFTSSPDPTPSQNPLSLMMTQMSKYAMPSSTPLYHNAIKTIATSDDELLPDRPLLPPPPPPQGSGPGISNSQPSQMHLNSAAAQSPMGMNLPGQQPLSHEPPPAMLPSPTPLGSNIPLHPNAQGTGGPPQNSMMMAPGGPDSLNAPCGPVPSSSQMMPFPPRLQQPHGAMAPTGGGGGGPGLQQHYPSGMALPPEDLPNQPPGPMPPQQHLMGKAMAGRMGDAYPPGVLPGVASVLNDPELSEVIRPTPTGIPEFDLSRIIPSEKPSSTLQYFPKSENQPPKAQPPNLHLMNLQNMMAEQTPSRPPNLPGQQGVQRGLNMSMCHPGQMSLLGRTGVPPQQGMVPHGLHQGVMSPPQGLMTQQNFMLMKQRGVGGEVYSQPPHMLSPQGSLMGPPPQQNLMVSHPLRQRSVSLDSQMGYLPAPGGMANLPF

SEQ ID NO: 256224 - protein, 1395 aa, Artificial Sequence
  derived and/or modified sequence
MRILANKTRLPHPRRREAPGSPPLSPRGHCPPAPAKPMHPENKLTNHGKTGNGGAQSQHQNVNQGPTCNVGSKGVGAGNHGAKANQISPSNSSLKNPQAGVPPFSSLKGKVKRDRSVSVDSGEQREAGTPSLDSEAKEVAPRSKRRCVLERKQPYSGDEWCSGPDSEEDDKPIGATHNCNVADPAMAAPQLGPGQTTQLPLSESSVPGAPHGPPPGLRPDAPGGGGGGGGVPGKPPSQFVYVFTTHLANTAAEAVLQGRADSILAYHQQNVPRAKLDQAPKVPPTPEPLPLSTPSAGTPQSQPPPLPPPPPPAPGSAPPALPPEGPPEDSSQDLAPNSVGAASTGGGTGGTHPNTPTATTANNPLPPGGDPSSAPGPALLGEAAAPGNGQRSLVGSEGLSKEQLEHRERSLQTLRDIERLLLRSGETEPFLKGPPGGAGEGGPPAQAPPPPQQPPTAPPSGLKKYEEPLQSMISQTQSLGGPPLEHEVPGHPPGGDMGQQMNMMIQRLGQDSLTPEQVAWRKLQEEYYEEKRRKEEQIGLHGSRPLQDMMGMGGMMVRGPPPPYHSKPGDQWPPGMGAQLRGPMDVQDPMQLRGGPPFPGPRFPGNQIQRVPGFGGMQSMPMEVPMNAMQRPVRPGMGWTEDLPPMGGPSNFAQNTMPYPGGQGEAERFMTPRVREELLRHQLLEKRSMGMQRPLGMAGSGMGQSMEMERMMQAHRQMDPAMFPGQMAGGEGLAGTPMGMEFGGGRGLLSPPMGQSGLREVDPPMGPGNLNMNMNVNMNMNMNLNVQMTPQQQMLMSQKMRGPGDLMGPQGLSPEEMARVRAQNSSGVMGGPQKMLMPSQFPNQGQQGFSGGQGPYQAMSQDMGNTQDMFSPDQSSMPMSNVGTTRLSHMPLPPASNPPGTVHSAPNRGLGRRPSDLTISINQMGSPGMGHLKSPTLSQVHSPLVTSPSANLKSPQTPSQMVPLPSANPPGPLKSPQVLGSSLSVRSPTGSPSRLKSPSMAVPSPGWVASPKTAMPSPGVSQNKQPPLNMNSSTTLSNMEQGTLPPSGPRSSSSAPPANPPSGLMNPSLPFTSSPDPTPSQNPLSLMMTQMSKYAMPSSTPLYHNAIKTIATSDDELLPDRPLLPPPPPPQGSGPGISNSQPSQMHLNSAAAQSPMGMNLPGQQPLSHEPPPAMLPSPTPLGSNIPLHPNAQGTGGPPQNSMMMAPGGPDSLNAPCGPVPSSSQMMPFPPRLQQPHGAMAPTGGGGGGPGLQQHYPSGMALPPEDLPNQPPGPMPPQQHLMGKAMAGRMGDAYPPGVLPGVASVLNDPELSEVIRPTPTGIPEFDLSRIIPSEFLRTRPFSFCLYLLRILSLLMWLTPLPPLPAGGWPGGQVPAGAVNRALRFCAGLCVCCISVF

SEQ ID NO: 256225 - protein, 1454 aa, Artificial Sequence
  derived and/or modified sequence
MRILANKTRLPHPRRREAPGSPPLSPRGHCPPAPAKPMHPENKLTNHGKTGNGGAQSQHQNVNQGPTCNVGSKGVGAGNHGAKANQISPSNSSLKNPQAGVPPFSSLKGKVKRDRSVSVDSGEQREAGTPSLDSEAKEVAPRSKRRCVLERKQPYSGDEWCSGPDSEEDDKPIGATHNCNVADPAMAAPQLGPGQTTQLPLSESSVPGAPHGPPPGLRPDAPGGGGGGGGVPGKPPSQFVYVFTTHLANTAAEAVLQGRADSILAYHQQNVPRAKLDQAPKVPPTPEPLPLSTPSAGTPQSQPPPLPPPPPPAPGSAPPALPPEGPPEDSSQDLAPNSVGAASTGGGTGGTHPNTPTATTANNPLPPGGDPSSAPGPALLGEAAAPGNGQRSLVGSEGLSKEQLEHRERSLQTLRDIERLLLRSGETEPFLKGPPGGAGEGGPPAQAPPPPQQPPTAPPSGLKKYEEPLQSMISQTQSLGGPPLEHEVPGHPPGGDMGQQMNMMIQRLGQDSLTPEQVAWRKLQEEYYEEKRRKEEQIGLHGSRPLQDMMGMGGMMVRGPPPPYHSKPGDQWPPGMGAQLRGPMDVQDPMQLRGGPPFPGPRFPGNQIQRVPGFGGMQSMPMEVPMNAMQRPVRPGMGWTEDLPPMGGPSNFAQNTMPYPGGQGEAERFMTPRVREELLRHQLLEKRSMGMQRPLGMAGSGMGQSMEMERMMQAHRQMDPAMFPGQMAGGEGLAGTPMGMEFGGGRGLLSPPMGQSGLREVDPPMGPGNLNMNMNVNMNMNMNLNVQMTPQQQMLMSQKMRGPGDLMGPQGLSPEEMARVRAQNSSGVMGGPQKMLMPSQFPNQGQQGFSGGQGPYQAMSQDMGNTQDMFSPDQSSMPMSNVGTTRLSHMPLPPASNPPGTVHSAPNRGLGRRPSDLTISINQMGSPGMGHLKSPTLSQVHSPLVTSPSANLKSPQTPSQMVPLPSANPPGPLKSPQVLGSSLSVRSPTGSPSRLKSPSMAVPSPGWVASPKTAMPSPGVSQNKQPPLNMNSSTTLSNMEQGTLPPSGPRSSSSAPPANPPSGLMNPSLPFTSSPDPTPSQNPLSLMMTQMSKYAMPSSTPLYHNAIKTIATSDDELLPDRPLLPPPPPPQGSGPGISNSQPSQMHLNSAAAQSPMGMNLPGQQPLSHEPPPAMLPSPTPLGSNIPLHPNAQGTGGPPQNSMMMAPGGPDSLNAPCGPVPSSSQMMPFPPRLQQPHGAMMAGRMGDAYPPGVLPGVASVLNDPELSEVIRPTPTGIPEFDLSRIIPSEKPSSTLQYFPKSENQPPKAQPPNLHLMNLQNMMAEQTPSRPPNLPGQQGVQRGLNMSMCHPGQMSLLGRTGVPPQQGMVPHGLHQGVMSPPQGLMTQQNFMLMKQRGVGGEVYSQPPHMLSPQGSLMGPPPQQNLMVSHPLRQRSVSLDSQMGYLPAPGGMANLPF

SEQ ID NO: 256226 - DNA, 4500 bp, Artificial Sequence
  derived and/or modified sequence
atgaggatcctcgcaaacaaaacccgtctgcctcatcctcggcggagagaagcccccggttctcctccgctgtcaccacgaggccactgtcctcccgcacctgctaaacccatgcatcccgagaacaagctgaccaaccatggaaagacgggcaatggcggggcccagtctcagcatcaaaatgtcaaccaagggcccacctgtaacgtggggagtaaaggcgttggcgctggcaatcatggagctaaagccaaccagatcagtccatctaatagcagcttgaagaacccacaagctggtgtaccgcccttttcctctctcaaagggaaggtcaagcgggatcgttccgtgtcagtggacagtggggaacagcgggaggccggaacaccatcgttggattcagaggcaaaagaggtcgctccgcggtcaaaacgacgctgcgttctcgagcgaaagcagccatacagcggcgatgaatggtgctcaggccccgattcagaggaggatgataagccaattggagccacacataattgcaacgtagccgaccctgccatggctgcgccacagttgggacctggccagacgacacagctgccactgtcagagtcatctgtgccgggagctccacacggacctccacccggtctccggcctgatgctccggggggaggtgggggcggtggtggggtccccggaaaacccccaagccaattcgtctacgtctttactactcacctggcgaatactgccgcggaagccgtcctccagggcagagctgatagtattttggcctaccaccaacagaacgtaccgcgtgcgaagctcgaccaggcacccaaagttccacctacccccgagcccctgccgctgtctacaccctctgcaggaaccccccagtcacagcctccccccctccctccccctccgccgccagccccagggagtgcgcccccggccctacctcccgaagggccacccgaagactccagtcaggatctcgcgccgaattcggtcggggcagccagcaccgggggaggaactggggggactcaccccaacacccctacggccacaactgccaataacccactgccacctggtggagatcccagctccgcgcccgggccagctctgctcggtgaagccgcggcaccaggaaatggacaaaggtcacttgtgggatcagagggcctctcaaaggaacaacttgagcaccgtgagcgctcactgcaaactctgcgggacattgaaaggctgttattaagaagtggggaaaccgagcctttcctgaagggccctccagggggtgccggcgagggaggcccacccgcacaggcccctcctcccccccagcagcctccaaccgctccaccaagcggattgaaaaagtatgaagagccactccaatccatgatctcccagacccagtcactgggggggccaccattggagcacgaggtacccggacatccccccggcggagacatggggcagcagatgaacatgatgatccagaggcttgggcaggattccttgacaccagagcaggtggcatggcggaagctgcaggaagagtactacgaagaaaaacggcggaaagaggagcagataggtctacatgggtcaagacctctgcaggatatgatgggcatgggaggaatgatggtgcgcgggccacctcccccctatcactcaaagccaggggatcagtggccccccggcatgggggctcaactcaggggccctatggatgtgcaggaccctatgcagctgagagggggtcctccttttcctggcccccgatttcccgggaatcagatccagcgagtcccaggattcggcggcatgcagagcatgccaatggaggtgcccatgaatgcaatgcaacgcccagtgaggccggggatgggctggactgaggacctccccccaatgggggggccgtctaacttcgcccagaatacgatgccctacccaggaggccagggagaggccgaaaggttcatgacacccagagtgagagaggagcttttgcgtcaccagttgctcgagaaaagatccatggggatgcaacgtcctttgggcatggccggttcaggcatgggtcagtctatggagatggagcggatgatgcaggcccaccgccagatggatcccgccatgttccccggacagatggctgggggggaaggtcttgctgggacgccaatgggaatggagttcggcggtggccggggtttgctctccccacctatgggccagtctgggttgcgggaagtggaccctcccatgggtccaggaaatcttaatatgaacatgaatgtgaatatgaacatgaatatgaatcttaacgtgcagatgactccccagcagcaaatgttaatgtcccaaaagatgcgcggaccaggagacctgatgggcccccaagggctgagccctgaggagatggctcgcgtccgcgcgcagaactcttccggggttatgggggggcctcagaagatgctaatgccctcccagttccccaatcagggtcagcagggattcagcggagggcaaggcccgtatcaggcaatgtcccaggacatggggaatacacaagacatgtttagccctgaccagtcctcaatgccaatgagcaacgttggaactacacggttaagccatatgccacttcctcccgctagcaacccccccggtacagtccactcggcccccaaccgtggcctcggaaggagacctagtgacctgaccatttccatcaatcaaatggggtcaccaggcatggggcacttgaagagtccaacactgagccaggtgcatagccccctggtgacatcaccaagtgctaacctgaagtctccacagacaccttctcagatggttcccctcccgagcgcaaatcctccgggacccctaaagtccccccaggtgctaggaagctccctgtccgttcggagtcctacggggtctccctcacggctgaagtctccttccatggccgtgcccagcccaggctgggtggcatcaccgaagaccgccatgccaagccccggagtgtcccagaataaacagccacccctgaacatgaacagcagtacaactctgtctaatatggagcaaggcaccctccccccctctggcccacgcagcagcagcagcgcacccccagcaaaccccccttctggcctgatgaaccccagcctgccctttacgtcatctccggaccccacgccaagtcagaaccctctctcactgatgatgacgcagatgagtaagtacgccatgccttcaagcacgccactgtatcataatgccatcaagacaatcgccacaagcgacgacgagcttctcccagatcgtccattactgccaccgccaccccccccccaggggtcaggaccaggcatatctaattctcagccctctcagatgcaccttaactcagccgctgctcagtccccaatgggaatgaacctacccgggcagcagccactgtctcacgagcccccccctgccatgcttccatccccgaccccactcggcagcaacataccgctgcatccaaacgcccagggaactggcggaccgccccagaactctatgatgatggctcccggaggccccgacagtctgaatgccccatgtgggccagtgccttctagcagccagatgatgccatttccaccgaggttacaacaaccccatggtgcaatggcacctactggcggtggcggtggaggaccaggcttacaacaacactaccccagcggaatggccctgcccccagaagatctgccaaatcagccgcccgggcccatgccaccccagcagcacctaatggggaaagccatggccggacgaatgggagatgcttatccccccggtgtattgcctggcgtagcctccgtgcttaacgaccctgagctctcagaggtcatcagaccaacacccactgggatccctgaatttgatctgagccgcatcataccttctgagaaacccagttccaccctgcaatacttcccaaagagcgagaatcaaccgccaaaggctcagcctcctaatctccacttgatgaatctgcagaacatgatggctgaacaaacaccctctcggccaccaaatctcccggggcagcagggggtgcagcggggcttaaatatgagtatgtgccatcccggtcagatgtccctgctcgggcgcactggggtgcccccccagcaggggatggttcctcatggcctgcaccaaggtgtgatgagtccccctcaagggcttatgacccagcagaattttatgctgatgaaacagcgaggcgtgggtggtgaggtttattcccaaccacctcacatgctctctcctcagggttccctaatggggcccccgcctcagcagaatctcatggtttctcaccctttgcgacaacggtccgtgagcctggacagtcagatgggctacttacccgcacccgggggaatggccaatctgccattttag

SEQ ID NO: 256227 - DNA, 4188 bp, Artificial Sequence
  derived and/or modified sequence
atgcggattctggcaaacaagacccggctgccccatccgaggcgccgggaagcccccggctctccacctctgagcccaagaggacactgtcctcccgcacctgcgaagcctatgcatcccgagaacaaactgactaatcatggaaagaccggtaacggaggagctcagtctcaacaccaaaatgtaaatcagggacctacctgcaacgtgggtagtaaaggcgtgggagccgggaatcacggagcgaaggctaaccagatctctccctccaacagtagcctgaaaaatcctcaggcgggtgttcctccctttagttcactcaagggcaaggtgaaaagagatcgatccgtctccgttgatagcggcgagcagcgagaggcgggtacaccgagccttgactcagaagccaaagaagtggcccctcgcagcaagaggcggtgcgtgttggagcgaaaacagccttacagtggcgatgagtggtgcagtggcccagacagcgaggaggatgataaaccaattggtgcgacacataactgtaatgtggccgatcccgcaatggccgcacctcaactcggtcctggtcagaccacccagctgccactctccgagagcagtgtcccaggtgcgccacacggaccccctcctggtctgcgacccgacgccccaggcggcggaggaggcggcggcggcgtgcctggaaagcctccctcgcagttcgtgtacgtttttaccacacatctggccaacacagccgctgaagccgtgctgcaggggcgtgctgatagcatcttagcttatcatcaacagaatgtgccaagggccaagctggatcaggctcccaaggtgcctccaacacctgaacccctgcctttatccacgcccagtgccggaactccacagtctcagcccccccccctgccacctccacctccacctgcgccaggttcggcgcccccagcccttccccccgagggcccccctgaagacagctcacaggatttagctcccaattctgtgggagccgcatctacgggcggtggcacaggtggcactcacccaaatactcctactgcaaccaccgctaacaacccccttccccccggcggggatccttcttccgctcctggcccagctctgttaggcgaagcagcagcccccggcaacggtcagcggagcctggtgggtagcgagggactgtccaaagagcagttagagcacagggaacgctctttgcaaactctgcgagacattgagaggctactgctgcggtctggcgagaccgagccatttctcaaaggacctccaggcggcgctggtgagggtggcccacctgcccaggctcccccacccccacagcagccgcctaccgcccctccctcagggcttaagaagtatgaggagcccctccaaagtatgatttctcaaacccagtcccttggcggcccccccttagaacacgaggtgccgggacaccctccaggtggggacatgggtcagcaaatgaacatgatgattcagaggctgggacaggactctctcactccagaacaggtagcctggcgtaaactccaagaggaatattatgaggaaaaaagacgcaaggaggagcagattggcttgcatggcagccggcccctgcaggacatgatgggaatgggaggtatgatggtgcgggggcctccgcccccgtatcatagcaagcctggagaccagtggcctcccggcatgggggcacagctgcggggccccatggacgtgcaggacccaatgcagctccgcggaggccccccttttcctggaccacgctttcctggcaatcagatccagagagtccccggatttggaggaatgcagagcatgcctatggaggtgcctatgaacgccatgcagcggccagtacggccgggaatgggatggaccgaagatctgcccccaatgggaggtccttcgaattttgctcaaaacaccatgccgtatcctggtggccagggtgaagccgaacggttcatgacaccgcgggtgcgggaagaacttcttaggcaccaactcttagagaagcgctccatgggtatgcagaggccactcggaatggcgggtagcggaatgggacagagcatggagatggagaggatgatgcaggcacacaggcagatggatccagccatgtttccaggtcaaatggcggggggtgagggcctggccggaacacctatgggtatggagtttggcggaggccggggactgctatcgccaccaatgggtcagagtggactgagagaggtagaccctcccatgggaccagggaatctcaatatgaacatgaacgtgaatatgaacatgaatatgaacctaaatgttcaaatgactccacagcaacagatgctgatgtctcagaaaatgcggggacctggtgatctgatggggccccagggcctgtccccggaggagatggcgcgcgttagggcacagaacagtagcggcgtcatggggggtccacagaagatgctgatgccttcccagtttccaaaccaggggcagcaggggttttccggcggacagggcccctaccaggcaatgtcgcaggacatggggaacacacaagatatgttttcccccgaccagtcttccatgccgatgagtaatgtagggactacacgcctgtcccatatgcccctgccacccgcctccaacccacccgggactgtacactcagcaccaaatagggggcttggtcgtcgacctagtgaccttaccatctctatcaaccagatgggctcccccggtatgggccacctcaagtctcctaccctatcgcaagtgcatagccccctggtgacatctcctagcgccaacctgaagtcccctcaaacaccttctcagatggtgccgttgccgtcggcgaatccaccaggccctttaaaatccccgcaggtgctagggagcagtttgtctgtgcggagtcctacagggagtccaagtcgcttgaaaagtccatcgatggccgtgccttccccagggtgggtggcttcccccaagacagcaatgcccagtccgggcgttagtcagaacaaacagccccccctcaatatgaatagctccactactctaagtaatatggaacagggtactctgcccccttcagggccacgaagctccagctccgccccacccgctaaccctccatctggtctcatgaaccccagccttcctttcactagcagtcccgatccaaccccatcacagaaccccctgtcactcatgatgacacaaatgtccaagtacgccatgcccagcagcacccccctttatcacaacgcaattaagactatcgctacctcagatgatgagctgttaccagataggcctctattgcccccaccacctccaccacaggggtctggccctggcatttcaaactctcagcctagccaaatgcacctaaatagtgccgcagcccagagtcctatgggtatgaacctaccaggccagcagccgctcagtcacgaaccccctccagcaatgctgccttctcctacaccattggggagtaatattccccttcacccaaatgcgcagggtacaggtggccccccacaaaacagcatgatgatggccccggggggcccggatagccttaatgcgccctgtgggcccgtgccctcgtcgagtcagatgatgccttttccaccgagactccaacagccgcacggcgccatggcaccaactggtggtgggggcggaggcccgggccttcagcagcattacccgtctggcatggctctaccccctgaggaccttcccaaccagcctccggggccaatgccccctcagcaacaccttatgggcaaagccatggccggcaggatgggagacgcctatccccctggcgttcttcccggcgtggcttcagtgctaaatgacccagagttgtccgaagtgattagacccacacccaccgggatccctgaatttgatctatcacggatcatcccttctgaattcctgcgtaccaggcctttcagcttttgtctgtacctactccgcattctttctctactgatgtggctcacccctctgccgcccctgcctgccggaggctggcctggcggtcaagtacccgctggcgcagttaacagggctctacgcttttgtgcgggtttgtgtgtctgttgcatctctgtgttttag

SEQ ID NO: 256228 - DNA, 4365 bp, Artificial Sequence
  derived and/or modified sequence
atgaggattttagctaacaagacccggctgcctcatcccaggagacgggaagcaccggggtcacccccgctttcgccccggggacattgccctccagctcccgcaaagcccatgcacccagagaacaaactcaccaatcacggcaaaacagggaatggcggcgcgcaaagtcagcaccagaacgttaaccaaggtcctacatgcaatgtaggcagcaagggggtgggtgcaggaaaccacggggcaaaggcaaaccagattagccctagtaactcttctctcaagaatccacaggctggagtccctccttttagcagcctgaagggcaaggtcaagagagaccggtctgtgagcgttgactcaggggagcagcgcgaagccgggaccccatccttggactctgaggccaaggaagtcgctccacgaagcaaacgccgttgtgtactggaacgaaaacaaccgtacagcggggacgagtggtgtagcgggcccgactccgaagaggatgataagcccatcggcgctacccataattgcaatgttgcggacccagccatggccgctccccagctgggcccagggcagacaacacaactgccactcagcgagagtagtgttcctggagctccccatggacctcctccgggactgaggccggacgcgcctgggggaggaggcggaggaggcggggtacccggaaagccccctagtcagtttgtctacgttttcaccacccatctggccaataccgcagctgaagctgttctacaaggtcgggcagatagcattctggcataccaccagcagaacgtacctcgagcaaaacttgaccaagcccccaaggtgccccctacgcctgagccattgcccttaagcaccccaagcgccggtacgcctcagagtcaaccgccgccgttgccacctcctccccccccagccccaggctcagccccaccagctcttccaccagagggcccgcctgaagacagttctcaggacttggctcctaatagtgtaggagctgcgtccaccggcggtggcaccggcgggacacaccctaacactccgacagcaacaaccgctaataatcccctgcctcctggaggtgaccctagcagcgcaccggggcctgctttactgggggaggcagccgcgccaggcaatggccagcgatctctcgtcggatccgaaggactgtccaaggaacagctcgagcacagggagagaagtttacagacattgcgggatatcgaacggctcttgcttagatctggtgagacagaaccgttcctcaaggggccacctggcggcgcaggagaaggcggcccccctgcacaggcccctccacccccccagcagcctcctaccgcacctcccagcggattgaaaaaatacgaggaacccctccaaagtatgatctcacagacccaatccctgggaggtccgcctctggaacatgaggttccaggtcaccctcctggcggggacatgggtcaacagatgaacatgatgatacagcgcctcggccaggacagtctcactccagagcaggtcgcctggcgcaaactccaggaagagtattacgaagagaaacgcaggaaagaggagcagatcggcctgcacggcagcaggcctctacaggatatgatggggatggggggtatgatggtccggggtccccctcctccctatcactcaaaacctggcgaccagtggccccccggcatgggcgcgcagttaaggggtccgatggacgtacaggaccctatgcagctgaggggaggacccccgttccccggtccacgcttccccggcaaccaaatacagcgagtaccaggatttggtggcatgcagtccatgcccatggaagtcccaatgaacgccatgcagagacccgtaagacccggaatggggtggacagaagatctcccccctatgggaggtcccagtaacttcgcccagaatactatgccttaccctggcggccagggggaggcagagcgttttatgacccctcgggtacgcgaagaactcctaaggcaccagctgctggaaaaacggtccatgggtatgcagcggcccctgggcatggccggatccggaatgggtcagtccatggagatggaacggatgatgcaggcgcatagacagatggatcccgctatgtttcctggccaaatggccggaggcgaaggactggcgggcacaccgatgggcatggagttcggcgggggacgaggccttctatcacctccaatgggccagagcggcttacgggaggttgaccctccaatgggcccgggtaaccttaacatgaacatgaatgtcaatatgaatatgaatatgaacttaaacgtgcaaatgacccctcagcaacagatgttgatgagccaaaaaatgaggggccctggcgacctaatgggcccgcagggattgtctcctgaagagatggcccgagtccgagcacagaactcatcaggcgtaatgggcggtccgcagaagatgctcatgccctcacagttccctaaccaaggtcagcagggttttagcggagggcagggcccctaccaggcgatgtctcaggacatgggcaacacgcaggacatgttttcacccgatcagagtagtatgcctatgtctaacgtagggacaaccaggctgagtcatatgcctctgccacccgcatctaacccacccggtaccgttcacagcgcacctaataggggactgggccggcgtccctcggatctcactatctcaattaaccagatgggttctcccggaatggggcatctcaaatcaccaactctgtctcaggtgcattctcccctcgtgacctctccctccgcaaatctcaaatctccccagaccccaagccagatggtacctctaccttccgctaatccacccggtcctctcaagtcaccacaagttctcggatcgtccctctcagtgcgatctcctacaggtagtcccagtcggcttaagagccccagtatggcggttccatcccctggatgggtggcctcccccaagacagccatgcctagccctggcgtcagtcagaacaaacagcctccccttaatatgaacagcagtactaccctgagtaacatggagcaagggacattgcccccatccggtccacggtcctccagctccgcacctccagcgaatccgccatcaggattgatgaacccatcactcccattcacttcatcccctgaccctaccccatcccagaacccgctgtcactgatgatgactcagatgtcaaaatatgcaatgccctcatccacccctctgtatcataatgcgattaaaactatcgctacgagcgacgacgaactgcttcccgatagacccctgctgccccccccaccccctccccaggggagtggaccggggatttcaaattctcagccaagccagatgcatctgaactcggccgcggcccagagtcctatgggaatgaacttgcccggacaacaacccctgtcccatgagccccctcctgccatgttaccctctcccacccccctaggctccaacattcccctccatccaaatgcccaaggaaccggcgggcccccccagaacagtatgatgatggctccggggggaccggactccctgaacgcaccatgtggtcctgtgccatcttcatctcaaatgatgcctttcccaccaagactccagcagccccatggcgccatgatggccgggcgcatgggagacgcttaccctccaggagtgctgcctggagtcgccagcgtgttaaacgaccccgaactttcagaagtgattcgcccgactcctaccggcattcccgaattcgatctgtccagaatcatcccctctgagaagccaagtagtaccctgcaatactttcctaagtccgagaatcagcccccaaaagcccagcccccaaatttgcatctaatgaatctgcagaacatgatggcagaacagacaccatcaaggcccccgaatctgcctggacagcagggtgtgcagcgtggccttaatatgagtatgtgtcaccccggccagatgagcctattgggtaggactggggtgcctccccagcagggaatggtgccccatgggttacatcagggcgttatgagtccgccccaggggcttatgactcaacaaaatttcatgctgatgaaacagagaggggtaggcggtgaggtgtactcccagccacctcacatgctgtcccctcagggatcattgatgggccctcctccccagcagaacctaatggtttcccatcctctaagacaacgctccgtgtcacttgattcccagatgggatacttacccgcccccggcggaatggctaacctgccgttctag

SEQ ID NO: 256229 - DNA, 4500 bp, Artificial Sequence
  derived and/or modified sequence
atgaggatcctggccaacaagacccggctgccccaccccaggagaagagaggcccctggcagcccccccctgagcccccggggccactgccccccagccccagccaagcccatgcaccctgagaacaagctgaccaaccacggcaagacaggaaatggaggagcccagagccagcaccagaatgtgaaccagggccccacctgcaatgtgggcagcaaaggagtgggcgccggcaaccacggggccaaggccaaccagatcagccccagcaacagcagcctgaagaacccccaggccggcgtgccccccttcagcagcctgaagggcaaggtgaagagggacagatctgtgtctgtggacagcggggagcagcgggaggccggcacccccagcctggacagcgaggccaaggaggtggcccccaggagcaagagaagatgtgtgctggagaggaagcagccctacagcggagatgagtggtgcagcggccctgacagcgaggaggatgacaagcccatcggggccacccacaactgcaatgtggccgaccctgccatggccgccccccagctgggccctggccagaccacccagctgcccctgtctgagagctctgtgcctggggcccctcatggccccccacctggcctgcggccagatgcccctgggggcggcggcggcggcggcggcgtgcctgggaagccacccagccagtttgtgtatgtgttcaccacccacctggccaacacagctgctgaggccgtgctgcagggccgggctgacagcatcctggcctaccaccagcagaatgtgccccgggccaagctggaccaggcccccaaggtgccccccaccccagagcccctgcccctgagcaccccatctgctggcaccccccagagccagcccccacccctgcccccacctcctcctccagcccctggcagcgcccccccagccctgcccccagagggccccccagaggacagcagccaggacctggcccccaacagcgtgggcgccgccagcactggaggcggcaccggcggcacccaccccaacacccccacagccaccacagccaacaaccccctgcccccaggaggagaccccagcagcgcccctggccctgccctgctgggggaggccgccgcccctggaaatggccagaggagcctggtgggcagcgagggcctgagcaaggagcagctggagcaccgggagaggagcctgcagaccctgcgggacatcgagcggctgctgctgcggagcggggagacagagcccttcctgaagggccccccaggaggagctggggagggcggccccccagcccaggcccctcctccaccccagcagcccccaacagccccacccagcggcctgaagaagtatgaggagcccctgcagagcatgatcagccagacccagagcctgggcggcccccccctggagcacgaggtgcccggccaccccccaggaggagacatgggccagcagatgaacatgatgatccagaggctgggccaggacagcctgaccccagagcaggtggcctggaggaagctgcaggaggagtactatgaggagaagaggaggaaggaggagcagatcggcctgcacggcagccggcccctgcaggacatgatgggcatgggcggcatgatggtgcggggccccccaccaccctaccacagcaagccaggggaccagtggcccccaggcatgggcgcccagctgcggggccccatggatgtgcaggaccccatgcagctgcggggcggcccccccttccctggcccccgcttccctggcaaccagatccagagggtgcccggctttggaggcatgcagagcatgcccatggaggtgcccatgaatgccatgcagaggcctgtgcggcccggcatgggctggacagaggacctgccccccatgggcggccccagcaactttgcccagaacaccatgccctacccaggcggccagggcgaggccgagcgcttcatgaccccccgggtgcgggaggagctgctgcggcaccagctgctggagaagaggtccatgggcatgcagaggcccctgggcatggccggcagcggcatgggccagagcatggagatggagaggatgatgcaggcccaccggcagatggaccctgccatgtttcctggccagatggccggcggggagggcctggccggcacccccatgggcatggagtttggaggcggccggggcctgctgagcccccccatgggccagagcggcctgcgggaggtggacccccccatgggccctggcaacctgaacatgaacatgaatgtgaacatgaacatgaacatgaacctgaatgtgcagatgaccccccagcagcagatgctgatgagccagaagatgaggggccctggggacctgatgggcccccagggcctgagccctgaggagatggcccgggtgcgggcccagaacagcagcggcgtgatgggcggcccccagaagatgctgatgcccagccagttccccaaccagggccagcagggcttcagcggcggccagggcccctaccaggccatgagccaggacatgggcaacacccaggacatgttctccccagaccagagctccatgcccatgagcaatgtgggcaccacccggctgagccacatgcccctgcccccagccagcaaccccccaggcaccgtgcacagcgcccccaacagaggcctgggccggcggcccagcgacctgaccatcagcatcaaccagatgggcagccctggcatgggccacctgaagagccccaccctgagccaggtgcacagccccctggtgaccagccccagcgccaacctgaagagcccccagacccccagccagatggtgcccctgcccagcgccaaccccccaggccccctgaagagcccccaggtgctgggcagcagcctgtctgtgcgcagccccaccggcagccccagccggctgaagagccccagcatggctgtgcccagccctggctgggtggccagccccaagacagccatgcccagccctggggtgtcccagaacaagcagccccccctgaacatgaacagcagcaccaccctgagcaacatggagcagggcaccctgcccccatctggccccaggagcagcagcagcgcccccccagccaacccccccagcggcctgatgaaccccagcctgcccttcaccagcagcccagaccccacccccagccagaaccccctgagcctgatgatgacccagatgagcaaatatgccatgcccagcagcacccccctgtaccacaatgccatcaagaccatcgccaccagtgatgatgagctgctgcctgaccggcccctgctgcccccacctcctccaccccagggcagcggccctggcatcagcaacagccagcccagccagatgcacctgaacagcgctgctgcccagagccccatgggcatgaacctgcccggccagcagcccctgagccatgagcccccaccagccatgctgcccagccccacccccctgggcagcaacatccccctgcaccccaatgcccagggcaccggcggccccccccagaacagcatgatgatggcccctgggggccctgacagcctgaatgccccctgtggccctgtgcccagcagcagccagatgatgcccttccccccccggctgcagcagccccacggggccatggcccccaccggcggcggcggcggcggccctggcctgcagcagcactaccccagcggcatggccctgcccccagaggacctgcccaaccagcccccaggccccatgccaccccagcagcacctgatgggcaaggccatggccggccgcatgggagatgcctacccacctggggtgctgcccggggtggcctctgtgctgaatgaccctgagctgtctgaggtgatccggcccacccccaccggcatccctgagtttgacctgagccgcatcatccccagcgagaagcccagcagcaccctgcagtacttccccaagtctgagaaccagccccccaaggcccagccccccaacctgcacctgatgaacctgcagaacatgatggccgagcagacccccagccggccccccaacctgcccggccagcagggcgtgcagaggggcctgaacatgtccatgtgccaccctggccagatgagcctgctgggccgcactggagtgcccccccagcagggcatggtgccccacggcctgcaccagggcgtgatgagccccccccagggcctgatgacccagcagaacttcatgctgatgaagcagaggggcgtgggcggggaggtgtacagccagcccccccacatgctgagcccccagggcagcctgatgggccccccaccccagcagaacctgatggtgagccaccccctgcggcagaggtctgtgtccctggacagccagatgggctacctgcctgcccctgggggcatggccaacctgcccttctag

SEQ ID NO: 256230 - DNA, 4188 bp, Artificial Sequence
  derived and/or modified sequence
atgaggatcctggccaacaagacccggctgccccaccccaggagaagagaggcccctggcagcccccccctgagcccccggggccactgccccccagccccagccaagcccatgcaccctgagaacaagctgaccaaccacggcaagacaggaaatggaggagcccagagccagcaccagaatgtgaaccagggccccacctgcaatgtgggcagcaaaggagtgggcgccggcaaccacggggccaaggccaaccagatcagccccagcaacagcagcctgaagaacccccaggccggcgtgccccccttcagcagcctgaagggcaaggtgaagagggacagatctgtgtctgtggacagcggggagcagcgggaggccggcacccccagcctggacagcgaggccaaggaggtggcccccaggagcaagagaagatgtgtgctggagaggaagcagccctacagcggagatgagtggtgcagcggccctgacagcgaggaggatgacaagcccatcggggccacccacaactgcaatgtggccgaccctgccatggccgccccccagctgggccctggccagaccacccagctgcccctgtctgagagctctgtgcctggggcccctcatggccccccacctggcctgcggccagatgcccctgggggcggcggcggcggcggcggcgtgcctgggaagccacccagccagtttgtgtatgtgttcaccacccacctggccaacacagctgctgaggccgtgctgcagggccgggctgacagcatcctggcctaccaccagcagaatgtgccccgggccaagctggaccaggcccccaaggtgccccccaccccagagcccctgcccctgagcaccccatctgctggcaccccccagagccagcccccacccctgcccccacctcctcctccagcccctggcagcgcccccccagccctgcccccagagggccccccagaggacagcagccaggacctggcccccaacagcgtgggcgccgccagcactggaggcggcaccggcggcacccaccccaacacccccacagccaccacagccaacaaccccctgcccccaggaggagaccccagcagcgcccctggccctgccctgctgggggaggccgccgcccctggaaatggccagaggagcctggtgggcagcgagggcctgagcaaggagcagctggagcaccgggagaggagcctgcagaccctgcgggacatcgagcggctgctgctgcggagcggggagacagagcccttcctgaagggccccccaggaggagctggggagggcggccccccagcccaggcccctcctccaccccagcagcccccaacagccccacccagcggcctgaagaagtatgaggagcccctgcagagcatgatcagccagacccagagcctgggcggcccccccctggagcacgaggtgcccggccaccccccaggaggagacatgggccagcagatgaacatgatgatccagaggctgggccaggacagcctgaccccagagcaggtggcctggaggaagctgcaggaggagtactatgaggagaagaggaggaaggaggagcagatcggcctgcacggcagccggcccctgcaggacatgatgggcatgggcggcatgatggtgcggggccccccaccaccctaccacagcaagccaggggaccagtggcccccaggcatgggcgcccagctgcggggccccatggatgtgcaggaccccatgcagctgcggggcggcccccccttccctggcccccgcttccctggcaaccagatccagagggtgcccggctttggaggcatgcagagcatgcccatggaggtgcccatgaatgccatgcagaggcctgtgcggcccggcatgggctggacagaggacctgccccccatgggcggccccagcaactttgcccagaacaccatgccctacccaggcggccagggcgaggccgagcgcttcatgaccccccgggtgcgggaggagctgctgcggcaccagctgctggagaagaggtccatgggcatgcagaggcccctgggcatggccggcagcggcatgggccagagcatggagatggagaggatgatgcaggcccaccggcagatggaccctgccatgtttcctggccagatggccggcggggagggcctggccggcacccccatgggcatggagtttggaggcggccggggcctgctgagcccccccatgggccagagcggcctgcgggaggtggacccccccatgggccctggcaacctgaacatgaacatgaatgtgaacatgaacatgaacatgaacctgaatgtgcagatgaccccccagcagcagatgctgatgagccagaagatgaggggccctggggacctgatgggcccccagggcctgagccctgaggagatggcccgggtgcgggcccagaacagcagcggcgtgatgggcggcccccagaagatgctgatgcccagccagttccccaaccagggccagcagggcttcagcggcggccagggcccctaccaggccatgagccaggacatgggcaacacccaggacatgttctccccagaccagagctccatgcccatgagcaatgtgggcaccacccggctgagccacatgcccctgcccccagccagcaaccccccaggcaccgtgcacagcgcccccaacagaggcctgggccggcggcccagcgacctgaccatcagcatcaaccagatgggcagccctggcatgggccacctgaagagccccaccctgagccaggtgcacagccccctggtgaccagccccagcgccaacctgaagagcccccagacccccagccagatggtgcccctgcccagcgccaaccccccaggccccctgaagagcccccaggtgctgggcagcagcctgtctgtgcgcagccccaccggcagccccagccggctgaagagccccagcatggctgtgcccagccctggctgggtggccagccccaagacagccatgcccagccctggggtgtcccagaacaagcagccccccctgaacatgaacagcagcaccaccctgagcaacatggagcagggcaccctgcccccatctggccccaggagcagcagcagcgcccccccagccaacccccccagcggcctgatgaaccccagcctgcccttcaccagcagcccagaccccacccccagccagaaccccctgagcctgatgatgacccagatgagcaaatatgccatgcccagcagcacccccctgtaccacaatgccatcaagaccatcgccaccagtgatgatgagctgctgcctgaccggcccctgctgcccccacctcctccaccccagggcagcggccctggcatcagcaacagccagcccagccagatgcacctgaacagcgctgctgcccagagccccatgggcatgaacctgcccggccagcagcccctgagccatgagcccccaccagccatgctgcccagccccacccccctgggcagcaacatccccctgcaccccaatgcccagggcaccggcggccccccccagaacagcatgatgatggcccctgggggccctgacagcctgaatgccccctgtggccctgtgcccagcagcagccagatgatgcccttccccccccggctgcagcagccccacggggccatggcccccaccggcggcggcggcggcggccctggcctgcagcagcactaccccagcggcatggccctgcccccagaggacctgcccaaccagcccccaggccccatgccaccccagcagcacctgatgggcaaggccatggccggccgcatgggagatgcctacccacctggggtgctgcccggggtggcctctgtgctgaatgaccctgagctgtctgaggtgatccggcccacccccaccggcatccctgagtttgacctgagccgcatcatccccagcgagttcctgcggacccggcccttctccttctgcctgtacctgctgcgcatcctgagcctgctgatgtggctgacccccctgccccccctgcctgctgggggctggccaggcggccaggtgcctgctggagctgtgaacagagccctgcgcttctgtgccggcctgtgtgtgtgctgcatctctgtgttctag

SEQ ID NO: 256231 - DNA, 4365 bp, Artificial Sequence
  derived and/or modified sequence
atgaggatcctggccaacaagacccggctgccccaccccaggagaagagaggcccctggcagcccccccctgagcccccggggccactgccccccagccccagccaagcccatgcaccctgagaacaagctgaccaaccacggcaagacaggaaatggaggagcccagagccagcaccagaatgtgaaccagggccccacctgcaatgtgggcagcaaaggagtgggcgccggcaaccacggggccaaggccaaccagatcagccccagcaacagcagcctgaagaacccccaggccggcgtgccccccttcagcagcctgaagggcaaggtgaagagggacagatctgtgtctgtggacagcggggagcagcgggaggccggcacccccagcctggacagcgaggccaaggaggtggcccccaggagcaagagaagatgtgtgctggagaggaagcagccctacagcggagatgagtggtgcagcggccctgacagcgaggaggatgacaagcccatcggggccacccacaactgcaatgtggccgaccctgccatggccgccccccagctgggccctggccagaccacccagctgcccctgtctgagagctctgtgcctggggcccctcatggccccccacctggcctgcggccagatgcccctgggggcggcggcggcggcggcggcgtgcctgggaagccacccagccagtttgtgtatgtgttcaccacccacctggccaacacagctgctgaggccgtgctgcagggccgggctgacagcatcctggcctaccaccagcagaatgtgccccgggccaagctggaccaggcccccaaggtgccccccaccccagagcccctgcccctgagcaccccatctgctggcaccccccagagccagcccccacccctgcccccacctcctcctccagcccctggcagcgcccccccagccctgcccccagagggccccccagaggacagcagccaggacctggcccccaacagcgtgggcgccgccagcactggaggcggcaccggcggcacccaccccaacacccccacagccaccacagccaacaaccccctgcccccaggaggagaccccagcagcgcccctggccctgccctgctgggggaggccgccgcccctggaaatggccagaggagcctggtgggcagcgagggcctgagcaaggagcagctggagcaccgggagaggagcctgcagaccctgcgggacatcgagcggctgctgctgcggagcggggagacagagcccttcctgaagggccccccaggaggagctggggagggcggccccccagcccaggcccctcctccaccccagcagcccccaacagccccacccagcggcctgaagaagtatgaggagcccctgcagagcatgatcagccagacccagagcctgggcggcccccccctggagcacgaggtgcccggccaccccccaggaggagacatgggccagcagatgaacatgatgatccagaggctgggccaggacagcctgaccccagagcaggtggcctggaggaagctgcaggaggagtactatgaggagaagaggaggaaggaggagcagatcggcctgcacggcagccggcccctgcaggacatgatgggcatgggcggcatgatggtgcggggccccccaccaccctaccacagcaagccaggggaccagtggcccccaggcatgggcgcccagctgcggggccccatggatgtgcaggaccccatgcagctgcggggcggcccccccttccctggcccccgcttccctggcaaccagatccagagggtgcccggctttggaggcatgcagagcatgcccatggaggtgcccatgaatgccatgcagaggcctgtgcggcccggcatgggctggacagaggacctgccccccatgggcggccccagcaactttgcccagaacaccatgccctacccaggcggccagggcgaggccgagcgcttcatgaccccccgggtgcgggaggagctgctgcggcaccagctgctggagaagaggtccatgggcatgcagaggcccctgggcatggccggcagcggcatgggccagagcatggagatggagaggatgatgcaggcccaccggcagatggaccctgccatgtttcctggccagatggccggcggggagggcctggccggcacccccatgggcatggagtttggaggcggccggggcctgctgagcccccccatgggccagagcggcctgcgggaggtggacccccccatgggccctggcaacctgaacatgaacatgaatgtgaacatgaacatgaacatgaacctgaatgtgcagatgaccccccagcagcagatgctgatgagccagaagatgaggggccctggggacctgatgggcccccagggcctgagccctgaggagatggcccgggtgcgggcccagaacagcagcggcgtgatgggcggcccccagaagatgctgatgcccagccagttccccaaccagggccagcagggcttcagcggcggccagggcccctaccaggccatgagccaggacatgggcaacacccaggacatgttctccccagaccagagctccatgcccatgagcaatgtgggcaccacccggctgagccacatgcccctgcccccagccagcaaccccccaggcaccgtgcacagcgcccccaacagaggcctgggccggcggcccagcgacctgaccatcagcatcaaccagatgggcagccctggcatgggccacctgaagagccccaccctgagccaggtgcacagccccctggtgaccagccccagcgccaacctgaagagcccccagacccccagccagatggtgcccctgcccagcgccaaccccccaggccccctgaagagcccccaggtgctgggcagcagcctgtctgtgcgcagccccaccggcagccccagccggctgaagagccccagcatggctgtgcccagccctggctgggtggccagccccaagacagccatgcccagccctggggtgtcccagaacaagcagccccccctgaacatgaacagcagcaccaccctgagcaacatggagcagggcaccctgcccccatctggccccaggagcagcagcagcgcccccccagccaacccccccagcggcctgatgaaccccagcctgcccttcaccagcagcccagaccccacccccagccagaaccccctgagcctgatgatgacccagatgagcaaatatgccatgcccagcagcacccccctgtaccacaatgccatcaagaccatcgccaccagtgatgatgagctgctgcctgaccggcccctgctgcccccacctcctccaccccagggcagcggccctggcatcagcaacagccagcccagccagatgcacctgaacagcgctgctgcccagagccccatgggcatgaacctgcccggccagcagcccctgagccatgagcccccaccagccatgctgcccagccccacccccctgggcagcaacatccccctgcaccccaatgcccagggcaccggcggccccccccagaacagcatgatgatggcccctgggggccctgacagcctgaatgccccctgtggccctgtgcccagcagcagccagatgatgcccttccccccccggctgcagcagccccacggggccatgatggccggccgcatgggagatgcctacccacctggggtgctgcccggggtggcctctgtgctgaatgaccctgagctgtctgaggtgatccggcccacccccaccggcatccctgagtttgacctgagccgcatcatccccagcgagaagcccagcagcaccctgcagtacttccccaagtctgagaaccagccccccaaggcccagccccccaacctgcacctgatgaacctgcagaacatgatggccgagcagacccccagcaggcctcccaacctgcccggccagcagggcgtgcagaggggcctgaacatgtccatgtgccaccctggccagatgagcctgctgggccgcactggagtgcccccccagcagggcatggtgccccacggcctgcaccagggcgtgatgagccccccccagggcctgatgacccagcagaacttcatgctgatgaagcagaggggcgtgggcggggaggtgtacagccagcccccccacatgctgagcccccagggcagcctgatgggccccccaccccagcagaacctgatggtgagccaccccctgcggcagaggtctgtgtccctggacagccagatgggctacctgcctgcccctgggggcatggccaacctgcccttctag

SEQ ID NO: 256232 - DNA, 4500 bp, Artificial Sequence
  derived and/or modified sequence
atgcggatcctggccaacaagacccggctgccccacccccggcggcgtgaagccccaggcagcccaccgttgtctccacgggggcattgccctccagcccccgccaaacccatgcatcccgaaaataagcttaccaaccacggaaagactggaaatggcggagcccaaagccagcatcagaacgtcaatcaaggtcccacctgcaacgtgggcagtaaaggggttggggccggcaatcatggggctaaggctaatcagatctcccccagtaacagcagtcttaagaacccccaagcgggggtgcctccttttagcagtctcaaaggcaaagtgaagagagataggtctgtgagcgttgactctggagagcagagagaggcagggactccttccctggacagcgaagccaaggaggtagcccctaggagtaagcggcggtgcgtgctcgaaagaaagcagccctacagcggtgacgagtggtgctctggccctgattccgaagaagacgacaagcctatcggcgctacccacaactgcaacgtggcggaccctgcaatggcggcccctcagctggggcctgggcagacgactcagctgccactaagtgaaagttcggtcccaggagcgcctcacggcccccccccgggcttgaggccagacgcgccggggggtgggggtgggggcgggggcgtccctgggaaaccccccagccaatttgtgtacgtgtttactactcatctggctaataccgccgccgaggcggtgctccagggtcgggcggactcaattcttgcctatcaccagcagaacgtgccgcgggctaagttagatcaggcacctaaagtgccccctacgccagagcccctacccttaagcacgccatcggccggtacacctcaatctcaacccccaccgttgccaccaccccctccacctgcccccggatcagcacccccagctctaccccctgaggggccaccagaggacagcagccaggacctggccccaaattccgttggggcggctagcactggcggaggaaccgggggcacacaccctaacaccccaacagctacaacggccaacaatcctcttccgcccggaggcgatcctagctccgcccctggtccagcactgctaggggaggcagctgccccaggtaatggacaaagatccttagtagggtcagagggactgtccaaagagcagctggaacatcgcgagagatctctccagaccttgcgggatattgagaggttattactgagatctggggagactgaaccctttctcaaaggccctcccggaggcgccggagagggcgggcctcctgctcaggcgcccccgcctcctcagcagcccccaacagcgcctccctccggacttaagaagtatgaagagcctctgcagtcgatgatcagtcagactcagtccctcggggggcccccacttgagcacgaggtaccgggccatccccccggaggcgatatgggccagcaaatgaacatgatgatccagcggcttgggcaggactcactgactcccgaacaggtcgcctggaggaagttgcaggaggagtactatgaggaaaagcgcagaaaggaagaacaaataggcctccacggaagccgtcctttgcaggacatgatgggcatgggcgggatgatggttcgaggtccccccccaccttatcacagcaaaccaggagaccagtggcctcccggcatgggagcccagttgaggggtccaatggatgtgcaggaccccatgcagctgagaggcggccccccctttcccggcccgcggttccccggaaatcaaattcaacgcgtgccagggtttggaggcatgcaaagtatgccgatggaggtgcctatgaacgccatgcaaagacctgtgagacccgggatgggatggacggaggatttgccgcccatgggcggaccgagtaatttcgcccagaacacaatgccctaccccggcgggcagggagaagccgagcgcttcatgacacctcgcgtcagagaggagctgttgcgccaccagctgcttgaaaaaagaagtatgggcatgcagagaccactagggatggccggatcaggaatgggacagagtatggaaatggagcgaatgatgcaagcccatagacagatggacccagccatgttcccagggcaaatggccggcggggagggactcgcagggactcctatggggatggaattcggggggggacgtgggctcctgagcccgccaatgggccagagcggtctgagggaagtagaccccccgatgggcccaggtaaccttaatatgaatatgaacgtgaacatgaacatgaatatgaatctgaatgtgcaaatgactccccagcagcaaatgctgatgtcccagaagatgcgcgggcccggcgacttaatgggaccccaaggactgtcacctgaggagatggcacgagtacgagcccagaactcatctggcgtcatggggggtcctcagaagatgctaatgccaagtcagttcccaaatcagggacaacaggggttttccggaggccagggaccctatcaggcgatgtctcaggacatgggtaatacccaggatatgttctctcccgaccagagctccatgcccatgagcaatgtagggacaacacgcctgagccatatgccactgccccctgccagcaatccacctggaactgtccactccgccccgaatagaggtctcggtaggcgtccctcagatttgacaatttccattaatcagatggggtcaccgggcatggggcacctcaagtccccgacattatcacaggttcactcgccgctcgtgacctctcctagcgctaacttaaagtctccacagacgccttcgcagatggtgcccctgccgagcgcgaacccgccaggacctctgaaaagccctcaagtgcttggtagttcattgagcgtccggtctccgacaggcagtccttcccgcctcaagtcgccatcaatggcagtgccatcccccggttgggtggccagcccaaagacagccatgccatctccaggggtgtcacaaaataaacagccacctctgaacatgaatagctcgaccaccctctctaacatggagcaggggactcttccaccaagtggacccaggagctcatctagtgccccccccgcaaatcccccctctggcttgatgaacccaagcctcccattcaccagcagccctgaccccactccttcccagaatccactgagtttgatgatgacacagatgtccaagtacgctatgccatcatctaccccgctgtatcacaacgcaatcaagacgattgccacatcggatgacgagctcctacctgaccgtccactcctgcccccccccccacccccacagggctctggtcccggcattagtaactcccagccaagccaaatgcacctgaactccgcggctgctcagtctcccatggggatgaatctaccaggccaacagcctctgagccacgagccgccaccggccatgctgcccagcccaacaccactgggaagcaacattccactgcatcctaacgcccaaggaaccgggggaccaccccagaactctatgatgatggcccctggaggacctgattcgctgaacgcaccttgcgggcctgtcccatcctcatcacagatgatgcctttccccccacgcctacagcaaccccatggagctatggcacccactggcggtggtggagggggacctgggctacagcaacattatccctcagggatggcacttcccccagaagacctacctaaccagcccccgggtcctatgccaccacagcaacacctcatgggaaaggcaatggccgggcgcatgggtgacgcctatcctccaggggtgttgccaggcgtcgctagtgtgctgaacgaccccgagctgtctgaggtgatccgacccaccccaacagggattccggaattcgatttgtctcgtattataccatccgagaaaccgagctcaaccctgcagtactttcctaagagtgagaaccagccccccaaagcacagccacccaacctacatctgatgaacctacaaaacatgatggccgaacaaacacctagcagacctcccaatctgcccggccagcagggagtgcagagaggactaaatatgagcatgtgccatcctggccagatgagcctcctaggtcggacaggcgtgcctccccaacaggggatggtcccccatggcctacaccagggggtcatgtctccacctcagggcctgatgacccagcagaattttatgttgatgaagcaacggggagttgggggtgaagtgtattctcaacctccgcatatgctcagtcctcagggctcattaatgggcccgcccccccaacaaaatctcatggtaagccatccattgcgccagaggagcgtgtcgctggacagtcagatgggatacttgcctgcccccgggggcatggcaaacctccctttttag

SEQ ID NO: 256233 - DNA, 4188 bp, Artificial Sequence
  derived and/or modified sequence
atgcggatcctggccaacaagacccggctgccccacccccggcggcgcgaggcccccgggtcccctccattgtctccccgaggacactgtcctccagcccccgctaaaccaatgcaccctgaaaataagctgaccaaccacggcaaaaccgggaacggaggcgctcaatcccagcatcagaacgtcaaccaggggcccacctgtaacgtgggaagcaaaggcgtgggcgcgggcaatcacggtgccaaggcaaatcagatctcacccagcaactcttctctgaagaatccccaggcaggggttccccccttctcttcactcaaaggcaaggtaaaaagagatcggagtgtatccgtagacagcggggagcaaagagaagctggaacaccatctctggattcagaagctaaggaagtcgccccgcgctctaagcgcaggtgtgttctggaacgaaagcaaccctactccggagatgagtggtgtagcggaccagatagcgaggaggatgataaaccaatcggagctactcataactgcaacgttgctgatcccgctatggcagcccctcagttaggacccgggcaaactacccaattgccactgagtgagagcagtgttcctggcgcgcctcacggtccacctccaggtctgcgtcctgacgctcccgggggcggcggcggtggagggggcgttcctggcaaaccccccagccagttcgtttacgtgttcacaacacacctcgccaacaccgctgctgaagccgttctacagggacgcgccgactccatcctggcttaccatcagcaaaatgtgccgcgcgcaaagcttgaccaggcccccaaggttccccccacccccgagcctctgcccttgtccactccctcagccgggaccccccagagtcagcccccacctctgccccctcccccaccaccagcccccgggtcggcccctccagcgttaccacccgaagggcctccagaagattcttcccaggacttggcacccaactctgtaggcgcagcatctactggcggggggaccggcggaacccaccccaataccccaactgccacgacagctaacaatcctctgccaccagggggcgatccatcaagcgctccggggccagccctgctgggggaagccgccgctccaggaaacggccagagatcattagtggggtctgagggcctgtctaaggagcaactcgaacatcgtgagcgcagtctacagaccttacgggatatcgagagacttctcctccggagtggagagaccgagccttttctgaaagggcctcctggcggcgctggggaaggggggccccctgctcaggcacccccccctcctcagcagccccctacagccccgccttccggcctgaagaaatatgaggaaccacttcagagtatgatatctcagactcaatcccttggcggtccacccttggagcacgaggtgcccggacaccccccgggcggggacatgggacaacagatgaacatgatgattcagaggctcggccaggacagtctgacccccgaacaggtcgcatggcggaaactgcaggaagagtattacgaagagaagaggcggaaggaggagcagatcggcctccacggcagccggccgctccaagacatgatgggaatgggtggcatgatggtcagggggcccccacctccataccatagcaaaccaggcgaccagtggccgcctggtatgggagcgcaacttcggggaccaatggatgtccaagacccgatgcagctacggggaggcccgccattccctggccctaggttccctggcaatcaaatacagcgggtgcctggtttcggcggtatgcaatcaatgcccatggaagtgccgatgaatgctatgcaacggcctgtgaggcccggaatgggctggaccgaagatctccctcccatgggaggaccaagcaattttgcacagaacaccatgccatatcctggaggacagggtgaggcagaaagattcatgactcccagggtcagggaggaactgttgcgtcatcagctgcttgagaaacgcagtatggggatgcagcgcccattgggaatggcagggtctggcatgggccagtccatggagatggaacgaatgatgcaggcacaccggcagatggaccccgcaatgtttccaggccagatggccggtggcgagggcctcgccggcactcctatgggcatggaattcggaggggggcggggcctgctgagccctcctatggggcagtccggcttgcgggaggtggaccccccgatgggaccaggaaacctgaatatgaacatgaatgtgaatatgaatatgaatatgaacctgaacgtgcagatgacaccccaacagcagatgctgatgagccaaaaaatgcggggccctggcgatcttatgggtccccaggggctgagtccggaggaaatggcaagggttcgcgctcagaattcgtctggggtgatgggagggccgcaaaagatgcttatgccctcgcaatttcccaaccaaggccagcagggattctctggcgggcagggcccttaccaggcgatgagtcaggatatggggaatacccaggacatgttttctcctgaccaaagttcaatgcctatgtctaatgtggggacaactcgactgtcccatatgccactgccgcccgcctccaacccgcccggaactgtccactcagcacctaaccggggtctaggccgtaggccctccgacctgaccattagtataaatcagatggggagtcctggtatgggacacctgaaatctcccaccctgagccaagttcattcacctttggtcacatccccgtcagcaaacctgaaatcaccacagactccctcccagatggttcccctgcctagcgcaaacccacccggcccattgaagagcccgcaagtgctagggagctctctctcagtgcgcagccccaccggctcccctagtcggctaaagagcccaagtatggccgtgccctcaccaggctgggtagcctctcccaaaactgccatgccatcccccggcgtatctcagaacaaacagcctcctctgaacatgaattccagtactaccctgagcaacatggaacaaggtactttacctccgtctggccctagaagctcctcctcggctccccccgctaaccctccttccgggctcatgaatccatctctcccatttacatccagtccagatcctaccccatctcagaatcctctcagtctgatgatgacacagatgagcaaatatgctatgccgtccagcaccccactctatcataatgcaatcaagaccatcgctacctctgatgatgaactcttgcccgatcggcccctcttgccccccccccctccacctcagggatccgggccaggtatttcaaatagccagccctctcagatgcacctcaactcggcagctgcccaatccccgatggggatgaacttaccgggccagcagccactttcccatgagccccccccggcgatgctgccctcccccactcctctggggagcaacatccctctgcaccctaatgcacagggaaccggggggcctccccagaactcaatgatgatggctccgggaggacctgacagtctgaatgctccatgcgggcctgtcccttcctcttcccaaatgatgcccttcccacctcggctgcagcagccgcacggagccatggcgcctacaggagggggcggagggggcccaggactacagcagcactatccatccggcatggcgctgcctcctgaagacctgcccaatcagccgcctggacccatgccgcctcagcaacacctgatgggaaaagcaatggcaggcaggatgggcgacgcctatcccccgggcgttctgcccggggtggcttctgtgcttaatgatccggagctgagcgaagtcattcgacccacgcccaccgggatccctgagttcgacctctctcgaattattccatcagaattcttacgcacacggccattctcattctgtctgtatctgttaagaatcctgtccctgctaatgtggcttactcccttgcccccactacccgctggaggctggccaggaggccaagtccctgccggtgccgtcaaccgagcccttcgattctgtgccggtctgtgtgtatgctgcatttccgtgttctag

SEQ ID NO: 256234 - DNA, 4365 bp, Artificial Sequence
  derived and/or modified sequence
atgcggatcctggccaacaagacccggctgccccacccccggcggcgcgaagcgcctgggtcacctccactaagtccaagagggcactgcccaccagctccggcaaaacccatgcatcctgaaaataagctcaccaaccatggtaaaacagggaacggaggggctcaaagccagcatcagaacgtcaaccagggcccaacttgtaacgtggggtccaaaggcgtgggcgccgggaaccacggggctaaggccaatcagatttccccctctaatagtagcctcaagaacccacaggccggagtacccccgtttagttctctgaagggtaaggtgaaacgagataggtcagtcagcgtggactctggggagcaacgtgaagctgggactccttcgcttgactccgaagcaaaggaagtcgctcccagatccaaacggagatgtgttctcgaacgaaagcagccctactcgggcgacgagtggtgcagtgggccggactcggaagaggacgacaaaccgattggcgccactcacaattgcaacgtagccgatccagccatggctgcgccacaactgggccccggccagaccacacaactccccctgtccgagtcctcagtgccaggagcgccacacggacccccaccaggcctaagacctgatgctccaggagggggcggaggcggggggggggtgcctggcaaaccaccgtctcaattcgtttacgtgttcaccacccacctagctaacacagcggcagaagcagtgctgcagggccgcgcagactccattctcgcatatcatcagcagaacgtcccccgcgctaagctggatcaggcacccaaggtgcctcctactccagagcccttgcctctttcaactccatccgccgggactcctcagtcccagccccctccacttccccctcccccacctccagccccaggatctgctcctcctgcccttcctcctgagggccccccagaggacagcagccaagatttggccccaaactctgtaggcgccgcaagcacgggggggggaacgggcggcacgcatcccaacaccccgacagcaaccaccgcgaacaatcccctccccccagggggggatccctccagcgcgccaggccctgcactcctcggcgaggccgccgcacccgggaatggccaaagaagtctggtggggtctgagggactgagcaaggagcaattggagcaccgcgagaggtcactgcagacacttagagacatcgagaggctactcctccggagcggtgaaacggaaccattcttgaaaggcccaccaggaggcgctggggagggagggccccccgctcaggctcctcctccccctcagcagcctccaacggcacctccttccgggttaaagaagtatgaggagccgctgcagtctatgatttctcaaacgcagtcccttggtggcccgcccctagagcacgaggtccctggccacccacctgggggcgacatggggcaacaaatgaacatgatgatacagaggttaggacaggatagtcttaccccggagcaagttgcttggagaaaactgcaagaggagtattacgaggagaagagaaggaaggaggagcaaattggcttacacggctcacgtccccttcaggacatgatggggatgggtggtatgatggtcagaggtcccccaccgccttaccacagcaaaccgggtgaccagtggccaccaggcatgggtgcacagcttcgcggccctatggacgtgcaggacccgatgcagcttaggggtggacccccattccccggaccacgcttccccggcaaccaaatccaacgcgtccccggcttcggcggtatgcagagcatgccaatggaggttcctatgaatgctatgcagagaccagtccgtcctgggatgggttggacagaggacctacctcccatgggggggccttctaatttcgcccaaaacactatgccctaccccgggggccagggcgaagcagaaaggttcatgaccccccgagtccgggaggagctgcttcgtcaccagttactggaaaagaggtccatgggtatgcagcgcccacttggaatggccggtagcggcatgggacagtctatggagatggagaggatgatgcaagcgcacaggcagatggatccagcgatgtttcctggacaaatggctggcggggagggactagctggtacccctatggggatggaatttggcggcggccgaggactgctgtcgcccccaatggggcagtcaggcctgcgggaggtcgatccacccatggggccaggaaacctgaacatgaacatgaacgttaatatgaacatgaacatgaatttaaacgtccagatgacaccgcaacaacagatgctcatgagccaaaagatgagggggccaggggatcttatgggaccccaggggctgagcccagaggagatggcacgagtgcgcgcacagaactccagtggtgtcatgggtggcccacaaaagatgctgatgccttcccaatttcctaatcagggccaacagggcttttctggggggcagggcccttatcaagccatgagccaagacatgggaaacacacaggacatgttttcccccgatcagtcaagcatgccaatgagcaatgtgggtacaacccgcctctctcacatgcctctccccccagctagtaacccccccggaaccgtgcattccgcccccaaccgaggtcttggtaggcgcccatcagatctaaccatttccattaatcagatgggatcaccgggcatgggacacctgaagtcccctactctttcacaggtccacagtcctctggtgactagcccgagcgccaatctgaagtctccacagaccccaagtcagatggtacctctgccatctgccaaccctcctggacctttgaaaagtcctcaggttcttggatcttcactcagcgtgaggtcacctacaggctccccgtccagacttaaaagcccttccatggcagttccctcccctgggtgggtagccagccccaaaactgccatgccttcaccaggggtaagccagaacaaacaacccccacttaacatgaactccagcacaaccctgtcaaatatggagcagggtactctgccaccttctggccctcggtctagcagctcggcacccccagccaatccacccagcggactgatgaatccaagcctgccattcaccagctctccagacccgaccccaagccagaacccactatccctcatgatgacccagatgagtaagtatgccatgccttcatcaactcctctgtatcacaacgcgatcaagacgatagctaccagcgatgacgagctcctgcccgatcgcccattactgccccctccgcctcctcctcagggttctggccccggaatcagcaatagtcagcctagtcagatgcatctgaactcggctgcggcccagagccccatgggtatgaatctgcccggacaacagccactatcacatgagcccccccccgccatgcttccgtcaccaacgcccctgggcagcaatatcccattacacccgaatgctcaaggcactgggggaccaccccagaattctatgatgatggctcccggcgggccagattcgctcaatgcaccatgtggccctgtgccttcaagttcacagatgatgcctttcccgccccgcctgcagcagcctcacggagctatgatggcggggagaatgggggacgcctacccaccaggagtgttgcctggagtggcctccgtccttaatgaccctgagctgtcggaggtgatcaggcctaccccaacgggcattcccgagttcgatctgtccagaataattcctagcgaaaaaccttcttccacgctccagtatttcccgaagtcagagaaccagcctcccaaggcccagccacctaatctccacctcatgaatctgcaaaacatgatggctgagcaaacgccgtcacgacctccgaatctccctggacagcagggtgttcaacggggactgaatatgtccatgtgccatccaggacagatgagcttgctgggaagaaccggagtccccccacagcaaggaatggttcctcatgggttgcaccagggagtcatgagccctccgcagggtctcatgacccagcagaactttatgctgatgaaacagaggggtgtggggggggaggtttactcccagcctccccatatgctgtctcctcagggctctctgatgggaccaccccctcaacaaaatttgatggtttctcatccccttcgtcagcgttcagtcagcctggattctcaaatggggtatctgccggccccaggaggtatggccaacctgccgttctag

SEQ ID NO: 256235 - DNA, 4499 bp, Artificial Sequence
  derived and/or modified sequence
atgagaatcctggccaacaaaactcgcctgccccacccacgcaggagagaggccccaggaagccctcctctaagtccaagaggacattgcccacctgcacctgctaaaccaatgcaccccgaaaataagctgaccaatcacgggaagaccgggaatggtggagcccagtcacagcatcaaaatgtgaaccagggacccacgtgtaacgtgggatccaagggggtcggtgccggtaaccatggcgctaaagctaatcaaattagcccatcaaactctagcctgaaaaacccacaggccggagtcccaccattttccagtctgaagggtaaggtgaagcgagatagatctgtatccgttgactctggcgaacagcgagaagccggaacacctagcttggacagtgaagccaaagaggtggcacctcgtagcaagagaagatgcgtcttggaacggaaacagccgtactctggagatgaatggtgttctggacctgattcagaggaagacgataagccaatcggagccacgcataactgcaacgtggcagatccagcaatggccgctccacagttgggaccaggccagactactcagctgcctttgtctgagagctcggtgcccggtgcccctcacggacccccaccaggccttcgcccagacgcacccggtggaggagggggaggcggaggcgttcccggaaaacctccaagccaattcgtctatgtgtttaccactcacctcgcgaatacagcggctgaggctgtgctacaggggagggccgatagcattctggcttatcatcagcagaacgtgcctcgggcaaagctggaccaggcccctaaggtgcctcccaccccagaacctctgcccctctcgacgccctccgctgggaccccacagtcacagcccccacccctgccaccaccgccaccacccgctccgggatctgctcctcccgctcttccacctgagggcccaccagaggactcaagtcaggacctggcgccaaacagcgtgggagccgcttccacaggcggaggaaccggaggaacccaccctaacacaccaactgccacaacagccaataaccctttaccgcctgggggtgatcctagcagcgccccaggccctgccttgcttggcgaagcggctgcgccaggaaacggtcagcgaagtctggtcggatcagaagggctgtccaaggagcagcttgaacacagggagaggagtcttcagacgctcagggacatcgagcgcttactgctgaggtccggggagaccgagccgttcttgaagggtccgcctggaggcgctggagaaggtgggccaccagcgcaagcccctcctccaccccagcagccacctacagcacccccatctggactaaagaagtacgaagaacccctgcagagtatgatcagccagacccagtccctgggcggtcctccacttgagcacgaagtgcccggtcatccacccggaggggacatgggccagcagatgaatatgatgatacagaggcttggccaagactcgctaacacctgagcaagtagcttggcgtaagctccaggaagagtattacgaggagaagcggaggaaggaggagcagataggtcttcacggctcaagaccacttcaagacatgatgggcatgggtggaatgatggtgcgtggacccccacctccctaccattccaagccaggcgaccagtggcctccgggaatgggcgctcagctgcgtggaccaatggacgttcaggaccccatgcagctaaggggcggaccaccctttccagggccaaggttccctggtaaccagatacagcgcgtgccgggtttcggtggcatgcagtctatgccaatggaggtgcctatgaatgcaatgcagaggcccgtaaggcccggtatgggctggaccgaagacctccctcctatgggcggtccctcgaatttcgctcagaataccatgccttaccccggaggtcaaggggaagcggaacgtttcatgacccccagagtgcgcgaggagcttttacgacaccagttgttggaaaaacgctctatgggtatgcagcgtcccctgggcatggctggaagtggaatgggtcagagcatggagatggagcgaatgatgcaagcccacaggcagatggatccagctatgtttcccggacaaatggctggcggagaaggattggcgggtacccccatgggcatggagtttggcggagggcgtggtcttctgtcccctcccatgggacagtccggccttcgggaggttgacccaccgatgggcccaggcaatctcaatatgaacatgaatgtgaacatgaacatgaatatgaatcttaatgtgcagatgacaccccagcagcagatgctgatgtctcaaaagatgagggggccaggggacctgatggggccacaggggttatcacctgaggaaatggcgagggttcgcgctcaaaacagcagtggtgtcatgggcggtccacagaagatgttaatgccaagccagtttccgaaccagggccagcagggcttcagcggtggacagggcccataccaggccatgtctcaagacatgggaaatacccaagatatgttttctcctgatcagtcttcgatgccaatgagtaacgtggggactactaggctcagtcatatgcctcttcctcctgcctccaatccgcctggcaccgtgcatagcgccccaaataggggcctcggaaggcgacctagtgacctcaccatctctattaaccaaatgggctcaccaggcatgggacacctgaaaagcccaaccctgtcgcaggtacatagccctctcgtaacaagcccgtcagcgaatttgaaatcaccacaaacaccatcacaaatggtgccactgcccagtgccaaccccccaggacctctaaagtcaccgcaagtgcttggtagctccttgtctgtccgaagcccaaccggtagcccaagccgactcaaatctcctagtatggctgtcccaagtcccggatgggtcgctagccccaaaaccgctatgccatccccgggagtgagtcagaacaagcaaccaccattgaacatgaacagtagcaccaccctaagtaacatggaacaaggaaccctaccccctagcggacccagaagttcaagtagcgcacctcccgctaaccctcccagcggactcatgaacccctccctgccctttacgagcagcccagaccctaccccttctcaaaaccccctcagccttatgatgacccagatgagtaagtatgcaatgcctagcagcacccctctgtaccataatgccattaagacgattgcgacgtccgacgacgagctgttacccgatcgcccactgctgccaccccctcccccaccccagggctcgggccctgggatctctaactcacagccgtctcagatgcatttgaatagcgcagccgctcagtcacccatggggatgaatctcccaggtcagcagcccctgagccacgagccgcctcccgcaatgctgccgtctccaactcctctcggcagtaatatcccactccatcctaacgcacaggggaccggtgggcctccacagaattccatgatgatggcaccaggtgggcctgatagtctaaacgctccatgcggccctgtcccttctagtagtcagatgatgcccttcccccctagacttcagcagccccatggtgcgatggccccaacagggggtggaggaggcggaccagggctgcagcaacattatcctagcggaatggctttaccacccgaagatctgcccaatcagcctcctgggcctatgccaccacaacagcatctaatggggaaggccatggccggacggatgggggacgcctatccaccaggggtcctcccaggagtggcttcagtcctcaacgatccggaattatcagaggtaatcaggcccactcctaccggaataccagaatttgatttgagcaggatcatcccttccgagaagccttcctccacgctccagtactttccgaaatcggagaaccagccccctaaggctcagccgccaaatctccacctcatgaacctccaaaatatgatggcagagcagactccctcacggcctcctaacctgcctggacagcagggagtacagcggggtctcaacatgagtatgtgccacccgggtcagatgtctttactgggacggaccggcgtccccccacagcaggggatggtaccccatggtctccatcagggtgtaatgtccccccctcagggtctgatgacccagcagaactttatgttgatgaaacaacgcggagtgggaggcgaggtgtattctcagcctcctcacatgctgtccccccagggctcgcttatgggccctccccctcagcagaacctgatggtttcacatccattacgacagagatcggtgagcctggactcacagatggggtatcttccagccccaggagggatggctaaccttcccttcta

SEQ ID NO: 256236 - DNA, 4188 bp, Artificial Sequence
  derived and/or modified sequence
atgcggattctggctaacaaaacccgcctgcctcacccgcgtcgtcgggaagcacccggtagccctcccttgtcacccagaggtcattgccctcctgccccagctaagccgatgcaccccgagaataagcttactaaccacggcaaaaccggaaatggcggagcgcagagccagcatcaaaacgtgaaccagggacctacttgcaacgtcggctctaagggggttggagccggtaaccacggtgctaaggctaaccagatctctcctagcaattcttcgctcaaaaacccccaggccggtgtacctcctttctcttctctgaaaggcaaagtcaaacgagacaggtccgtgagtgtagactctggggagcaacgggaggccggaacccccagtttggatagcgaagctaaagaagtcgctcccaggagtaagcggagatgcgtcctggagaggaaacagccctacagtggcgatgagtggtgttccggcccagattccgaagaggacgacaagcccattggtgccacccataattgtaatgtggcagaccctgccatggccgcacctcaattgggtccaggccagactacccagctgccactgtcagaatcttccgtgcctggggctccacacggccctccacccggtctgaggcctgatgctcctggcggtggcggagggggtggaggcgttcctgggaaacctcccagccaattcgtgtatgtatttacgacacatcttgctaataccgctgctgaggctgtgctgcagggaagagctgatagtattctagcctaccatcaacagaacgtaccgcgagctaaactggaccaggcacctaaggtgccaccaacccccgaacccttgccactgagtacccctagtgccggtactcctcagtcacagccaccaccattacctccacctcccccaccggctcctggctccgcaccaccagcacttccccctgaggggccacctgaagacagctcacaggacttggcaccaaactcagtcggcgcagcctcaactggcggaggcaccggtggaactcatccaaacactccaacggccaccactgccaacaaccccctgccgccaggaggagacccctcgtccgcgcctggtcctgcactattaggcgaagccgctgcacccggtaacgggcagcgatccctggtggggtccgaaggacttagcaaggagcaactggagcatcgggagagaagccttcaaaccttaagggacattgagcggctgcttctcagaagtggcgagacggagccgtttttgaaaggacctcctgggggagccggagaggggggtccacccgctcaagccccaccccctccacagcaaccaccaaccgctccaccttctgggctcaagaaatatgaggagcccttgcagtccatgatttcccagacacaatccttgggtggtccacccttagaacacgaggtgcctgggcaccctcccggaggagacatgggccaacagatgaacatgatgattcaacgtctgggccaagactcgttaactcccgagcaggtcgcttggcgcaaattgcaggaggagtattatgaagagaagcggaggaaagaagagcagatcgggttacatggctcacgacctctgcaggatatgatgggcatgggaggcatgatggtgcggggtccccctcctccgtaccattcaaaacccggagaccaatggccccctggcatgggtgcccagctcagaggtccgatggatgtgcaagatcccatgcagctgcgcggaggccctcccttccccggaccccgatttcccggaaatcagatacagcgcgttccagggttcggtggaatgcagagcatgcctatggaagtgccaatgaatgccatgcagagacctgtgcgcccaggaatggggtggacagaggatctgcctcccatgggcggtcctagcaattttgcccagaatacgatgccctacccaggtggacagggcgaggccgagcgtttcatgaccccgagggtgagagaggagctgttacgacaccagcttctggagaaacggtcaatgggcatgcagcgaccacttggaatggcaggtagtggtatggggcagtcaatggagatggagaggatgatgcaagctcacaggcaaatggatcctgccatgtttccaggacagatggccggtggcgagggcctggcgggtaccccaatgggcatggaatttggcggagggagggggctgctgtcgcctccaatgggacaatccggattgagagaagttgacccgcctatgggtccaggaaacctgaatatgaacatgaacgtgaacatgaacatgaatatgaacctcaacgtccaaatgacgccccagcagcaaatgctgatgtctcagaaaatgcgtgggccaggtgatttaatgggccctcagggcctctctcccgaggaaatggcaagggtgagagctcagaatagctcgggagtgatggggggaccccagaaaatgcttatgccaagtcaatttcccaatcagggccagcagggattctctggaggccaaggcccataccaagctatgtcccaggacatgggcaatacacaggatatgttttctcctgaccagtcaagtatgcccatgtcaaacgtaggcacgaccaggttgtctcatatgccattgcctcccgcttctaaccctccaggtacagtccactcagctcccaatcggggtttgggcaggagaccaagcgacttaaccatcagcataaaccaaatgggtagtcctgggatgggccatttgaagagtcccaccctttctcaggttcattcccctttggtcacttcaccatcagctaaccttaagtctccccagacccccagccagatggtaccactccccagcgccaatcctccgggaccccttaagagcccacaggtgttaggctcatcattaagcgtgagaagccccaccggatcaccttcaaggctcaaatctccttctatggccgtgccttccccagggtgggtcgccagtcctaagacagcaatgccatcccccggagtaagtcagaataagcagccacccctgaacatgaattcaagtacaaccctgtctaacatggaacaaggaaccctgccgccatccggccctagaagctctagcagtgcaccaccggctaatcccccatccggccttatgaatccctccttgccttttacttcatcccctgatcccactccatcacagaatcctctgtccttgatgatgacccagatgtccaaatatgctatgccaagcagtacacccctctatcataatgctattaaaacgatcgccaccagcgatgacgaactgcttcccgaccgaccgttgctacctcccccacctcctccacaaggtagcggcccaggtatcagcaattcacaaccaagccagatgcatctcaactcggcagccgctcagtccccgatgggaatgaatctccctggccagcagcccctgtcacacgagccaccccctgccatgctccctagccccacaccgctgggcagtaatattccactgcaccctaacgctcagggaaccggtggccctccacagaacagcatgatgatggccccaggcggtcctgacagcttgaacgctccatgcggaccggtgccatcttctagtcagatgatgccgtttcctcccaggctccagcaacctcacggtgcgatggcccctactggaggtggcggtggaggcccagggctgcagcagcactatccttctggtatggccctccctcctgaggatttacctaaccagcctcccggaccaatgcctccccagcagcatttgatggggaaggccatggcgggacgaatgggtgacgcttacccccctggtgtgctcccaggtgtggcatctgtccttaatgaccctgagctttcggaagtgatcagacctactccgaccgggatacctgaatttgacctatcccggataattcctagcgaattcctacgaaccaggcccttttccttctgtctctatcttttaagaattctgtctctgttgatgtggttaacaccgctcccacccctgcccgcaggcggttggccaggcggacaagtccccgctggcgctgttaatcgcgcactcaggttttgtgccggattatgtgtgtgctgcatctcagttttttag

SEQ ID NO: 256237 - DNA, 4365 bp, Artificial Sequence
  derived and/or modified sequence
atgagaattctggccaataagactcgacttcctcatcctcgtaggcgagaagcaccaggaagtcctcctcttagcccgaggggtcactgtccccctgcccctgccaaaccgatgcatcccgagaataaattaaccaatcacggaaaaaccggaaatgggggagcacagtctcagcatcagaatgttaaccaaggaccaacgtgtaatgtggggtctaagggcgtgggcgcaggcaaccacggggctaaggctaaccagataagtccatcaaacagttctctaaaaaacccgcaggccggagtccccccattctcatctttgaagggaaaggtaaaacgcgatcgcagcgtgtccgtggactctggcgagcagcgagaggccggtaccccaagcttggattccgaagcaaaagaagtggcccctagatccaaacggaggtgcgtgctcgagcgcaaacaaccctactctggcgacgagtggtgttcgggaccggactcagaagaagacgataagcccattggtgctacacataactgcaacgtggcagatcccgcaatggctgcaccccagctggggcctgggcagactacccagctcccactgtccgagtcttcggtgcccggagcaccacatggaccccctcccggactgcgaccagatgctcccggagggggaggcggtggcggtggagtgcccggtaagcccccaagtcagtttgtgtacgtattcactactcatctggcaaacaccgccgcagaggctgtactgcagggcagagccgactccattctcgcttaccaccaacagaatgtgccacgagcaaaactagatcaagcacccaaggtacctccgacgcccgaacctctgcctttgtcaaccccttctgccggtacaccacagtctcagcctcctcctcttccaccaccaccaccaccagcccctgggtctgcgcctcccgctctaccgccagagggccctccagaggatagctctcaggacctagctcctaactcggtgggagccgcttctacgggagggggtactgggggaacccatcccaatacaccaactgctacaactgctaacaacccgctccccccagggggtgatccgagctccgcaccagggcctgcacttctcggagaggcagccgcaccaggtaatggtcagaggagcctggtaggcagcgagggactgtcaaaggagcagctggagcatcgtgagagatcactccagaccctgcgtgacattgagcgcttactgctacgctccggtgagactgagcccttcctgaaggggccacccggaggggcaggtgagggcggaccacccgcacaggctcctccacccccacagcagcccccaacagcgcctccttccggactaaaaaagtacgaggaacccctccagtccatgattagccaaacccaatccctgggtggccctccactggagcacgaggtccccggacaccccccagggggagacatggggcagcagatgaatatgatgatacaacgccttggacaggacagcctaacacctgagcaggtggcttggaggaagctccaggaagagtactatgaagaaaaacgccgtaaggaggaacaaataggcttgcacggctcaaggcctttgcaggacatgatgggtatggggggaatgatggtgagaggccctccaccaccctaccattctaagcctggagaccagtggccccctggaatgggggctcagctccgagggccaatggatgtgcaggatcctatgcaactgagagggggtcccccttttccaggtccacggtttccagggaaccagatccaacgggtgcccggtttcgggggaatgcagtcaatgccaatggaggtgcctatgaatgccatgcaacgaccggtgaggcctggcatgggctggactgaagatctgccaccaatgggtgggccatctaactttgcgcagaatacaatgccgtaccctggcggtcaaggtgaagccgagaggttcatgacgccaagggtgagggaggagctcctgagacaccagctgcttgagaaacggagcatgggaatgcagcgtccactcggtatggcaggatccggcatgggccagtctatggagatggaacggatgatgcaggcccacaggcagatggaccccgcaatgttccctggccagatggccggaggtgaaggcttggccggtacccccatggggatggaattcggcggaggtcgcggattattaagtccccctatggggcagtccgggctccgcgaggtggaccccccaatggggccaggaaacctcaatatgaatatgaacgtaaatatgaatatgaacatgaacttgaacgtccagatgaccccccaacagcagatgcttatgagccaaaagatgaggggacccggtgatctcatgggaccgcagggactaagtcctgaagagatggccagagtacgggcacaaaactccagcggggtgatgggcggtccacagaaaatgctgatgcctagccagttccccaatcagggtcagcaggggttcagcggagggcaggggccttaccaggccatgtctcaggatatgggcaacacacaagacatgtttagccccgaccagtcttctatgcccatgagcaacgttggtacaacaaggctgagccacatgcccctgccccctgcttctaacccgccagggactgttcacagcgcgcctaatcgtgggctgggacgcagacctagcgacttaactatatctatcaatcagatggggtctcccggaatgggccacctgaagtcacctacgcttagtcaggtacactctcccctcgtcacaagtcccagcgctaacctgaagagtcctcagaccccgtcccagatggtccctctgcccagtgccaaccccccaggaccattgaagtccccgcaggtgttaggctctagtttgagcgttcgatcccccactgggtcaccaagccggctgaagtcgccctctatggccgtgccctcccctggatgggttgcaagccctaaaacggctatgccctctcctggagtcagtcagaataaacagcctcccctgaacatgaattctagcacaacattatccaatatggaacagggcacactcccgccatccgggccacggtctagcagtagtgcacctcctgccaaccctccgtcaggcctcatgaatccttcactcccatttacctctagcccagatcctacgccctctcagaatcccctgagtctgatgatgacccagatgtctaaatatgcgatgccttcctctactccactgtaccataatgcgataaagactatcgctacgtccgacgacgagctcctgcctgataggccgcttctgccccctcctcctccccctcaagggtccggacccggtatctccaactcccagcctagtcaaatgcatcttaacagcgcagcagcacagagcccaatgggaatgaaccttccagggcaacagcctctgtctcatgagcctccccctgccatgttgcctagtcccactcccttgggcagcaacatacccctgcatcccaacgcccaggggaccgggggaccaccacaaaatagcatgatgatggcacccggaggtccagattcactcaatgcaccatgcgggcctgtcccgtcttccagccagatgatgcccttccccccacggctgcaacagcctcacggagcaatgatggctggcagaatgggcgacgcttacccaccaggggttctacctggcgtggcatctgtgctgaacgacccggaactgagtgaggtcataagaccaacccctaccggaatccccgagttcgacctctcgcgcatcatcccatctgagaagccgtctagcacactgcaatactttcctaagagtgaaaaccaaccgcctaaggcccaacctccgaacctccatctaatgaaccttcaaaacatgatggctgagcagaccccatcccggccaccgaatctccccggacagcagggtgtccaaagaggtctgaacatgtcaatgtgtcatccgggtcaaatgtctttgctaggcagaaccggagtccctccacagcaagggatggtgccacatggactccaccaaggagtcatgagccctcctcagggcctgatgactcagcaaaattttatgctcatgaagcagagaggagtgggtggggaagtgtatagtcagcccccacacatgctctctcctcagggcagtctgatgggaccaccccctcaacagaatctaatggtctcccatcccctgaggcagagatccgtgtccctggattctcagatgggctacctgcccgctccgggtggaatggccaacctgcccttttag

SEQ ID NO: 256238 - DNA, 10005 bp, Artificial Sequence
  derived and/or modified sequence
cgtgcgtgtcttgtctccctgtccacgtgtgagctgtgagtgtgtgtgagtcagagttcgggtgtctgtgggtctctgagcctctgctggcagcacccggggctcgccaagctcttgccggctggcgcgcgcccagcccctggcgggacttgtccgtgtgtctgtccgcgcgcggggcctggagaagcacgctgcagtcctgtccgcctcccgctcgctgcctcgctggctgtcgctcgctcgctctgcctctccgcccgggctctgccgaagggggcggggtgggggtgcagggcggggggaggggaggctcctgcattcttgcggtcggggaggaatccgagccagcgttactggtctccagaagagcccagctgcagccccggggccccgccaggcctctcgctgcccgcccgggcctgctgggatgggcacgggctaggcctcgagctggggacggggcggggcgtggccccaaccccgggccccctccacggctggagcgctctgggggtggggcacgaggggtaccccaccctgggtgaggggcgcgtctgggagcaggaatccctcagggggccaggggagacctcacagccgccccacacggcacctttgctacctagccttttagtgaattctgtctctgccgcccgtcggggcggaggcttgctggagactgcaagccccctgagggcaaggtgcgggagggatggggacagggctggcctccaggatcgagaccccatctcgtaatcctctttttccagtgccaccccaccctatccagctccctagtcccagggctgttgggtcctcccttctcccctccccctctgacaccccctccccaagtcacgagttttctctttggggcttgttgctgcagtccgtgctccagtaccgagtacctggctgggccctgggcacgcacaggggccgtagccccactgtgtgtgggagccatgaggatcctggctaacaagacaaggttaccccaccccaggaggagagaagctccagggagcccgccgctgtccccccgcggtcattgcccccctgccccagccaagccaatgcacccagaaaataaattgaccaatcatggcaagacagggaatggcggggcccaatctcagcaccagaatgtgaaccaaggacccacctgcaacgtgggctcgaagggcgtgggggcggggaaccatggggccaaggccaaccagatctcgcctagcaactcaagtctgaagaacccccaggcaggggtgccccctttcagctcgctcaagggcaaggtgaagagggaccggagtgtgtctgtggactctggagagcagcgagaggctgggaccccatccctggattcagaggccaaagaggtggcgccgcggagtaagcggcgctgtgtgctggagcggaagcagccgtacagtggggacgaatggtgctctggaccggacagtgaggaggacgacaagcccattggggccacccacaattgtaatgtagcagacccagccatggcggccccacagctgggtcccggccaaaccacccaactgcccctcagcgagagcagcgtgccaggcgccccgcacggccctcctcctggccttcggcctgatgcccctgggggcgggggcgggggcgggggcgtccccggaaagcctccctcgcagttcgtatatgtcttcaccacccacctggccaacacggctgcagaggcagtgctgcagggccgggccgactccatcctcgcctaccaccagcagaacgtgccccgggccaagcttgaccaggcccctaaagtgccccccaccccagaaccgctacccctgagcacgccgtcagcaggcaccccgcagtcccagccacctccactgccgccgccgccacccccggcccctggcagtgccccgcctgctctgcccccagaggggcctcctgaggacagcagtcaggacctggcccccaactcggtgggagctgccagcacaggtggtgggactgggggcacccaccctaacaccccgacggctaccaccgccaacaaccctctgcctcctggaggagaccccagcagtgcccccggccctgccctgctgggggaggcagccgcccctggaaatgggcagcgcagcctggtgggctcagagggcttgtccaaagagcagctggagcatcgggaacggtccctccagacgctgcgagacattgagcgactgctgctccgcagcggagagactgagcccttcctcaaggggcccccaggaggagcgggtgaggggggcccaccagcacaagccccccctcccccccagcagccacccacggcccctcccagcgggctgaagaaatatgaggaacccttgcagtccatgatttcacagacacagagcctagggggccccccgctggagcatgaagtgcctgggcaccccccgggtggggacatggggcagcagatgaacatgatgatacagaggctgggccaggacagcctcacgcctgagcaggtggcctggcgcaagctgcaggaggagtactacgaagagaaacggcggaaagaggaacagattgggctgcatgggagccgtcctctgcaggacatgatgggcatggggggcatgatggtgagggggcccccgcctccttaccacagcaagcctggggatcagtggccacctggaatgggtgcgcagctgcgggggcccatggatgttcaagatcccatgcagctccggggcggacctccctttcctgggccccgtttcccaggcaaccagatacaacgggtacctgggtttgggggcatgcagagtatgcccatggaggtgcccatgaatgccatgcagaggcccgtgagaccaggcatgggctggaccgaagacttgccccctatggggggacccagcaattttgcccagaacaccatgccctacccaggtgggcagggtgaggcggagcgattcatgactccccgggtccgtgaggagctgctgcggcaccagctgctggagaagcggtcgatgggcatgcagcgccccctgggcatggcaggcagtggcatgggacagagcatggagatggagcggatgatgcaggcgcaccgacagatggatcctgccatgtttcccgggcagatggctggtggtgagggcctggcgggcactcccatgggcatggagtttggtggaggccggggcctcctgagccctcccatggggcagtctgggctgagggaggtggacccacccatggggccaggcaacctcaacatgaacatgaatgtcaacatgaacatgaacatgaacctgaacgtgcagatgaccccgcagcagcagatgctgatgtcgcagaagatgcggggccctggggacttgatggggccccagggcctcagtcctgaggagatggcccgggttcgggcccagaacagcagtggcgtgatgggcggcccgcagaagatgctgatgccttcacagtttcccaaccagggccagcagggattctctggaggccagggaccctaccaagccatgtcccaggacatgggcaatacccaagacatgttcagccctgatcagagctcaatgcccatgagcaacgtgggcaccacccggctcagccacatgcctctgccccctgcgtccaatcctcctgggaccgtgcattcagccccaaaccgggggctaggcaggcggccttcggacctcaccatcagtattaatcagatgggctcaccgggcatggggcacttgaagtcgcccacccttagccaggtgcactcacccctggtcacctcgccctctgccaacctcaagtcaccccagactccctcacagatggtgcccttgccttctgccaacccgccaggacctctcaagtcgccccaggtcctcggctcctccctcagtgtccgttcacccactggctcgcccagcaggctcaagtctccttccatggcggtgccttctccaggctgggttgcctcacctaagacggccatgcccagcccgggggtctcccagaacaagcagccgcctctcaacatgaactcttccaccaccctgagcaacatggaacagggtaccctcccgcctagcggcccccggagcagctcctcagcacctcccgccaaccctcccagcggcctcatgaaccccagcctaccattcacttcctccccagaccccacaccttcccagaaccccctgtcactgatgatgacccagatgtccaagtacgccatgcccagctccaccccgctctaccacaatgccatcaagaccatcgccacctcagacgacgagctgctgcccgaccggcccctgctgccccccccaccaccaccgcagggctccgggccagggatcagcaacagccagcccagccagatgcacctgaactcagccgctgcccagagccctatgggcatgaacctgccaggccagcagcccctgtcccatgagcccccgcccgccatgctgccctcccccacccctctgggctccaacattccactgcatcccaacgcacaggggacaggggggccccctcaaaactccatgatgatggccccagggggccccgactccctgaatgccccctgtggcccagtgcccagctcctcccagatgatgcccttcccccctcggctgcagcagccccatggtgccatggcccccactgggggtgggggcggggggcctggcctgcagcagcactacccgtcaggcatggccctgcctcccgaggacctgcccaaccagccgccaggccccatgcctccccagcagcacctgatgggcaaagccatggctgggcgcatgggcgacgcatacccaccgggtgtgctccctggggtggcatcagtgctgaacgaccccgagctgagcgaggtgatccggcccaccccaacggggatccccgagttcgacttgtcgaggatcatcccctctgagaagccaagcagcaccctccagtacttccccaagagcgagaaccagccccccaaggctcagccccctaatctgcatctcatgaacctgcagaacatgatggcggagcagactccctctcggcctcccaacctcccaggccagcagggcgtccagcgggggctcaacatgtccatgtgccaccctggacagatgtccttgctgggcaggacaggcgtgcccccacagcaggggatggtgccccatggcctgcaccagggggtcatgtcccctccacaaggcctcatgacccagcagaatttcatgctgatgaagcagcggggcgtggggggcgaggtctacagccagccgccccacatgctctccccgcagggctccctcatgggccccccgccccagcagaacctcatggtgtcccacccccttcggcagcgcagtgtgtccctggacagccagatgggctacctcccggcaccaggcggcatggccaacctgcccttctagaagtcgctgccagggctggagccggggcaatgttgcaaatacgataaccttaacaaagttcttcccctcaatgttgggatggcctgggtcgcggggtggggtggagggggtgggagggggcttgtgtagggagtggcatttgtggaaaccagatgtgctggcagcttagggggaagtggcagtgtggggtgggggattttgcattggggttggttccatttcggccaccaggactgcccctcccccactcctcccaattcctatggagcctctctattttacctctttccgtgcatccctgcacccgccacacccccttcagctatgcttttggagtcctggatgggaatctggggggagagaggaaggacaggtcaggtctcccccagccccttctgctcctgtctcctcgtgtccgcattgctggagctccacctccctcttggtttctccgcacccgcccattttccttctgtctttacctgcttcgtatcctttccctgctgatgtggctgacccctctcccacccctccctgcaggcggctggccaggtgggcaggtgccagccggagctgtaaatagagcgctgcgcttttgtgctggtttgtgcgtgtgctgtatttctgtgttttgatagaagtcacacaaaaaaaaaaggataaaagaaacccttccccccttcttcaagttattgctccctccattcccctggacccagggacatgcagccctacatggccacccactgtttgcagtgtctctgggtccctaagggataccattcctgtctcgtccccaaatggtaagatgacgtaaatgacccactcctaaactgaggtcagaccacctaggcttccacctggtgagccctagcagggctgagacccccagggcggcagcctgtctgctgctgagtgattcagggagaacatgtgtgcacgtgcatgtgtgtttgcccacaccggtgacacggggccctggctttccactttggatgcccgggcatccgctgctgctacatcttagccagaacttgaagtcttttgtcccagtttgggatgaaggaaaggaggaagaggcggtggctgtgtggcccccttgagtggagccatggaaggggtggcatggtgccactggggcctgtggctgtagtagccctgggccaggtaacctccagggccctgacttttccagaggctgctgccacctacttcttatcaaagaagggggagaacagttcatctgagtcagtgcacctcccctccagtctccactccctgaggatggaatcggggaaacagcatcctgccgcctcctctctgcctgcccactcaccggcaaggttgtccctctgcccagggctcagggccatgtaccagatctgtctgtgcccacccaggcacagccactgcctcccccttggctccctgctcctacccaggagagctccctatccgcctttggtcagagctgaagccatatacgactgggtgtttgtccccctactttggccccaggagtaaaaaaacttctccttttctcacttcctttcctgcctcgggaggtggcagggcagttccctggctgaggccttttgcgccccacctccaggaccaagggccattctagacagggtgtcttctaccaggacccgtccctagccttcctggcctggagggcctggtcttgcactggcagctgtaatacaaagggaactcgccccacttctcccagcctggtgctgtcctctcggcccaccatcggccaggtccagcgcttcctctggggctgacaacaggcccctgactcaccccggtcacctcccagggtccatggccagggcctctgtgtttggggggccacttgcccttcatcctgccaggcgctttgcccgccctgcctcagcctgggccctgtgcccttgagccctccacccctggcccaagacccccccaaactgtctgactctgtgtttcctgccctgaggagagaggggtcagattgcagcgggccgagtgccctctccgtcccctctcctcccacccacgccacaggccagcctactcttccctccatccatggccacacccccagccattttgtaccattatataaatatatatataaatataaatatataaatacaatatgtgaagacatcttcttggtttttattttgaaacaatttttaggcttgttccgggggtctctgtgctgcctgtactgtattgacctgttttataggtgcctttttattaaaaagaaaattcaaaatccagcctcttgcctctttgcatctgcttcagactcccccatcgattacccagcttgcgaggagatactcagagaaaaaagggacgtcttagggcttcctcgttgtcctgccgtgaagacactctcacgtgagccacagctgttatttccccagtggggcctcccaaggagcttggctgcttggcttgagtgggacaagggcaggggtccctgactccccacctgatcaaaggctggggaggtggtagggagcacccagaactgccggacgggcctcccacaccccaggtgagcaaacaagcacggagcagcttcctgcggttccatctgagtgacatcctcacgggggcagggcacggcttcctggggcctggggacttccctgcctcagtgtgtttcttacacttccctgcctaaggtgatgccacggaggggatggttgagatgactcccacgggccccttccagtccacctttctccgttccgactctgagtttcctcgggtctatagcttatgggaagggagtgaggaggggacaagccagcctccttccccatcaatgcccacaacctcccatcccctggacccagccaccctaggagttctccaccccaccccatctcgcctggcggaggggaccgccgggtttgattgatccatctccctccttggggttcgggaagaaagctcttttcttccctctgtcgggtttctttcttgcttctcggccttcacgcttcctcaggtcactggctggcctccaagggcacctagagtcagccctgcctgcagaccacccaggatccggtgacatggggtggacccagcgctgtttcggtcagagccaggggcagctacctgaactcaaccagtctgagcttcctgcttggtcaagatgactgcaggcttgggggcctggcagaatgtctgtgtttttagggactgagttgtccgaaggccacactctgctgccagctggcctttcctcagccttaacctccactcatcccctggtgctcagcttctggctttgtttgacaggtgggcaggaggagagaggggaagctgtggaggtcagcagcccctaagctgatggagtgtgttctgggaggggcaggcgctctccgttggcaagggcagaagtagaagttgtttcttgagcattggatgattaggatgggaggtgcgtgaggttctctcagcccaggggggtgcagatgggtaaggacagccttcactgtgcctttgagctgctttccgctccctgggctccagcctagccccagggccggcagaagagctggcagggatgttctagaaatgggggttggttcctctagctaccccaaatgaggatactcctaggacactcttagccacggtgagcccttaggatcccagctcctgttggaaggagcatccagcatcactgcctgccccaaggaaaagcagcaataaaaggggacactgggacctagaacgtggtgagagaggtggcattctctgactcagagagactgctcctgcgccagctagggaagagctggcacagggaggcagggccggtacagcccagcttcgtcaggagccgcgacaggtcactgcggaacttcacgccggcgaaagtgtagagcatggggttgaggcagcagtgggccaggcccaggaactcacacatggtgatggccacggggagagagccattcagcttgcaggtattgtccacggccttcagcctcgccagggtgtccaggaagatgacgatgtggtagggtgaccagcagaggaagaagatgcttgtcaccaggatggccaccctgactgccttctgccgctgagggcgccgctgggcctggcgcaacctgtgcactacccccacgtagcaccagcccatcaccagcatgggcagcaggaatcccgccacatggtagaggaatcgggaggtgaaccaggcatgcgtttctgcttggttctcttgggagaaggtgcaacgtggcagggagttgttgtgatggccttggctgactttggcgaagagaatctctggcaaggcaaggaggaagcccaccagccagatggtcccacaggtgatgtggatggagaggaggcggcggtggcggtaggcatggacggcgtggacaatggccaggtagcggtccacggcgatgcaggccaggagcaggctgctgcagtagaagttgactttgtgcagggcaatcacagttttgcagaggaaggtccccaggacccagcccacagagcc

SEQ ID NO: 256239 - DNA, 5153 bp, Artificial Sequence
  derived and/or modified sequence
cgtgcgtgtcttgtctccctgtccacgtgtgagctgtgagtgtgtgtgagtcagagttcgggtgtctgtgggtctctgagcctctgctggcagcacccggggctcgccaagctcttgccggctggcgcgcgcccagcccctggcgggacttgtccgtgtgtctgtccgcgcgcggggcctggagaagcacgctgcagtcctgtccgcctcccgctcgctgcctcgctggctgtcgctcgctcgctctgcctctccgcccgggctctgccgaagggggcggggtgggggtgcagggcggggggaggggaggctcctgcattcttgcggtcggggaggaatccgagccagcgttactggtctccagaagagcccagctgcagccccggggccccgccaggcctctcgctgcccgcccgggcctgctgggatgggcacgggctaggcctcgagctggggacggggcggggcgtggccccaaccccgggccccctccacggctggagcgctctgggggtggggcacgaggggtaccccaccctgggtgaggggcgcgtctgggagcaggaatccctcagggggccaggggagacctcacagccgccccacacggcacctttgctacctagccttttagtgaattctgtctctgccgcccgtcggggcggaggcttgctggagactgcaagccccctgagggcaaggtgcgggagggatggggacagggctggcctccaggatcgagaccccatctcgtaatcctctttttccagtgccaccccaccctatccagctccctagtcccagggctgttgggtcctcccttctcccctccccctctgacaccccctccccaagtcacgagttttctctttggggcttgttgctgcagtccgtgctccagtaccgagtacctggctgggccctgggcacgcacaggggccgtagccccactgtgtgtgggagccatgaggatcctggctaacaagacaaggttaccccaccccaggaggagagaagctccagggagcccgccgctgtccccccgcggtcattgcccccctgccccagccaagccaatgcacccagaaaataaattgaccaatcatggcaagacagggaatggcggggcccaatctcagcaccagaatgtgaaccaaggacccacctgcaacgtgggctcgaagggcgtgggggcggggaaccatggggccaaggccaaccagatctcgcctagcaactcaagtctgaagaacccccaggcaggggtgccccctttcagctcgctcaagggcaaggtgaagagggaccggagtgtgtctgtggactctggagagcagcgagaggctgggaccccatccctggattcagaggccaaagaggtggcgccgcggagtaagcggcgctgtgtgctggagcggaagcagccgtacagtggggacgaatggtgctctggaccggacagtgaggaggacgacaagcccattggggccacccacaattgtaatgtagcagacccagccatggcggccccacagctgggtcccggccaaaccacccaactgcccctcagcgagagcagcgtgccaggcgccccgcacggccctcctcctggccttcggcctgatgcccctgggggcgggggcgggggcgggggcgtccccggaaagcctccctcgcagttcgtatatgtcttcaccacccacctggccaacacggctgcagaggcagtgctgcagggccgggccgactccatcctcgcctaccaccagcagaacgtgccccgggccaagcttgaccaggcccctaaagtgccccccaccccagaaccgctacccctgagcacgccgtcagcaggcaccccgcagtcccagccacctccactgccgccgccgccacccccggcccctggcagtgccccgcctgctctgcccccagaggggcctcctgaggacagcagtcaggacctggcccccaactcggtgggagctgccagcacaggtggtgggactgggggcacccaccctaacaccccgacggctaccaccgccaacaaccctctgcctcctggaggagaccccagcagtgcccccggccctgccctgctgggggaggcagccgcccctggaaatgggcagcgcagcctggtgggctcagagggcttgtccaaagagcagctggagcatcgggaacggtccctccagacgctgcgagacattgagcgactgctgctccgcagcggagagactgagcccttcctcaaggggcccccaggaggagcgggtgaggggggcccaccagcacaagccccccctcccccccagcagccacccacggcccctcccagcgggctgaagaaatatgaggaacccttgcagtccatgatttcacagacacagagcctagggggccccccgctggagcatgaagtgcctgggcaccccccgggtggggacatggggcagcagatgaacatgatgatacagaggctgggccaggacagcctcacgcctgagcaggtggcctggcgcaagctgcaggaggagtactacgaagagaaacggcggaaagaggaacagattgggctgcatgggagccgtcctctgcaggacatgatgggcatggggggcatgatggtgagggggcccccgcctccttaccacagcaagcctggggatcagtggccacctggaatgggtgcgcagctgcgggggcccatggatgttcaagatcccatgcagctccggggcggacctccctttcctgggccccgtttcccaggcaaccagatacaacgggtacctgggtttgggggcatgcagagtatgcccatggaggtgcccatgaatgccatgcagaggcccgtgagaccaggcatgggctggaccgaagacttgccccctatggggggacccagcaattttgcccagaacaccatgccctacccaggtgggcagggtgaggcggagcgattcatgactccccgggtccgtgaggagctgctgcggcaccagctgctggagaagcggtcgatgggcatgcagcgccccctgggcatggcaggcagtggcatgggacagagcatggagatggagcggatgatgcaggcgcaccgacagatggatcctgccatgtttcccgggcagatggctggtggtgagggcctggcgggcactcccatgggcatggagtttggtggaggccggggcctcctgagccctcccatggggcagtctgggctgagggaggtggacccacccatggggccaggcaacctcaacatgaacatgaatgtcaacatgaacatgaacatgaacctgaacgtgcagatgaccccgcagcagcagatgctgatgtcgcagaagatgcggggccctggggacttgatggggccccagggcctcagtcctgaggagatggcccgggttcgggcccagaacagcagtggcgtgatgggcggcccgcagaagatgctgatgccttcacagtttcccaaccagggccagcagggattctctggaggccagggaccctaccaagccatgtcccaggacatgggcaatacccaagacatgttcagccctgatcagagctcaatgcccatgagcaacgtgggcaccacccggctcagccacatgcctctgccccctgcgtccaatcctcctgggaccgtgcattcagccccaaaccgggggctaggcaggcggccttcggacctcaccatcagtattaatcagatgggctcaccgggcatggggcacttgaagtcgcccacccttagccaggtgcactcacccctggtcacctcgccctctgccaacctcaagtcaccccagactccctcacagatggtgcccttgccttctgccaacccgccaggacctctcaagtcgccccaggtcctcggctcctccctcagtgtccgttcacccactggctcgcccagcaggctcaagtctccttccatggcggtgccttctccaggctgggttgcctcacctaagacggccatgcccagcccgggggtctcccagaacaagcagccgcctctcaacatgaactcttccaccaccctgagcaacatggaacagggtaccctcccgcctagcggcccccggagcagctcctcagcacctcccgccaaccctcccagcggcctcatgaaccccagcctaccattcacttcctccccagaccccacaccttcccagaaccccctgtcactgatgatgacccagatgtccaagtacgccatgcccagctccaccccgctctaccacaatgccatcaagaccatcgccacctcagacgacgagctgctgcccgaccggcccctgctgccccccccaccaccaccgcagggctccgggccagggatcagcaacagccagcccagccagatgcacctgaactcagccgctgcccagagccctatgggcatgaacctgccaggccagcagcccctgtcccatgagcccccgcccgccatgctgccctcccccacccctctgggctccaacattccactgcatcccaacgcacaggggacaggggggccccctcaaaactccatgatgatggccccagggggccccgactccctgaatgccccctgtggcccagtgcccagctcctcccagatgatgcccttcccccctcggctgcagcagccccatggtgccatggcccccactgggggtgggggcggggggcctggcctgcagcagcactacccgtcaggcatggccctgcctcccgaggacctgcccaaccagccgccaggccccatgcctccccagcagcacctgatgggcaaagccatggctgggcgcatgggcgacgcatacccaccgggtgtgctccctggggtggcatcagtgctgaacgaccccgagctgagcgaggtgatccggcccaccccaacggggatccccgagttcgacttgtcgaggatcatcccctctgagtttctccgcacccgcccattttccttctgtctttacctgcttcgtatcctttccctgctgatgtggctgacccctctcccacccctccctgcaggcggctggccaggtgggcaggtgccagccggagctgtaaatagagcgctgcgcttttgtgctggtttgtgcgtgtgctgtatttctgtgttttga

SEQ ID NO: 256240 - DNA, 5330 bp, Artificial Sequence
  derived and/or modified sequence
cgtgcgtgtcttgtctccctgtccacgtgtgagctgtgagtgtgtgtgagtcagagttcgggtgtctgtgggtctctgagcctctgctggcagcacccggggctcgccaagctcttgccggctggcgcgcgcccagcccctggcgggacttgtccgtgtgtctgtccgcgcgcggggcctggagaagcacgctgcagtcctgtccgcctcccgctcgctgcctcgctggctgtcgctcgctcgctctgcctctccgcccgggctctgccgaagggggcggggtgggggtgcagggcggggggaggggaggctcctgcattcttgcggtcggggaggaatccgagccagcgttactggtctccagaagagcccagctgcagccccggggccccgccaggcctctcgctgcccgcccgggcctgctgggatgggcacgggctaggcctcgagctggggacggggcggggcgtggccccaaccccgggccccctccacggctggagcgctctgggggtggggcacgaggggtaccccaccctgggtgaggggcgcgtctgggagcaggaatccctcagggggccaggggagacctcacagccgccccacacggcacctttgctacctagccttttagtgaattctgtctctgccgcccgtcggggcggaggcttgctggagactgcaagccccctgagggcaaggtgcgggagggatggggacagggctggcctccaggatcgagaccccatctcgtaatcctctttttccagtgccaccccaccctatccagctccctagtcccagggctgttgggtcctcccttctcccctccccctctgacaccccctccccaagtcacgagttttctctttggggcttgttgctgcagtccgtgctccagtaccgagtacctggctgggccctgggcacgcacaggggccgtagccccactgtgtgtgggagccatgaggatcctggctaacaagacaaggttaccccaccccaggaggagagaagctccagggagcccgccgctgtccccccgcggtcattgcccccctgccccagccaagccaatgcacccagaaaataaattgaccaatcatggcaagacagggaatggcggggcccaatctcagcaccagaatgtgaaccaaggacccacctgcaacgtgggctcgaagggcgtgggggcggggaaccatggggccaaggccaaccagatctcgcctagcaactcaagtctgaagaacccccaggcaggggtgccccctttcagctcgctcaagggcaaggtgaagagggaccggagtgtgtctgtggactctggagagcagcgagaggctgggaccccatccctggattcagaggccaaagaggtggcgccgcggagtaagcggcgctgtgtgctggagcggaagcagccgtacagtggggacgaatggtgctctggaccggacagtgaggaggacgacaagcccattggggccacccacaattgtaatgtagcagacccagccatggcggccccacagctgggtcccggccaaaccacccaactgcccctcagcgagagcagcgtgccaggcgccccgcacggccctcctcctggccttcggcctgatgcccctgggggcgggggcgggggcgggggcgtccccggaaagcctccctcgcagttcgtatatgtcttcaccacccacctggccaacacggctgcagaggcagtgctgcagggccgggccgactccatcctcgcctaccaccagcagaacgtgccccgggccaagcttgaccaggcccctaaagtgccccccaccccagaaccgctacccctgagcacgccgtcagcaggcaccccgcagtcccagccacctccactgccgccgccgccacccccggcccctggcagtgccccgcctgctctgcccccagaggggcctcctgaggacagcagtcaggacctggcccccaactcggtgggagctgccagcacaggtggtgggactgggggcacccaccctaacaccccgacggctaccaccgccaacaaccctctgcctcctggaggagaccccagcagtgcccccggccctgccctgctgggggaggcagccgcccctggaaatgggcagcgcagcctggtgggctcagagggcttgtccaaagagcagctggagcatcgggaacggtccctccagacgctgcgagacattgagcgactgctgctccgcagcggagagactgagcccttcctcaaggggcccccaggaggagcgggtgaggggggcccaccagcacaagccccccctcccccccagcagccacccacggcccctcccagcgggctgaagaaatatgaggaacccttgcagtccatgatttcacagacacagagcctagggggccccccgctggagcatgaagtgcctgggcaccccccgggtggggacatggggcagcagatgaacatgatgatacagaggctgggccaggacagcctcacgcctgagcaggtggcctggcgcaagctgcaggaggagtactacgaagagaaacggcggaaagaggaacagattgggctgcatgggagccgtcctctgcaggacatgatgggcatggggggcatgatggtgagggggcccccgcctccttaccacagcaagcctggggatcagtggccacctggaatgggtgcgcagctgcgggggcccatggatgttcaagatcccatgcagctccggggcggacctccctttcctgggccccgtttcccaggcaaccagatacaacgggtacctgggtttgggggcatgcagagtatgcccatggaggtgcccatgaatgccatgcagaggcccgtgagaccaggcatgggctggaccgaagacttgccccctatggggggacccagcaattttgcccagaacaccatgccctacccaggtgggcagggtgaggcggagcgattcatgactccccgggtccgtgaggagctgctgcggcaccagctgctggagaagcggtcgatgggcatgcagcgccccctgggcatggcaggcagtggcatgggacagagcatggagatggagcggatgatgcaggcgcaccgacagatggatcctgccatgtttcccgggcagatggctggtggtgagggcctggcgggcactcccatgggcatggagtttggtggaggccggggcctcctgagccctcccatggggcagtctgggctgagggaggtggacccacccatggggccaggcaacctcaacatgaacatgaatgtcaacatgaacatgaacatgaacctgaacgtgcagatgaccccgcagcagcagatgctgatgtcgcagaagatgcggggccctggggacttgatggggccccagggcctcagtcctgaggagatggcccgggttcgggcccagaacagcagtggcgtgatgggcggcccgcagaagatgctgatgccttcacagtttcccaaccagggccagcagggattctctggaggccagggaccctaccaagccatgtcccaggacatgggcaatacccaagacatgttcagccctgatcagagctcaatgcccatgagcaacgtgggcaccacccggctcagccacatgcctctgccccctgcgtccaatcctcctgggaccgtgcattcagccccaaaccgggggctaggcaggcggccttcggacctcaccatcagtattaatcagatgggctcaccgggcatggggcacttgaagtcgcccacccttagccaggtgcactcacccctggtcacctcgccctctgccaacctcaagtcaccccagactccctcacagatggtgcccttgccttctgccaacccgccaggacctctcaagtcgccccaggtcctcggctcctccctcagtgtccgttcacccactggctcgcccagcaggctcaagtctccttccatggcggtgccttctccaggctgggttgcctcacctaagacggccatgcccagcccgggggtctcccagaacaagcagccgcctctcaacatgaactcttccaccaccctgagcaacatggaacagggtaccctcccgcctagcggcccccggagcagctcctcagcacctcccgccaaccctcccagcggcctcatgaaccccagcctaccattcacttcctccccagaccccacaccttcccagaaccccctgtcactgatgatgacccagatgtccaagtacgccatgcccagctccaccccgctctaccacaatgccatcaagaccatcgccacctcagacgacgagctgctgcccgaccggcccctgctgccccccccaccaccaccgcagggctccgggccagggatcagcaacagccagcccagccagatgcacctgaactcagccgctgcccagagccctatgggcatgaacctgccaggccagcagcccctgtcccatgagcccccgcccgccatgctgccctcccccacccctctgggctccaacattccactgcatcccaacgcacaggggacaggggggccccctcaaaactccatgatgatggccccagggggccccgactccctgaatgccccctgtggcccagtgcccagctcctcccagatgatgcccttcccccctcggctgcagcagccccatggtgccatgatggctgggcgcatgggcgacgcatacccaccgggtgtgctccctggggtggcatcagtgctgaacgaccccgagctgagcgaggtgatccggcccaccccaacggggatccccgagttcgacttgtcgaggatcatcccctctgagaagccaagcagcaccctccagtacttccccaagagcgagaaccagccccccaaggctcagccccctaatctgcatctcatgaacctgcagaacatgatggcggagcagactccctctcggcctcccaacctcccaggccagcagggcgtccagcgggggctcaacatgtccatgtgccaccctggacagatgtccttgctgggcaggacaggcgtgcccccacagcaggggatggtgccccatggcctgcaccagggggtcatgtcccctccacaaggcctcatgacccagcagaatttcatgctgatgaagcagcggggcgtggggggcgaggtctacagccagccgccccacatgctctccccgcagggctccctcatgggccccccgccccagcagaacctcatggtgtcccacccccttcggcagcgcagtgtgtccctggacagccagatgggctacctcccggcaccaggcggcatggccaacctgcccttctag

SEQ ID NO: 256241 - DNA, 4500 bp, Artificial Sequence
  derived and/or modified sequence
atgagaatcctggccaacaagaccagactgccccaccccagaagaagagaggcccccggcagcccccccctgagccccagaggccactgcccccccgcccccgccaagcccatgcaccccgagaacaagctgaccaaccacggcaagaccggcaacggcggcgcccagagccagcaccagaacgtgaaccagggccccacctgcaacgtgggcagcaagggcgtgggcgccggcaaccacggcgccaaggccaaccagatcagccccagcaacagcagcctgaagaacccccaggccggcgtgccccccttcagcagcctgaagggcaaggtgaagagagacagaagcgtgagcgtggacagcggcgagcagagagaggccggcacccccagcctggacagcgaggccaaggaggtggcccccagaagcaagagaagatgcgtgctggagagaaagcagccctacagcggcgacgagtggtgcagcggccccgacagcgaggaggacgacaagcccatcggcgccacccacaactgcaacgtggccgaccccgccatggccgccccccagctgggccccggccagaccacccagctgcccctgagcgagagcagcgtgcccggcgccccccacggccccccccccggcctgagacccgacgcccccggcggcggcggcggcggcggcggcgtgcccggcaagccccccagccagttcgtgtacgtgttcaccacccacctggccaacaccgccgccgaggccgtgctgcagggcagagccgacagcatcctggcctaccaccagcagaacgtgcccagagccaagctggaccaggcccccaaggtgccccccacccccgagcccctgcccctgagcacccccagcgccggcaccccccagagccagcccccccccctgccccccccccccccccccgcccccggcagcgccccccccgccctgccccccgagggcccccccgaggacagcagccaggacctggcccccaacagcgtgggcgccgccagcaccggcggcggcaccggcggcacccaccccaacacccccaccgccaccaccgccaacaaccccctgccccccggcggcgaccccagcagcgcccccggccccgccctgctgggcgaggccgccgcccccggcaacggccagagaagcctggtgggcagcgagggcctgagcaaggagcagctggagcacagagagagaagcctgcagaccctgagagacatcgagagactgctgctgagaagcggcgagaccgagcccttcctgaagggcccccccggcggcgccggcgagggcggcccccccgcccaggcccccccccccccccagcagccccccaccgccccccccagcggcctgaagaagtacgaggagcccctgcagagcatgatcagccagacccagagcctgggcggcccccccctggagcacgaggtgcccggccacccccccggcggcgacatgggccagcagatgaacatgatgatccagagactgggccaggacagcctgacccccgagcaggtggcctggagaaagctgcaggaggagtactacgaggagaagagaagaaaggaggagcagatcggcctgcacggcagcagacccctgcaggacatgatgggcatgggcggcatgatggtgagaggccccccccccccctaccacagcaagcccggcgaccagtggccccccggcatgggcgcccagctgagaggccccatggacgtgcaggaccccatgcagctgagaggcggcccccccttccccggccccagattccccggcaaccagatccagagagtgcccggcttcggcggcatgcagagcatgcccatggaggtgcccatgaacgccatgcagagacccgtgagacccggcatgggctggaccgaggacctgccccccatgggcggccccagcaacttcgcccagaacaccatgccctaccccggcggccagggcgaggccgagagattcatgacccccagagtgagagaggagctgctgagacaccagctgctggagaagagaagcatgggcatgcagagacccctgggcatggccggcagcggcatgggccagagcatggagatggagagaatgatgcaggcccacagacagatggaccccgccatgttccccggccagatggccggcggcgagggcctggccggcacccccatgggcatggagttcggcggcggcagaggcctgctgagcccccccatgggccagagcggcctgagagaggtggacccccccatgggccccggcaacctgaacatgaacatgaacgtgaacatgaacatgaacatgaacctgaacgtgcagatgaccccccagcagcagatgctgatgagccagaagatgagaggccccggcgacctgatgggcccccagggcctgagccccgaggagatggccagagtgagagcccagaacagcagcggcgtgatgggcggcccccagaagatgctgatgcccagccagttccccaaccagggccagcagggcttcagcggcggccagggcccctaccaggccatgagccaggacatgggcaacacccaggacatgttcagccccgaccagagcagcatgcccatgagcaacgtgggcaccaccagactgagccacatgcccctgccccccgccagcaacccccccggcaccgtgcacagcgcccccaacagaggcctgggcagaagacccagcgacctgaccatcagcatcaaccagatgggcagccccggcatgggccacctgaagagccccaccctgagccaggtgcacagccccctggtgaccagccccagcgccaacctgaagagcccccagacccccagccagatggtgcccctgcccagcgccaacccccccggccccctgaagagcccccaggtgctgggcagcagcctgagcgtgagaagccccaccggcagccccagcagactgaagagccccagcatggccgtgcccagccccggctgggtggccagccccaagaccgccatgcccagccccggcgtgagccagaacaagcagccccccctgaacatgaacagcagcaccaccctgagcaacatggagcagggcaccctgccccccagcggccccagaagcagcagcagcgccccccccgccaacccccccagcggcctgatgaaccccagcctgcccttcaccagcagccccgaccccacccccagccagaaccccctgagcctgatgatgacccagatgagcaagtacgccatgcccagcagcacccccctgtaccacaacgccatcaagaccatcgccaccagcgacgacgagctgctgcccgacagacccctgctgcccccccccccccccccccagggcagcggccccggcatcagcaacagccagcccagccagatgcacctgaacagcgccgccgcccagagccccatgggcatgaacctgcccggccagcagcccctgagccacgagcccccccccgccatgctgcccagccccacccccctgggcagcaacatccccctgcaccccaacgcccagggcaccggcggccccccccagaacagcatgatgatggcccccggcggccccgacagcctgaacgccccctgcggccccgtgcccagcagcagccagatgatgcccttcccccccagactgcagcagccccacggcgccatggcccccaccggcggcggcggcggcggccccggcctgcagcagcactaccccagcggcatggccctgccccccgaggacctgcccaaccagccccccggccccatgcccccccagcagcacctgatgggcaaggccatggccggcagaatgggcgacgcctacccccccggcgtgctgcccggcgtggccagcgtgctgaacgaccccgagctgagcgaggtgatcagacccacccccaccggcatccccgagttcgacctgagcagaatcatccccagcgagaagcccagcagcaccctgcagtacttccccaagagcgagaaccagccccccaaggcccagccccccaacctgcacctgatgaacctgcagaacatgatggccgagcagacccccagcagaccccccaacctgcccggccagcagggcgtgcagagaggcctgaacatgagcatgtgccaccccggccagatgagcctgctgggcagaaccggcgtgcccccccagcagggcatggtgccccacggcctgcaccagggcgtgatgagccccccccagggcctgatgacccagcagaacttcatgctgatgaagcagagaggcgtgggcggcgaggtgtacagccagcccccccacatgctgagcccccagggcagcctgatgggcccccccccccagcagaacctgatggtgagccaccccctgagacagagaagcgtgagcctggacagccagatgggctacctgcccgcccccggcggcatggccaacctgcccttctag

SEQ ID NO: 256242 - DNA, 4188 bp, Artificial Sequence
  derived and/or modified sequence
atgagaatcctggccaacaagaccagactgccccaccccagaagaagagaggcccccggcagcccccccctgagccccagaggccactgcccccccgcccccgccaagcccatgcaccccgagaacaagctgaccaaccacggcaagaccggcaacggcggcgcccagagccagcaccagaacgtgaaccagggccccacctgcaacgtgggcagcaagggcgtgggcgccggcaaccacggcgccaaggccaaccagatcagccccagcaacagcagcctgaagaacccccaggccggcgtgccccccttcagcagcctgaagggcaaggtgaagagagacagaagcgtgagcgtggacagcggcgagcagagagaggccggcacccccagcctggacagcgaggccaaggaggtggcccccagaagcaagagaagatgcgtgctggagagaaagcagccctacagcggcgacgagtggtgcagcggccccgacagcgaggaggacgacaagcccatcggcgccacccacaactgcaacgtggccgaccccgccatggccgccccccagctgggccccggccagaccacccagctgcccctgagcgagagcagcgtgcccggcgccccccacggccccccccccggcctgagacccgacgcccccggcggcggcggcggcggcggcggcgtgcccggcaagccccccagccagttcgtgtacgtgttcaccacccacctggccaacaccgccgccgaggccgtgctgcagggcagagccgacagcatcctggcctaccaccagcagaacgtgcccagagccaagctggaccaggcccccaaggtgccccccacccccgagcccctgcccctgagcacccccagcgccggcaccccccagagccagcccccccccctgccccccccccccccccccgcccccggcagcgccccccccgccctgccccccgagggcccccccgaggacagcagccaggacctggcccccaacagcgtgggcgccgccagcaccggcggcggcaccggcggcacccaccccaacacccccaccgccaccaccgccaacaaccccctgccccccggcggcgaccccagcagcgcccccggccccgccctgctgggcgaggccgccgcccccggcaacggccagagaagcctggtgggcagcgagggcctgagcaaggagcagctggagcacagagagagaagcctgcagaccctgagagacatcgagagactgctgctgagaagcggcgagaccgagcccttcctgaagggcccccccggcggcgccggcgagggcggcccccccgcccaggcccccccccccccccagcagccccccaccgccccccccagcggcctgaagaagtacgaggagcccctgcagagcatgatcagccagacccagagcctgggcggcccccccctggagcacgaggtgcccggccacccccccggcggcgacatgggccagcagatgaacatgatgatccagagactgggccaggacagcctgacccccgagcaggtggcctggagaaagctgcaggaggagtactacgaggagaagagaagaaaggaggagcagatcggcctgcacggcagcagacccctgcaggacatgatgggcatgggcggcatgatggtgagaggccccccccccccctaccacagcaagcccggcgaccagtggccccccggcatgggcgcccagctgagaggccccatggacgtgcaggaccccatgcagctgagaggcggcccccccttccccggccccagattccccggcaaccagatccagagagtgcccggcttcggcggcatgcagagcatgcccatggaggtgcccatgaacgccatgcagagacccgtgagacccggcatgggctggaccgaggacctgccccccatgggcggccccagcaacttcgcccagaacaccatgccctaccccggcggccagggcgaggccgagagattcatgacccccagagtgagagaggagctgctgagacaccagctgctggagaagagaagcatgggcatgcagagacccctgggcatggccggcagcggcatgggccagagcatggagatggagagaatgatgcaggcccacagacagatggaccccgccatgttccccggccagatggccggcggcgagggcctggccggcacccccatgggcatggagttcggcggcggcagaggcctgctgagcccccccatgggccagagcggcctgagagaggtggacccccccatgggccccggcaacctgaacatgaacatgaacgtgaacatgaacatgaacatgaacctgaacgtgcagatgaccccccagcagcagatgctgatgagccagaagatgagaggccccggcgacctgatgggcccccagggcctgagccccgaggagatggccagagtgagagcccagaacagcagcggcgtgatgggcggcccccagaagatgctgatgcccagccagttccccaaccagggccagcagggcttcagcggcggccagggcccctaccaggccatgagccaggacatgggcaacacccaggacatgttcagccccgaccagagcagcatgcccatgagcaacgtgggcaccaccagactgagccacatgcccctgccccccgccagcaacccccccggcaccgtgcacagcgcccccaacagaggcctgggcagaagacccagcgacctgaccatcagcatcaaccagatgggcagccccggcatgggccacctgaagagccccaccctgagccaggtgcacagccccctggtgaccagccccagcgccaacctgaagagcccccagacccccagccagatggtgcccctgcccagcgccaacccccccggccccctgaagagcccccaggtgctgggcagcagcctgagcgtgagaagccccaccggcagccccagcagactgaagagccccagcatggccgtgcccagccccggctgggtggccagccccaagaccgccatgcccagccccggcgtgagccagaacaagcagccccccctgaacatgaacagcagcaccaccctgagcaacatggagcagggcaccctgccccccagcggccccagaagcagcagcagcgccccccccgccaacccccccagcggcctgatgaaccccagcctgcccttcaccagcagccccgaccccacccccagccagaaccccctgagcctgatgatgacccagatgagcaagtacgccatgcccagcagcacccccctgtaccacaacgccatcaagaccatcgccaccagcgacgacgagctgctgcccgacagacccctgctgcccccccccccccccccccagggcagcggccccggcatcagcaacagccagcccagccagatgcacctgaacagcgccgccgcccagagccccatgggcatgaacctgcccggccagcagcccctgagccacgagcccccccccgccatgctgcccagccccacccccctgggcagcaacatccccctgcaccccaacgcccagggcaccggcggccccccccagaacagcatgatgatggcccccggcggccccgacagcctgaacgccccctgcggccccgtgcccagcagcagccagatgatgcccttcccccccagactgcagcagccccacggcgccatggcccccaccggcggcggcggcggcggccccggcctgcagcagcactaccccagcggcatggccctgccccccgaggacctgcccaaccagccccccggccccatgcccccccagcagcacctgatgggcaaggccatggccggcagaatgggcgacgcctacccccccggcgtgctgcccggcgtggccagcgtgctgaacgaccccgagctgagcgaggtgatcagacccacccccaccggcatccccgagttcgacctgagcagaatcatccccagcgagttcctgagaaccagacccttcagcttctgcctgtacctgctgagaatcctgagcctgctgatgtggctgacccccctgccccccctgcccgccggcggctggcccggcggccaggtgcccgccggcgccgtgaacagagccctgagattctgcgccggcctgtgcgtgtgctgcatcagcgtgttctag

SEQ ID NO: 256243 - DNA, 4365 bp, Artificial Sequence
  derived and/or modified sequence
atgagaatcctggccaacaagaccagactgccccaccccagaagaagagaggcccccggcagcccccccctgagccccagaggccactgcccccccgcccccgccaagcccatgcaccccgagaacaagctgaccaaccacggcaagaccggcaacggcggcgcccagagccagcaccagaacgtgaaccagggccccacctgcaacgtgggcagcaagggcgtgggcgccggcaaccacggcgccaaggccaaccagatcagccccagcaacagcagcctgaagaacccccaggccggcgtgccccccttcagcagcctgaagggcaaggtgaagagagacagaagcgtgagcgtggacagcggcgagcagagagaggccggcacccccagcctggacagcgaggccaaggaggtggcccccagaagcaagagaagatgcgtgctggagagaaagcagccctacagcggcgacgagtggtgcagcggccccgacagcgaggaggacgacaagcccatcggcgccacccacaactgcaacgtggccgaccccgccatggccgccccccagctgggccccggccagaccacccagctgcccctgagcgagagcagcgtgcccggcgccccccacggccccccccccggcctgagacccgacgcccccggcggcggcggcggcggcggcggcgtgcccggcaagccccccagccagttcgtgtacgtgttcaccacccacctggccaacaccgccgccgaggccgtgctgcagggcagagccgacagcatcctggcctaccaccagcagaacgtgcccagagccaagctggaccaggcccccaaggtgccccccacccccgagcccctgcccctgagcacccccagcgccggcaccccccagagccagcccccccccctgccccccccccccccccccgcccccggcagcgccccccccgccctgccccccgagggcccccccgaggacagcagccaggacctggcccccaacagcgtgggcgccgccagcaccggcggcggcaccggcggcacccaccccaacacccccaccgccaccaccgccaacaaccccctgccccccggcggcgaccccagcagcgcccccggccccgccctgctgggcgaggccgccgcccccggcaacggccagagaagcctggtgggcagcgagggcctgagcaaggagcagctggagcacagagagagaagcctgcagaccctgagagacatcgagagactgctgctgagaagcggcgagaccgagcccttcctgaagggcccccccggcggcgccggcgagggcggcccccccgcccaggcccccccccccccccagcagccccccaccgccccccccagcggcctgaagaagtacgaggagcccctgcagagcatgatcagccagacccagagcctgggcggcccccccctggagcacgaggtgcccggccacccccccggcggcgacatgggccagcagatgaacatgatgatccagagactgggccaggacagcctgacccccgagcaggtggcctggagaaagctgcaggaggagtactacgaggagaagagaagaaaggaggagcagatcggcctgcacggcagcagacccctgcaggacatgatgggcatgggcggcatgatggtgagaggccccccccccccctaccacagcaagcccggcgaccagtggccccccggcatgggcgcccagctgagaggccccatggacgtgcaggaccccatgcagctgagaggcggcccccccttccccggccccagattccccggcaaccagatccagagagtgcccggcttcggcggcatgcagagcatgcccatggaggtgcccatgaacgccatgcagagacccgtgagacccggcatgggctggaccgaggacctgccccccatgggcggccccagcaacttcgcccagaacaccatgccctaccccggcggccagggcgaggccgagagattcatgacccccagagtgagagaggagctgctgagacaccagctgctggagaagagaagcatgggcatgcagagacccctgggcatggccggcagcggcatgggccagagcatggagatggagagaatgatgcaggcccacagacagatggaccccgccatgttccccggccagatggccggcggcgagggcctggccggcacccccatgggcatggagttcggcggcggcagaggcctgctgagcccccccatgggccagagcggcctgagagaggtggacccccccatgggccccggcaacctgaacatgaacatgaacgtgaacatgaacatgaacatgaacctgaacgtgcagatgaccccccagcagcagatgctgatgagccagaagatgagaggccccggcgacctgatgggcccccagggcctgagccccgaggagatggccagagtgagagcccagaacagcagcggcgtgatgggcggcccccagaagatgctgatgcccagccagttccccaaccagggccagcagggcttcagcggcggccagggcccctaccaggccatgagccaggacatgggcaacacccaggacatgttcagccccgaccagagcagcatgcccatgagcaacgtgggcaccaccagactgagccacatgcccctgccccccgccagcaacccccccggcaccgtgcacagcgcccccaacagaggcctgggcagaagacccagcgacctgaccatcagcatcaaccagatgggcagccccggcatgggccacctgaagagccccaccctgagccaggtgcacagccccctggtgaccagccccagcgccaacctgaagagcccccagacccccagccagatggtgcccctgcccagcgccaacccccccggccccctgaagagcccccaggtgctgggcagcagcctgagcgtgagaagccccaccggcagccccagcagactgaagagccccagcatggccgtgcccagccccggctgggtggccagccccaagaccgccatgcccagccccggcgtgagccagaacaagcagccccccctgaacatgaacagcagcaccaccctgagcaacatggagcagggcaccctgccccccagcggccccagaagcagcagcagcgccccccccgccaacccccccagcggcctgatgaaccccagcctgcccttcaccagcagccccgaccccacccccagccagaaccccctgagcctgatgatgacccagatgagcaagtacgccatgcccagcagcacccccctgtaccacaacgccatcaagaccatcgccaccagcgacgacgagctgctgcccgacagacccctgctgcccccccccccccccccccagggcagcggccccggcatcagcaacagccagcccagccagatgcacctgaacagcgccgccgcccagagccccatgggcatgaacctgcccggccagcagcccctgagccacgagcccccccccgccatgctgcccagccccacccccctgggcagcaacatccccctgcaccccaacgcccagggcaccggcggccccccccagaacagcatgatgatggcccccggcggccccgacagcctgaacgccccctgcggccccgtgcccagcagcagccagatgatgcccttcccccccagactgcagcagccccacggcgccatgatggccggcagaatgggcgacgcctacccccccggcgtgctgcccggcgtggccagcgtgctgaacgaccccgagctgagcgaggtgatcagacccacccccaccggcatccccgagttcgacctgagcagaatcatccccagcgagaagcccagcagcaccctgcagtacttccccaagagcgagaaccagccccccaaggcccagccccccaacctgcacctgatgaacctgcagaacatgatggccgagcagacccccagcagaccccccaacctgcccggccagcagggcgtgcagagaggcctgaacatgagcatgtgccaccccggccagatgagcctgctgggcagaaccggcgtgcccccccagcagggcatggtgccccacggcctgcaccagggcgtgatgagccccccccagggcctgatgacccagcagaacttcatgctgatgaagcagagaggcgtgggcggcgaggtgtacagccagcccccccacatgctgagcccccagggcagcctgatgggcccccccccccagcagaacctgatggtgagccaccccctgagacagagaagcgtgagcctggacagccagatgggctacctgcccgcccccggcggcatggccaacctgcccttctag

SEQ ID NO: 256244 - protein, 125 aa, Artificial Sequence
  derived and/or modified sequence
MHRKEPGARLEATRGAARPHKQGTKPMITRPSVSQLGEGKCPSSQHLQSLRHNKQHALTLTKARCCGECSTCFCTEEKSECQRHEETSPGSCNHQIMSASTISAFCATPRFKQLFKGTVEQMSQM

SEQ ID NO: 256245 - protein, 75 aa, Artificial Sequence
  derived and/or modified sequence
MHRKEPGARLEATRGAARPHKQGTKPMITRPSVSQLGEGKCPSSQHLQSLRHNKQHALTLTKARCCGECSTCFCT

SEQ ID NO: 256246 - DNA, 1284 bp, Artificial Sequence
  derived and/or modified sequence
aagatgcattatcatggctgtaaacacaggttctgcacgtgtctaagttcagccccaaacccacatgaagaacttatttccagacagctcctactcttatggtggctccagaccctgccccatgcagaaggcacttctcaagttccaggaccagggcttcagccacagcactcgcaaaaccccacagatacagtgccaatgacagaaattaagattaactgggggcgacacagatttctgtgaatgccagtgctgtcagatgcttcctgatagtactttctagagtaaaagaacttcgggaaaagtaaaagcagcaaatggtaacaccctcatggagatctcagggtgtagaggcaagcactgaaggcccatgatcagccgtgggagccacgggaatcaattgcttccagtacgactggatgcatcggaaagagcctggggcaaggctggaggccacaagaggagctgccaggccacataagcagggaacaaagccgatgatcacacgcccatcagtgagccaacttggtgaagggaaatgcccaagttctcagcacctgcagagcctaagacataacaagcagcatgccctgacgctcaccaaggccaggtgctgtggtgagtgctctacctgtttctgtacagaagagaaatcagaatgccagagacatgaagaaacttctccagggtcatgtaatcaccaaataatgtctgcttcgaccatctctgcattttgtgctacaccaagatttaagcagctgttcaaaggaactgtagaacagatgtcacagatgtaactattcttgaaaggaagtcagatttcatagatggaaagactgcccttttccatttgcctcctccagacccataactttggataggggggttttattgtccgtgaggcttatgcatatgtcagaagaatgtccaagcagaggaatctaagtggcagaccccccaggataggaaagaagaaggacgctcgtgctgacacttccagaacactcttcacgttttgtgacatatgtgcttgtcgagtgatcttaagacagctggatgtccgaaccatgcagtaatagcagagaacctgcggaaggagaagcttcccaggacgttctgagggcttatgccgggtgcaggctttccttcccgcaacatccctgagtccagagaagaaataatcccctgccctgtgggccaagcacttacagcaacagcactttgagtttgctgtgcttagattcacttgtggaacttgttaaaaatataaaattccagacccca

SEQ ID NO: 256247 - DNA, 467 bp, Artificial Sequence
  derived and/or modified sequence
attatcatggctgtaaacacaggttctgcacgtgtctaagttcagccccaaacccacatgaagaacttatttccagacagctcctactcttatggtggctccagaccctgccccatgcagaaggcacttctcaagttccaggaccagggcttcagccacagcactcgggtgtagaggcaagcactgaaggcccatgatcagccgtgggagccacgggaatcaattgcttccagtacgactggatgcatcggaaagagcctggggcaaggctggaggccacaagaggagctgccaggccacataagcagggaacaaagccgatgatcacacgcccatcagtgagccaacttggtgaagggaaatgcccaagttctcagcacctgcagagcctaagacataacaagcagcatgccctgacgctcaccaaggccaggtgctgtggtgagtgctctacctgtttctgtaca

SEQ ID NO: 256248 - DNA, 378 bp, Artificial Sequence
  derived and/or modified sequence
atgcacagaaaggagcccggcgccagactggaggccaccagaggcgccgccagaccccacaagcagggcaccaagcccatgatcaccagacccagcgtgagccagctgggcgagggcaagtgccccagcagccagcacctgcagagcctgagacacaacaagcagcacgccctgaccctgaccaaggccagatgctgcggcgagtgcagcacctgcttctgcaccgaggagaagagcgagtgccagagacacgaggagaccagccccggcagctgcaaccaccagatcatgagcgccagcaccatcagcgccttctgcgccacccccagattcaagcagctgttcaagggcaccgtggagcagatgagccagatgtag

SEQ ID NO: 256249 - DNA, 228 bp, Artificial Sequence
  derived and/or modified sequence
atgcacagaaaggagcccggcgccagactggaggccaccagaggcgccgccagaccccacaagcagggcaccaagcccatgatcaccagacccagcgtgagccagctgggcgagggcaagtgccccagcagccagcacctgcagagcctgagacacaacaagcagcacgccctgaccctgaccaaggccagatgctgcggcgagtgcagcacctgcttctgcacctag

SEQ ID NO: 256250 - DNA, 378 bp, Artificial Sequence
  derived and/or modified sequence
atgcaccggaaggaacccggagcgcgtttagaggccacaagaggggcagcacgcccccacaagcagggcacgaaacccatgatcacgaggccatcagtgtctcagcttggagaagggaaatgcccgtcttcccagcatcttcaaagtctacggcataataaacaacacgccctcactctgacgaaggccaggtgctgtggtgagtgctcgacatgcttctgtacagaggaaaagagcgagtgtcagcgccacgaagagacatcccctggatcctgtaatcaccagatcatgtccgcatccactatctctgctttctgtgcaactcctaggttcaagcagctttttaaaggtaccgtcgagcagatgtctcagatgtag

SEQ ID NO: 256251 - DNA, 228 bp, Artificial Sequence
  derived and/or modified sequence
atgcatcgaaaggagcccggcgctaggttggaggccaccagaggggctgccagaccacacaaacaggggaccaagcccatgatcactcggcctagcgtgtcgcagcttggtgaaggtaagtgtccatcatctcagcacctgcagtctctcaggcacaacaagcagcatgcgctgaccttgacgaaagctcggtgttgtggagagtgctccacatgcttttgcacctag

SEQ ID NO: 256252 - DNA, 378 bp, Artificial Sequence
  derived and/or modified sequence
atgcacaggaaggagcccggggcccggctggaggccaccaggggggccgcccggccccacaagcagggcaccaagcccatgatcacccggcccagcgtgtcccagctgggggagggcaagtgccccagcagccagcacctgcagagcctgcggcacaacaagcagcacgccctgaccctgaccaaggcccgctgctgcggggagtgcagcacctgcttctgcacagaggagaagtctgagtgccagagacatgaggagaccagccctggcagctgcaaccaccagatcatgtctgccagcaccatcagcgccttctgtgccaccccccgcttcaagcagctgttcaagggcaccgtggagcagatgagccagatgtag

SEQ ID NO: 256253 - DNA, 228 bp, Artificial Sequence
  derived and/or modified sequence
atgcacaggaaggagcccggggcccggctggaggccaccaggggggccgcccggccccacaagcagggcaccaagcccatgatcacccggcccagcgtgtcccagctgggggagggcaagtgccccagcagccagcacctgcagagcctgcggcacaacaagcagcacgccctgaccctgaccaaggcccgctgctgcggggagtgcagcacctgcttctgcacctag

SEQ ID NO: 256254 - DNA, 378 bp, Artificial Sequence
  derived and/or modified sequence
atgcaccggaaggagcccggcgcccggctggaggccacccggggcgccgcccgcccccataaacagggcacaaagccgatgatcacccgcccgtcagtgtcccagttgggtgaggggaagtgtccaagctcccaacatttgcaatcgctgaggcacaacaaacagcatgctctgacactcactaaagctaggtgctgcggtgagtgcagtacatgtttttgtacagaggagaagagtgaatgccaacggcacgaggagacttctccaggcagttgtaatcatcaaatcatgagtgccagtacaatttccgccttctgcgccacgccgagattcaagcagctgttcaagggtacggtggagcagatgtcccagatgtag

SEQ ID NO: 256255 - DNA, 228 bp, Artificial Sequence
  derived and/or modified sequence
atgcaccggaaggagcccggcgcccggctggaggccacccggggcgctgcccggccccataaacaggggactaaacccatgattacccgcccctctgtctctcagctaggagaaggcaaatgcccaagctctcaacatctgcaaagtctacggcataacaagcagcacgcactgacactgacaaaagcacgctgctgcggagagtgcagtacctgcttttgcacatag

SEQ ID NO: 256256 - DNA, 156 bp, Artificial Sequence
  derived and/or modified sequence
atgacccacgacaagagctggcggcggtgcagcatcagcggcagcacgaagtgtcgctgtggaagtcggattgccgggcccaatgctcttggcagcggagggtcccgttctagcagttcctccagcagatcgattctgagcagttccatattgtag

SEQ ID NO: 256257 - DNA, 378 bp, Artificial Sequence
  derived and/or modified sequence
atgcatcggaaagagcccggagccagattggaggccaccagaggtgcagcacgaccacacaagcagggaaccaagcccatgatcacccgcccatctgtgagccagctaggagagggaaagtgtccttcctcccagcacctccagtctctgagacataacaagcagcacgctctaactctgacaaaggcacgatgttgtggagaatgctcgacctgcttctgcacggaggagaaaagcgaatgtcagagacacgaagaaacctctccaggcagctgcaatcaccagatcatgtcagccagcacaatttctgccttttgtgctacaccgaggtttaagcagctgtttaaaggaaccgttgaacaaatgtcgcagatgtag

SEQ ID NO: 256258 - DNA, 228 bp, Artificial Sequence
  derived and/or modified sequence
atgcaccgcaaggaacctggcgctcgcctagaagctactcgcggagcggctcgcccacataagcaaggtacgaagcctatgatcaccagacccagcgtcagccagcttggcgagggcaagtgcccaagcagccagcatctgcagtctctgagacataataagcagcacgcactgaccttgacgaaggctcggtgctgtggtgaatgctctacctgtttttgcacatag

SEQ ID NO: 256259 - protein, 192 aa, Artificial Sequence
  derived and/or modified sequence
MKVQSFGERVVLFILNAIIFGRLERNLDDDDMFFLPHSVKEQAKILWRRGAAVGFYTTKMKGRLCGDGTGACYLLPVFDTVFIRRKHWHRGLGTAMLRDFCETFPEDEALGVSCSMSPAMYQAHPGNSEDVSRHARTSQNDRPRQPAPGDGSKERMCGEELEDTKDDPECGVEEEDAGLAGQPPGKLTRSSP

SEQ ID NO: 256260 - DNA, 579 bp, Artificial Sequence
  derived and/or modified sequence
atgaaggtgcagagcttcggcgagagagtggtgctgttcatcctgaacgccatcatcttcggcagactggagagaaacctggacgacgacgacatgttcttcctgccccacagcgtgaaggagcaggccaagatcctgtggagaagaggcgccgccgtgggcttctacaccaccaagatgaagggcagactgtgcggcgacggcaccggcgcctgctacctgctgcccgtgttcgacaccgtgttcatcagaagaaagcactggcacagaggcctgggcaccgccatgctgagagacttctgcgagaccttccccgaggacgaggccctgggcgtgagctgcagcatgagccccgccatgtaccaggcccaccccggcaacagcgaggacgtgagcagacacgccagaaccagccagaacgacagacccagacagcccgcccccggcgacggcagcaaggagagaatgtgcggcgaggagctggaggacaccaaggacgaccccgagtgcggcgtggaggaggaggacgccggcctggccggccagccccccggcaagctgaccagaagcagcccctag

SEQ ID NO: 256261 - DNA, 579 bp, Artificial Sequence
  derived and/or modified sequence
atgaaagtccaatcatttggtgagagggtcgtgttgttcatcctcaacgcaatcatattcgggcgtttagaacgcaacctcgacgacgacgacatgttctttcttccccacagtgtcaaggagcaggccaagatcctctggagacggggagctgcggtgggattctacaccacaaagatgaaggggagactttgcggggacggcaccggcgcctgttatttacttcccgtgttcgacacagttttcatccgacgcaaacactggcaccggggtcttggaactgccatgctgagagatttttgtgagacattcccggaggatgaagctttgggggtttcctgtagtatgtcacccgccatgtatcaggctcaccctggtaacagcgaagatgtctcgcgccatgcccgaactagccagaatgatcggcctaggcaacccgcccccggagacggaagcaaggagcggatgtgtggtgaggagctggaagatacaaaagacgaccctgaatgcggcgtggaagaggaggacgccggactagccggccagccgccgggtaaactgactagatcatctccatag

SEQ ID NO: 256262 - DNA, 579 bp, Artificial Sequence
  derived and/or modified sequence
atgaaagtccagtcttttggcgaaagggtcgtgcttttcattctcaacgccatcatctttgggcgtttagagaggaacctggacgacgatgatatgttttttttacctcactccgtgaaagaacaggctaagattttgtggcggcggggcgccgccgtgggcttctacaccacaaagatgaaagggagactgtgtggggacggcacaggagcttgctatctgctcccagtgttcgacacagtgtttataaggcgtaagcattggcacagggggctgggaaccgctatgctgcgggatttttgtgagactttccctgaagatgaagcactcggggtgtcctgctccatgtctcctgctatgtatcaggctcaccctggtaatagcgaagatgtgtcgagacatgcaaggacatcccaaaatgacagaccacgccagcctgcacctggcgatggttcgaaggaaaggatgtgcggggaggagctcgaggacaccaaggacgatcccgagtgtggggtggaagaggaagatgccggcttggccggacagcctccgggtaagctgacacgatcctctccttag

SEQ ID NO: 256263 - DNA, 3129 bp, Artificial Sequence
  derived and/or modified sequence
gttgtggctgtttacataaaggaatcctggtgctccacggaagatgcactaagaacctctgatcctgcaagagaagggttgatgaaggttcagtcgtttggggaaagggttgtgcttttcattctaaacgccattatttttggaagattggagagaaatttggatgatgatgacatgttttttctacctcactctgtgaaggaacaagctaaaatcctgtggagacgtggagcggctgttgggttttacacaaccaagatgaaaggcagactgtgtggtgatggcaccggtgcatgctacctgctgcctgtctttgacaccgtgttcatcaggaggaaacactggcaccgaggcttgggaacagccatgctgcgggacttctgtgagacattcccagaggacgaggccctgggggttagctgctcgatgtctcctgccatgtaccaagcacacccaggaaattccgaggacgtgagccgtcatgcgaggacttctcagaatgacagacccagacagcctgcccctggagacggcagcaaggagaggatgtgtggagaagaactggaagacacaaaggatgatccagagtgtggagtggaagaggaggatgccgggctggcagggcagccaccaggcaagcttacaaggtccagtccctgacgtctccagacgcccatctgggccaggtccagaggcctgcctgggctcccaggattcgggtctgagacttgtgtgtctgggagtgtaccttccctggggatctttgaggggccagtgaccccacgggccccacctacctctgaggtgggctcaggctctagagtacctgagaacgtgctgcgctcagcatgcgacaccgtgccacagtgaggaagtatttccctaagttaattgttgacagttcctaaacgtttcagaagcttactcgttaaaactaatgtggtttctgtttctcaggataaattggtgggactttaccggaaccacagggatgttttactgaatgtacctctttccttatagaagtttaaagatgctcaggaaggggccacacccgttccatctgggctgtagaaacccattgcaggtttgtgcatgccagccctgctgttgccgtgagaccacggacaccaaagaggtttgcaggggtacacgtgtcctttccggacaccaaagaggtttgcaggggtacacgtgtcctttcccgggaggcttcagccacatcagtgctgatgtgcctcaaggcacatgagtgccttgagggcaggggcagtggctggatggtgcctactgtaggcctggagctctcttctggcctggtatacagaaggcactcagagagctcatatgggaagtactgggtaggaatttgggcagatggtgcttctagaatattggtggccttgagtggaaagtcttgtggtagtaaaagtaactgaaaatgatagcctggctcgaatgtgacattggcttcccccttctcaaatactgatggagccctgtttggtcgctatagtgtatggccgctcttgggatgcagagacaaggacctgctcttaggccccaggtccaatgggctaggcagagttgtcccagggccgcctgccctcctcaagggtggggcgcaaatccaggctgctttagggagcccaaagcctgctccccgagaggtggggtggtgctttctctgctattgggcccagccttgctgatttcagtaggatttttcccagagaaagctggtcaggccctcttgaggcagacgacccaagttcttgcccctgcttttgggaaaatgcaaatccaatcccattgccgaggacatcccaaacccctctgtgctcatcactgactttggagaagccaggggccctgctgcctctgctccttgccattggagttcagctgcaggatcagccctgggctgcctggttactttgttgacagaagaagagggttttacctttttaggatgtaataaagcccctcctgtggcctgatgaggagactaccaacagtcccaagttctgggaatatatcgtctgttcccttgagcagtcaaaggacacacatggtgggacctgttatttattcatccatgcacccagctgtccatctctctgtccatccatccgtctatccatccatcatccatccatccacctaaccatccatctattcaatccattcatcatccatctatccatccctccatccatccattcatccatctatccatccatcatccgtccatcctccatccatcatccatccatccatcctccatccatcatccatccatccatccatccatccatcctccatccatcttccatccatccatcctccatccatccatctatccatccatccacccatccatccatccatccacccatccatcatccatccatccatcctccatcttccatccatccatccatccatccatccttcatccagccatccatctatccatacatttatcatccatccatccatcatccatccgtccatcctccatccatccattcatcctctatccatccatcatccatccatccatccatccacccatcctccatccatccatccatcctccatccgtcatccatccgtccatccatccatccatccattctgttgtacaacagatattcagcatgctttctcagggacatgctctgtgctggggacaggggatataagtgaggtatggatactggcctcaggaaactctcttctctttggaggaatctcttctggagtgttccactggagttttcatctctcttgcacccattacaaagatggaagggtccaattgactagaaatatagtttagagattcatatggagacatcatgaagcctgcctcccccctgccccttatacttgggctctctgtgcaggtggcacagaccataaaaggagagtgaagtctacagcctagagggtgccctgtgtgtggtgtcagatgtaacctttcacatgggatgtgtgtgctgtgagcattgtgctatttgagatgaatggttagtattttgtgtttacatgaaaataaatgtttaaaaatgtctcaggggtttgatgaagttactattcaataaaagaaacctctcagggaag

SEQ ID NO: 256264 - DNA, 3298 bp, Artificial Sequence
  derived and/or modified sequence
aactccgcaagcaaatgaaaaacatcctggaattgtgaattcccctgtggcaagtggttatcgttcgtggtggcagtctgctgttacgagcataataggatgaatatggactttgacgtcagatggagctgacttggaatcctggctctgccagctgactggcagaggggttgtggctgtttacataaaggaatcctggtgctccacggaagatgcactaagaacctctgatcctgcaagagaagggttgatgaaggttcagtcgtttggggaaagggttgtgcttttcattctaaacgccattatttttggaagattggagagaaatttggatgatgatgacatgttttttctacctcactctgtgaaggaacaagctaaaatcctgtggagacgtggagcggctgttgggttttacacaaccaagatgaaaggcagactgtgtggtgatggcaccggtgcatgctacctgctgcctgtctttgacaccgtgttcatcaggaggaaacactggcaccgaggcttgggaacagccatgctgcgggacttctgtgagacattcccagaggacgaggccctgggggttagctgctcgatgtctcctgccatgtaccaagcacacccaggaaattccgaggacgtgagccgtcatgcgaggacttctcagaatgacagacccagacagcctgcccctggagacggcagcaaggagaggatgtgtggagaagaactggaagacacaaaggatgatccagagtgtggagtggaagaggaggatgccgggctggcagggcagccaccaggcaagcttacaaggtccagtccctgacgtctccagacgcccatctgggccaggtccagaggcctgcctgggctcccaggattcgggtctgagacttgtgtgtctgggagtgtaccttccctggggatctttgaggggccagtgaccccacgggccccacctacctctgaggtgggctcaggctctagagtacctgagaacgtgctgcgctcagcatgcgacaccgtgccacagtgaggaagtatttccctaagttaattgttgacagttcctaaacgtttcagaagcttactcgttaaaactaatgtggtttctgtttctcaggataaattggtgggactttaccggaaccacagggatgttttactgaatgtacctctttccttatagaagtttaaagatgctcaggaaggggccacacccgttccatctgggctgtagaaacccattgcaggtttgtgcatgccagccctgctgttgccgtgagaccacggacaccaaagaggtttgcaggggtacacgtgtcctttccggacaccaaagaggtttgcaggggtacacgtgtcctttcccgggaggcttcagccacatcagtgctgatgtgcctcaaggcacatgagtgccttgagggcaggggcagtggctggatggtgcctactgtaggcctggagctctcttctggcctggtatacagaaggcactcagagagctcatatgggaagtactgggtaggaatttgggcagatggtgcttctagaatattggtggccttgagtggaaagtcttgtggtagtaaaagtaactgaaaatgatagcctggctcgaatgtgacattggcttcccccttctcaaatactgatggagccctgtttggtcgctatagtgtatggccgctcttgggatgcagagacaaggacctgctcttaggccccaggtccaatgggctaggcagagttgtcccagggccgcctgccctcctcaagggtggggcgcaaatccaggctgctttagggagcccaaagcctgctccccgagaggtggggtggtgctttctctgctattgggcccagccttgctgatttcagtaggatttttcccagagaaagctggtcaggccctcttgaggcagacgacccaagttcttgcccctgcttttgggaaaatgcaaatccaatcccattgccgaggacatcccaaacccctctgtgctcatcactgactttggagaagccaggggccctgctgcctctgctccttgccattggagttcagctgcaggatcagccctgggctgcctggttactttgttgacagaagaagagggttttacctttttaggatgtaataaagcccctcctgtggcctgatgaggagactaccaacagtcccaagttctgggaatatatcgtctgttcccttgagcagtcaaaggacacacatggtgggacctgttatttattcatccatgcacccagctgtccatctctctgtccatccatccgtctatccatccatcatccatccatccacctaaccatccatctattcaatccattcatcatccatctatccatccctccatccatccattcatccatctatccatccatcatccgtccatcctccatccatcatccatccatccatcctccatccatcatccatccatccatccatccatccatcctccatccatcttccatccatccatcctccatccatccatctatccatccatccacccatccatccatccatccacccatccatcatccatccatccatcctccatcttccatccatccatccatccatccatccttcatccagccatccatctatccatacatttatcatccatccatccatcatccatccgtccatcctccatccatccattcatcctctatccatccatcatccatccatccatccatccacccatcctccatccatccatccatcctccatccgtcatccatccgtccatccatccatccatccattctgttgtacaacagatattcagcatgctttctcagggacatgctctgtgctggggacaggggatataagtgaggtatggatactggcctcaggaaactctcttctctttggaggaatctcttctggagtgttccactggagttttcatctctcttgcacccattacaaagatggaagggtccaattgactagaaatatagtttagagattcatatggagacatcatgaagcctgcctcccccctgccccttatacttgggctctctgtgcaggtggcacagaccataaaaggagagtgaagtctacagcctagagggtgccctgtgtgtggtgtcagatgtaacctttcacatgggatgtgtgtgctgtgagcattgtgctatttgagatgaatggttagtattttgtgtttacatgaaaataaatgtttaaaaatgtctcaggggtttgatgaagttactattcaataaaagaaacctctcagggaag

SEQ ID NO: 256265 - DNA, 579 bp, Artificial Sequence
  derived and/or modified sequence
atgaaggtgcagagctttggagagcgggtggtgctcttcatcctgaatgccatcatcttcggccgcctggagaggaacctggatgatgatgacatgttcttcctgccccacagcgtgaaggagcaggccaagatcctgtggaggagaggagctgctgtgggcttctacaccaccaagatgaagggccgcctgtgtggagatggcactggagcctgctacctgctgcctgtgtttgacaccgtcttcatccggaggaagcactggcaccggggcctgggcacagccatgctgcgggacttctgtgagaccttcccagaagatgaggccctgggcgtgtcctgcagcatgagccctgccatgtaccaggcccaccctggcaacagtgaagatgtgtccagacatgcccggaccagccagaatgaccggccccggcagcctgcccctggagatggcagcaaggagaggatgtgtggggaggagctggaggacaccaaggatgatcctgaatgtggggtggaggaggaggatgctggcctggccggccagcccccaggcaagctgaccaggagcagcccctag

SEQ ID NO: 256266 - DNA, 579 bp, Artificial Sequence
  derived and/or modified sequence
atgaaggtgcagagcttcggcgagcgggtggtgctgttcatcctgaatgcaatcatatttgggaggcttgaacggaaccttgatgacgacgatatgttcttcctcccgcactctgtcaaagagcaggcaaaaatactgtggcgccgcggcgcagcggtgggcttctatacaacgaaaatgaagggccgcctctgcggagacggaaccggcgcgtgctatctcctgccagtgttcgacactgtttttatccgtaggaagcactggcaccggggcctcggtacagccatgctgagagatttttgtgaaactttcccagaagatgaggcgttaggagtcagctgcagcatgtctcctgccatgtaccaggcccaccccggcaacagtgaggacgtgtcacggcatgcaagaacatctcagaatgatcggcctcggcagcctgccccgggagacggatccaaagagaggatgtgtggagaagagctcgaagatacaaaggacgatccagagtgtggggtcgaagaagaggacgctggcctggccggtcaaccacctggaaagttgactcgaagtagcccctag

SEQ ID NO: 256267 - DNA, 579 bp, Artificial Sequence
  derived and/or modified sequence
atgaaggtgcagagcttcggcgagcgggtggtgctgttcatcctgaatgccatcatcttcggtcggcttgagcgcaatctggacgatgacgatatgttttttctgccccactcggtcaaggagcaagccaagattttatggcgccgaggcgccgccgtaggtttctacaccacaaagatgaagggccgtctgtgcggcgatggtacaggcgcatgctacctattgccagtgtttgacacagtgtttattaggaggaagcactggcaccgcggcctgggaaccgccatgttaagagacttctgcgaaacctttccagaggatgaggcactgggtgtcagctgcagcatgagtcccgctatgtatcaagcccatccaggaaacagcgaggacgtgtcaagacatgccagaactagccagaacgacaggcctagacagccggcaccgggagatgggtccaaggagaggatgtgtggggaggaactggaggacaccaaggacgacccggagtgtggcgtggaggaggaagacgccggacttgcagggcaacccccgggcaagctcacgcgatcaagcccttag

SEQ ID NO: 256268 - DNA, 579 bp, Artificial Sequence
  derived and/or modified sequence
atgaaggtgcagtctttcggggaaagggtggtcctcttcatccttaacgctatcatctttggacgcttagagcgcaacttggacgacgacgatatgttcttccttccacattccgtcaaggagcaggccaagatcttatggcggcgtggagcagcggtaggtttctatacgactaaaatgaagggccgtctctgcggggatggcaccggcgcatgctatctcctgcctgtcttcgacactgttttcatccggagaaaacactggcatcggggactcggcaccgctatgctgcgagacttttgtgagaccttccctgaagatgaggcgctgggggtaagctgtagcatgagccctgcgatgtatcaagctcaccctgggaatagcgaggacgtaagccggcacgccagaacatcccagaatgatagaccgcgtcagcctgcccctggcgatggatcaaaggaaaggatgtgcggcgaggagttggaagacactaaagacgaccctgaatgcggcgtcgaggaagaagacgccggactggcgggacagcctcccggaaaacttacacgctcaagcccttag

SEQ ID NO: 256269 - DNA, 579 bp, Artificial Sequence
  derived and/or modified sequence
atgaaggtgcagtccttcggagagcgggttgtgcttttcatcctgaatgccattatctttggtcgcctagagaggaacctcgacgacgacgatatgttcttccttccacatagcgtgaaagagcaggcaaagattttgtggaggagaggcgcagcggtcggtttctatacaaccaagatgaaagggagactttgtggagacgggaccggcgcatgctatctccttccagtatttgataccgtgttcatccgcagaaaacactggcaccggggtctgggaactgccatgctcagggacttttgtgaaacgttccctgaggatgaagctctgggtgtttcctgtagcatgtctcctgccatgtaccaggcccaccctgggaacagtgaggacgtgagtcgccacgccagaacatcgcagaatgatcgcccacgtcaaccagctcctggagacggcagcaaagagaggatgtgtggagaagagctggaggacactaaggacgacccggagtgcggcgtggaagaagaggacgcaggccttgctgggcagcccccaggaaagctgactcggagcagtccgtag

SEQ ID NO: 256270 - protein, 202 aa, Artificial Sequence
  derived and/or modified sequence
MERGAGAKLLPLLLLLRATGFTCAQTDGRNGYTAVIEVTSGGPWGDWAWPEMCPDGFFASGFSLKVEPPQGIPGDDTALNGIRLHCARGNVLGNTHVVESQSGSWGEWSEPLWCRGGAYLVAFSLRVEAPTTLGDNTAANNVRFRCSDGEELQGPGLSWGDFGDWSDHCPKGACGLQTKIQGPRGLGDDTALNDARLFCCRS

SEQ ID NO: 256271 - DNA, 609 bp, Artificial Sequence
  derived and/or modified sequence
atggagcggggtgcaggcgcaaaacttctgcccctcctcttgctgctgagggctaccggctttacttgtgcccaaactgatggtcgaaatggctacacggccgtcatcgaagtaacttctggcggaccttggggagattgggcttggccagagatgtgcccagacgggtttttcgcatcaggatttagtctcaaggtcgagccccctcagggcatacctggggatgacaccgctctgaatggtattaggcttcactgtgcaagaggtaacgtgctggggaacactcatgtcgtagaaagccaatcaggatcttggggggaatggtccgaacctctctggtgcagagggggtgcttacctagttgccttttctttgagggtggaagcaccaaccactctcggcgataacactgccgctaacaacgtgcgctttagatgctctgacggagaagaactccagggccctggactttcatggggggatttcggcgactggagcgatcactgccccaaaggcgcttgcggccttcagacgaaaatccagggtccgagaggcctgggcgatgatacggccctgaacgatgctcggcttttctgctgccggtcttag

SEQ ID NO: 256272 - DNA, 747 bp, Artificial Sequence
  derived and/or modified sequence
aggcccttccgcaatcggagccctcacagaggccaaactgatataaatctgcttaggaggcctgattcacagacgctacaggatggagcggggcgcaggagccaagctgctgccgctgctgctgcttctgcgggcgactggtttcacatgtgcacagacagatggccggaacggctacacggcggtcatcgaagtgaccagcgggggtccctggggcgactgggcctggcctgagatgtgtcccgatggattcttcgccagcgggttctcgctcaaggtggagcctccccaaggcattcctggcgacgacactgcactgaatgggatcaggctgcactgcgcgcgcgggaacgtcctaggcaatacgcacgtgctggggcgaatggagtgagccgctgtggtgtcgcggcggcgcctacctagtggctttctcgcttcgcgtggaggcacccacgaccctcggtgacaacacagcagcgaacaacgtgcgcttccgctgttcagacggcgaggaactgcaggggcctgggctgagctggggagactttggagactggagtgaccattgccccaagggcgcgtgcggcctgcagaccaagatccagggacctagaggcctcggcgatgacactgcgctgaacgacgcgcgcttattctgctgccgcagttgaacggcgccgccgccgccgctctctcccgggccaggaggctagtcccacctcttgctattaaagcttctctgagttg

SEQ ID NO: 256273 - DNA, 609 bp, Artificial Sequence
  derived and/or modified sequence
atggagcgaggcgctggggctaagctgctgcctctcttgctccttctgcgggctactggtttcacttgtgcacaaaccgacggaagaaatggatatacggccgtgatcgaggtgacttctggggggccctggggtgattgggcatggccagagatgtgtcccgatggcttcttcgccagcggcttttccttaaaagtggaacctccgcaggggatccctggcgatgacacagcccttaacggaattcgactgcactgcgcgaggggtaacgtgctgggaaatactcatgttgtagaaagtcaaagtgggagttggggagagtggtccgagcccctttggtgccgcggtggcgcttacctggtcgcattctcacttagggtagaagcaccaaccaccttaggagacaataccgccgccaataacgtaaggtttagatgctccgatggggaggagttgcaaggtccaggtctcagctggggagattttggcgattggagtgaccattgtcctaaaggagcatgtggattacagacaaagatacaaggcccgcgaggactcggagacgacacggctttaaatgatgcgcggctgttttgttgccgtagttag

SEQ ID NO: 256274 - DNA, 803 bp, Artificial Sequence
  derived and/or modified sequence
aggcccttccgcaatcggagccctcacagaggccaaactgatataaatctgcttaggaggcctgattcacagacgctacaggatggagcggggcgcaggagccaagctgctgccgctgctgctgcttctgcgggcgactggtttcacatgtgcacagacagatggccggaacggctacacggcggtcatcgaagtgaccagcgggggtccctggggcgactgggcctggcctgagatgtgtcccgatggattcttcgccagcgggttctcgctcaaggtggagcctccccaaggcattcctggcgacgacactgcactgaatgggatcaggctgcactgcgcgcgcgggaacgtcctaggcaatacgcacgtggtagagtcccagtctggaaggtggggcgcaggggtcgaggatcccttggggtgatgctggggcgaatggagtgagccgctgtggtgtcgcggcggcgcctacctagtggctttctcgcttcgcgtggaggcacccacgaccctcggtgacaacacagcagcgaacaacgtgcgcttccgctgttcagacggcgaggaactgcaggggcctgggctgagctggggagactttggagactggagtgaccattgccccaagggcgcgtgcggcctgcagaccaagatccagggacctagaggcctcggcgatgacactgcgctgaacgacgcgcgcttattctgctgccgcagttgaacggcgccgccgccgccgctctctcccgggccaggaggctagtcccacctcttgctattaaagcttctctgagttg

SEQ ID NO: 256275 - DNA, 609 bp, Artificial Sequence
  derived and/or modified sequence
atggagcgaggcgccggcgctaaactcttgcccctcctgctactgcttcgggccaccggatttacttgcgcccagacagatggtcggaatgggtacaccgccgtgattgaggtaacatcagggggtccatggggggattgggcgtggcctgaaatgtgtccggatggtttctttgcttcaggcttttccttaaaagtggagccaccccagggaattcccggcgatgacaccgcgctcaatggtatcagattacattgcgcaagggggaacgtccttggaaacacccacgtggtcgaatcgcaaagtgggagttggggagagtggtccgagcccctttggtgccgcggtggcgcttacctggtcgcattctcacttagggtagaagcaccaaccaccttaggagacaataccgccgccaataacgtaaggtttagatgctccgatggggaggagttgcaaggtccaggtctcagctggggagattttggcgattggagtgaccattgtcctaaaggagcatgtggattacagacaaagatacaaggcccgcgaggactcggagacgacacggctttaaatgatgcgcggctgttttgttgccggtcttag

SEQ ID NO: 256276 - DNA, 609 bp, Artificial Sequence
  derived and/or modified sequence
atggagagaggcgccggcgccaagctgctgcccctgctgctgctgctgagagccaccggcttcacctgcgcccagaccgacggcagaaacggctacaccgccgtgatcgaggtgaccagcggcggcccctggggcgactgggcctggcccgagatgtgccccgacggcttcttcgccagcggcttcagcctgaaggtggagcccccccagggcatccccggcgacgacaccgccctgaacggcatcagactgcactgcgccagaggcaacgtgctgggcaacacccacgtggtggagagccagagcggcagctggggcgagtggagcgagcccctgtggtgcagaggcggcgcctacctggtggccttcagcctgagagtggaggcccccaccaccctgggcgacaacaccgccgccaacaacgtgagattcagatgcagcgacggcgaggagctgcagggccccggcctgagctggggcgacttcggcgactggagcgaccactgccccaagggcgcctgcggcctgcagaccaagatccagggccccagaggcctgggcgacgacaccgccctgaacgacgccagactgttctgctgcagaagctag

SEQ ID NO: 256277 - DNA, 767 bp, Artificial Sequence
  derived and/or modified sequence
aggcccttccgcaatcggagccctcacagaggccaaactgatataaatctgcttaggaggcctgattcacagacgctacaggatggagcggggcgcaggagccaagctgctgccgctgctgctgcttctgcgggcgactggtttcacatgtgcacagacagatggccggaacggctacacggcggtcatcgaagtgaccagcgggggtccctggggcgactgggcctggcctgagatgtgtcccgatggattcttcgccagcgggttctcgctcaaggtggagcctccccaaggcattcctggcgacgacactgcactgaatgggatcaggctgcactgcgcgcgcgggaacgtcctaggcaatacgcacgtggtagagtcccagtctggaagctggggcgaatggagtgagccgctgtggtgtcgcggcggcgcctacctagtggctttctcgcttcgcgtggaggcacccacgaccctcggtgacaacacagcagcgaacaacgtgcgcttccgctgttcagacggcgaggaactgcaggggcctgggctgagctggggagactttggagactggagtgaccattgccccaagggcgcgtgcggcctgcagaccaagatccagggacctagaggcctcggcgatgacactgcgctgaacgacgcgcgcttattctgctgccgcagttgaacggcgccgccgccgccgctctctcccgggccaggaggctagtcccacctcttgctattaaagcttctctgagttg

SEQ ID NO: 256278 - DNA, 609 bp, Artificial Sequence
  derived and/or modified sequence
atggagcggggcgctggggccaagctgttgcctttgctactccttctccgggccactggctttacttgcgcacagacggacggccgcaatggttacaccgcagtcatcgaggtcacatccggcggaccctggggtgactgggcttggccagagatgtgccccgatgggttttttgccagcggcttctcgctcaaagtggagcccccacagggtattcccggagacgatacagctctaaatggaatcaggctgcattgcgcccgaggtaacgtgctggggaatacacacgtggtggagtcccaatcggggagctggggtgaatggtctgagcccctctggtgccgggggggggcatatcttgtcgccttcagtctgcgggtggaagcccccacaacactgggggacaatacagccgctaataacgtacgcttcaggtgctcggatggggaagagctccaaggtccaggcttgtcctggggcgactttggtgactggagcgatcactgccctaagggtgcctgtggcctccagaccaagatacaggggcctaggggtctcggggacgataccgcgctgaatgatgcgaggcttttctgttgccggtcctag

SEQ ID NO: 256279 - DNA, 651 bp, Artificial Sequence
  derived and/or modified sequence
aggcccttccgcaatcggagccctcacagaggccaaactgatataaatctgcttaggaggcctgattcacagacgctacaggatggagcggggcgcaggagccaagctgctgccgctgctgctgcttctgcgggcgactggtttcacatgtgcacagacagatggccggaacggctacacggcggtcatcgaagtgaccagcgggggtccctggggcgactgggcctggcctgagatgtgtcccgatggattcttcgccagcgggttctcgctcaagctggggcgaatggagtgagccgctgtggtgtcgcggcggcgcctacctagtggctttctcgcttcgcgtggaggcacccacgaccctcggtgacaacacagcagcgaacaacgtgcgcttccgctgttcagacggcgaggaactgcaggggcctgggctgagctggggagactttggagactggagtgaccattgccccaagggcgcgtgcggcctgcagaccaagatccagggacctagaggcctcggcgatgacactgcgctgaacgacgcgcgcttattctgctgccgcagttgaacggcgccgccgccgccgctctctcccgggccaggaggctagtcccacctcttgctattaaagcttctctgagttg

SEQ ID NO: 256280 - DNA, 609 bp, Artificial Sequence
  derived and/or modified sequence
atggagagaggagctggggccaagctgctgcccctgctgctgctgctgcgggccaccggcttcacctgtgcccagacagatggaagaaatggctacacagctgtgattgaggtgaccagcggcggcccctggggagactgggcctggccagagatgtgcccagatggcttctttgccagcggcttcagcctgaaggtggagcccccccagggcatccctggagatgacacagccctgaatggcatccggctgcactgtgcccggggaaatgtgctgggcaacacccacgtggtggagagccagagcggctcctggggcgagtggagcgagcccctgtggtgccggggcggggcctacctggtggccttcagcctgcgggtggaggcccccaccaccctgggggacaacacagctgccaacaacgtgcgcttccgctgcagtgatggagaggagctgcagggccctggcctgtcctggggagactttggagactggagcgaccactgccccaagggggcctgtggcctgcagaccaagatccagggcccccggggcctgggagatgacacagccctgaatgatgcccggctcttctgctgccgctcctag

SEQ ID NO: 256281 - DNA, 609 bp, Artificial Sequence
  derived and/or modified sequence
atggagcggggcgccggcgccaagctgctgcccctgctgctgctgttaagggccacgggctttacctgcgctcaaaccgatgggaggaacggatataccgcggtcattgaagtaaccagtggtgggccctggggggactgggcctggccagagatgtgcccagacggcttttttgcctccggtttttctctgaaagtagagcccccccaaggcatccctggtgacgacacagcactgaacggtatacgcctgcattgtgctaggggcaatgtattaggcaacactcatgtcgttgagagccaaagtggaagctggggggagtggtctgaacccctgtggtgtcggggcggtgcatacctggtggctttctcacttagggtggaggccccaaccacgctgggggacaacactgccgctaataatgtaagatttcggtgctcagatggagaggagctccaaggtcccgggttgtcttggggggactttggagattggagtgatcattgtcccaaaggagcctgcggcctgcagactaaaattcagggtccacgcggacttggggacgacaccgcgcttaatgacgctcggttgttctgttgccgcagctag

SEQ ID NO: 256282 - RNA, 609 nt, Artificial Sequence
  derived and/or modified sequence
auggagcgaggcgcuggggcuaagcugcugccucucuugcuccuucugcgggcuacugguuucacuugugcacaaaccgacggaagaaauggauauacggccgugaucgaggugacuucuggggggcccuggggugauugggcauggccagagaugugucccgauggcuucuucgccagcggcuuuuccuuaaaaguggaaccuccgcaggggaucccuggcgaugacacagcccuuaacggaauucgacugcacugcgcgagggguaacgugcugggaaauacucauguuguagaaagucaaagugggaguuggggagagugguccgagccccuuuggugccgcgguggcgcuuaccuggucgcauucucacuuaggguagaagcaccaaccaccuuaggagacaauaccgccgccaauaacguaagguuuagaugcuccgauggggaggaguugcaagguccaggucucagcuggggagauuuuggcgauuggagugaccauuguccuaaaggagcauguggauuacagacaaagauacaaggcccgcgaggacucggagacgacacggcuuuaaaugaugcgcggcuguuuuguugccguaguuag

SEQ ID NO: 256283 - RNA, 609 nt, Artificial Sequence
  derived and/or modified sequence
auggagcgaggcgccggcgcuaaacucuugccccuccugcuacugcuucgggccaccggauuuacuugcgcccagacagauggucggaauggguacaccgccgugauugagguaacaucaggggguccauggggggauugggcguggccugaaauguguccggaugguuucuuugcuucaggcuuuuccuuaaaaguggagccaccccagggaauucccggcgaugacaccgcgcucaaugguaucagauuacauugcgcaagggggaacguccuuggaaacacccacguggucgaaucgcaaagugggaguuggggagagugguccgagccccuuuggugccgcgguggcgcuuaccuggucgcauucucacuuaggguagaagcaccaaccaccuuaggagacaauaccgccgccaauaacguaagguuuagaugcuccgauggggaggaguugcaagguccaggucucagcuggggagauuuuggcgauuggagugaccauuguccuaaaggagcauguggauuacagacaaagauacaaggcccgcgaggacucggagacgacacggcuuuaaaugaugcgcggcuguuuuguugccggucuuag

SEQ ID NO: 256284 - DNA, 627 bp, Artificial Sequence
  derived and/or modified sequence
atgaagctgcccagcatcagctgcccccacgagtgcttcgaggccatcctgagcctggacaccggctacagagcccccgtgaccctggtgagaaagggctgctggaccggcccccccgccggccagacccagagcaacgccgacgccctgccccccgactacagcgtggtgagaggctgcaccaccgacaagtgcaacgcccacctgatgacccacgacgccctgcccaacctgagccaggcccccgacccccccaccctgagcggcgccgagtgctacgcctgcatcggcgtgcaccaggacgactgcgccatcggcagaagcagaagagtgcagtgccaccaggaccagaccgcctgcttccagggcaacggcagaatgaccgtgggcaacttcagcgtgcccgtgtacatcagaacctgccacagacccagctgcaccaccgagggcaccaccagcccctggaccgccatcgacctgcagggcagctgctgcgagggctacctgtgcaacagaaagagcatgacccagcccttcaccagcgccagcgccaccaccccccccagagccctgcaggtgctggccctgctgctgcccgtgctgctgctggtgggcctgagcgcctag

SEQ ID NO: 256285 - DNA, 627 bp, Artificial Sequence
  derived and/or modified sequence
atgaaactccccagtatttcgtgtccccatgaatgcttcgaggccatcctgagcctcgacacgggttatcgagcaccagtaacacttgttaggaaaggttgttggactggaccaccggcaggacagacgcagtccaatgcggacgcactccctcccgactatagtgtggtgcgcggatgcaccacagataaatgtaatgcacacttgatgacccatgacgctctgcccaatctgagccaggcgcctgatcctcctaccctcagcggagcagagtgctacgcgtgtattggagtgcatcaggatgattgtgctatcgggaggtctcggcgtgtacagtgtcatcaggatcagacagcgtgtttccagggaaatggtcggatgaccgttggtaatttttccgtgccagtgtatatcagaacttgtcataggccctcctgtacgaccgagggcactacttcgccttggactgcaattgacctccagggtagctgctgcgagggctacttgtgtaaccgcaagagtatgacccaacctttcacttccgccagcgcaacgaccccaccccgcgctctgcaggtgctcgcccttctgctgcccgtgctgctactagttggcttgagtgcatag

SEQ ID NO: 256286 - DNA, 627 bp, Artificial Sequence
  derived and/or modified sequence
atgaagctgcccagcatcagctgcccccatgaatgttttgaggccatcctgagcctggacaccggctaccgggcccctgtgaccctggtgaggaagggctgctggacaggccccccagctggccagacccagagcaatgctgatgccctgcccccagactacagcgtggtgcggggctgcaccacagacaagtgcaatgcccacctgatgacccatgatgccctgcccaacctgagccaggccccagacccccccaccctgagcggggctgaatgttatgcctgcatcggcgtgcaccaggatgactgtgccatcggccgcagcagaagagtgcagtgccaccaggaccagacagcctgcttccagggcaatggccgcatgacagtgggcaacttctctgtgcctgtgtacatccgcacctgccaccggcccagctgcaccacagagggcaccaccagcccctggacagccatcgacctgcagggcagctgctgtgagggctacctgtgcaacaggaagtccatgacccagcccttcaccagcgccagcgccaccaccccaccccgggccctgcaggtgctggccctgctgctgcctgtgctgctgctggtgggcctgagcgcctag

SEQ ID NO: 256287 - DNA, 627 bp, Artificial Sequence
  derived and/or modified sequence
atgaagctgcccagcatcagctgcccccacgagtgcttcgaggccatactctccctcgatacagggtacagagcaccagttaccctggtcaggaaggggtgctggactggaccacctgctggccaaacacagtcgaacgcggacgccttaccccccgactacagcgtggtccgcggttgcaccactgataagtgtaatgctcacttaatgacccatgatgcactccctaacctctctcaagcccctgaccctcctaccttatccggagctgagtgttacgcttgtatcggcgtccaccaggacgattgcgcaatcgggcgtagtcggagggtacaatgccaccaggatcagaccgcttgcttccagggcaatggaagaatgaccgtcggcaatttcagcgtccctgtctacattcgtacctgccaccggcccagttgtacgacagagggcactacatcaccctggactgcaatcgatctccaagggagttgttgtgaaggctacttatgcaacaggaaatcaatgacacagccatttacaagtgcaagcgctacaactccgccacgggcactgcaagtgctagccctgttactccctgtgctgctgctggttggtcttagcgcctag

SEQ ID NO: 256288 - DNA, 627 bp, Artificial Sequence
  derived and/or modified sequence
atgaaactcccctctattagctgtcctcacgagtgttttgaggcaatcttgtcgctcgacaccggttatagagccccagttacccttgttcgcaaggggtgctggacagggcctccagctggccagacccagagcaatgccgatgcccttcccccagattattctgtcgtgcgagggtgcaccacagacaagtgtaatgcccaccttatgactcacgatgccctgccaaatcttagccaggctcccgacccgccaaccctaagcggcgctgagtgctatgcatgtattggagtacaccaggacgactgcgctattggcaggtcacggcgtgtccaatgtcatcaggaccagaccgcctgcttccaaggaaacgggagaatgaccgtcggaaacttctcagtgcctgtgtacattcgaacttgccacaggccaagttgtactactgaaggcacaacatcaccatggacagctatagatctccaggggagttgctgcgaaggatacctttgtaaccggaagtccatgactcagccttttacttctgctagcgccacaacaccccctagagctctgcaagtactggccctactcttaccagtgttactgctggttggcttatccgcatag

SEQ ID NO: 256289 - protein, 247 aa, Artificial Sequence
  derived and/or modified sequence
MIRRCFQVAARLGHHRGLLEAPRILPRLNPASAFGSSTDSMFSRFLPEKTDLKDYALPNASWCSDMLSLYQEFLEKTKSSGWIKLPSFKSNRDHIRGLKLPSGLAVSSDKGDCRIFTRCIQVEGQGFEYVIFFQPTQKKSVCLFQPGSYLEGPPGFAHGGSLAAMMDETFSKTAFLAGEGLFTLSLNIRFKNLIPVDSLVVMDVELDKIEDQKLYMSCIAHSRDQQTVYAKSSGVFLQLQLEEESPQ

SEQ ID NO: 256290 - protein, 250 aa, Artificial Sequence
  derived and/or modified sequence
  misc_feature (1)..(1): Xaa can be any naturally occurring amino acid
XYALPNASWCSDMLSLYQEFLEKTKSSGWIKLPSFKSNRDHIRGLKLPSGLAVSSDKGDCRIFTRCIQVEGQGFEYVIFFQPTQKKSVCLFQPGSYLEGPPGFAHGGSLAAMMDETFSKTAFLAGEGLFTLSLNIRFKNLIPVDSLVVMDVELDKIEDQKLYMSCIAHSSWKKSLPSNSHCACRRATASPACLLPPASPACLLPPASPACLLPPLPASCLLPPLPASCLLPPLPAWDPSKSREGSSSSNW

SEQ ID NO: 256291 - DNA, 744 bp, Artificial Sequence
  derived and/or modified sequence
atgatcagaagatgcttccaggtggccgccagactgggccaccacagaggcctgctggaggcccccagaatcctgcccagactgaaccccgccagcgccttcggcagcagcaccgacagcatgttcagcagattcctgcccgagaagaccgacctgaaggactacgccctgcccaacgccagctggtgcagcgacatgctgagcctgtaccaggagttcctggagaagaccaagagcagcggctggatcaagctgcccagcttcaagagcaacagagaccacatcagaggcctgaagctgcccagcggcctggccgtgagcagcgacaagggcgactgcagaatcttcaccagatgcatccaggtggagggccagggcttcgagtacgtgatcttcttccagcccacccagaagaagagcgtgtgcctgttccagcccggcagctacctggagggcccccccggcttcgcccacggcggcagcctggccgccatgatggacgagaccttcagcaagaccgccttcctggccggcgagggcctgttcaccctgagcctgaacatcagattcaagaacctgatccccgtggacagcctggtggtgatggacgtggagctggacaagatcgaggaccagaagctgtacatgagctgcatcgcccacagcagagaccagcagaccgtgtacgccaagagcagcggcgtgttcctgcagctgcagctggaggaggagagcccccagtag

SEQ ID NO: 256292 - DNA, 744 bp, Artificial Sequence
  derived and/or modified sequence
atgatccgccggtgtttccaggtggcggctaggctcggtcatcacaggggcctgctggaagccccaaggatcctccccaggctcaatccagctagcgccttcggatcaagcaccgatagtatgttcagtcggtttcttccggaaaaaactgacttgaaggactacgccctccccaacgcgagttggtgctccgatatgctatcgctctatcaggagttcctcgagaaaacaaagtctagtggatggatcaagctgccgtctttcaaatccaaccgggatcacattcgtgggctcaagcttccttcaggattagctgtctcctcagacaagggggactgtaggattttcacccggtgcattcaagtggaaggacagggatttgaatacgtcatcttctttcaacctacccagaagaagtctgtgtgcttgtttcagcccgggtcctatttagagggtcctcccggctttgctcacggtggctcgctggctgctatgatggatgagaccttctcaaaaactgccttcctggccggcgagggtctgtttactttgagtcttaatatccggttcaagaatctcattcctgtggactccctcgtggtcatggacgtcgagctggacaagatagaggatcagaagctgtacatgtcatgtatcgcgcactcccgcgatcagcagaccgtctatgctaagagcagcggagtcttcctgcagctccagctcgaagaggagtctccgcagtag

SEQ ID NO: 256293 - DNA, 744 bp, Artificial Sequence
  derived and/or modified sequence
atgatccgccgctgcttccaggtggccgcccggctgggccaccaccggggcctgctggaggccccccgcatcctgccccggctgaacccagccagcgccttcggcagcagcacagacagcatgttcagccgcttcctgcctgagaagacagacctgaaggactatgccctgcccaatgcctcctggtgcagcgacatgctgagcctgtaccaggagttcctggagaagaccaagagcagcggctggatcaagctgcccagcttcaagagcaacagagaccacatccggggcctgaagctgcccagcggcctggccgtgtccagtgacaagggggactgccgcatcttcacccgctgcatccaggtggagggccagggctttgaatatgtgatcttcttccagcccacccagaagaagtctgtgtgcctcttccagcccggcagctacctggagggccccccaggctttgcccacggcggcagcctggccgccatgatggatgagaccttcagcaagacagccttcctggccggggagggcctcttcaccctgagcctgaacatccgcttcaagaacctgatccctgtggacagcctggtggtgatggatgtggagctggacaagattgaggaccagaagctgtacatgagctgcatcgcccacagccgggaccagcagacagtgtatgccaagagcagtggagtcttcctgcagctgcagctggaggaggagagcccccagtag

SEQ ID NO: 256294 - DNA, 744 bp, Artificial Sequence
  derived and/or modified sequence
atgatccggcggtgcttccaggtggccgcccggctgggccaccaccgaggattactggaggcccctcgaattctccccaggttaaatcccgcttccgccttcggcagctctactgactcaatgttctcccgctttctacctgaaaagaccgatttaaaagattatgctctgcccaatgcatcgtggtgcagcgacatgcttagcctataccaggagtttcttgagaaaacaaaatcctctgggtggatcaaactgccatcctttaaaagtaaccgcgaccatattagaggactgaagctgcctagcgggctggcagtctcgtccgataagggcgactgtcgaatcttcaccagatgcatccaagtggagggccagggattcgaatatgttattttttttcagcccacccagaaaaaatccgtgtgtctgttccagccagggagctacctggaaggcccacctggctttgcgcatggaggatcccttgccgctatgatggatgagacctttagcaagacagcttttctggccggcgagggcctgtttacactgtctttaaacatccgttttaaaaatctgatccctgtagactctctggtagtgatggacgtcgaactagacaagatcgaggaccagaaactctatatgtcttgtatcgcgcacagccgggatcaacagacagtgtacgcaaaatcttctggcgtctttttacagcttcagctggaagaggagagtccacagtag

SEQ ID NO: 256295 - DNA, 744 bp, Artificial Sequence
  derived and/or modified sequence
atgattaggcggtgtttccaggtagcagcaagactgggacatcacagaggattattagaggccccaaggattctcccaagactgaaccccgcttccgccttcggaagtagtactgattcaatgttcagccgtttcttgcccgagaagactgatctgaaggactacgccctgcctaatgcaagttggtgctccgacatgctgtcgttgtaccaggaattcctggaaaagaccaagtctagtgggtggatcaaactgcccagttttaaatccaacagggaccatatccgtggtcttaaacttccttccgggctggccgtgtcttcggataagggagactgtcggatctttacccgttgcatacaggtggaaggccaaggtttcgagtatgttatcttctttcagccaactcagaagaagagcgtgtgcctatttcaaccgggatcataccttgaaggcccacctggattcgcccatggcggatcacttgcagcgatgatggacgagacgttctcgaaaacagcatttctagctggtgaggggctgttcacactgtcgcttaatatcaggtttaagaacttgattcctgtcgactccctcgttgtgatggatgtcgagctggataagattgaggatcaaaaactgtacatgtcatgtatcgcccattcgagggaccaacagacagtgtacgcaaagtctagcggggtgttcctgcaactgcagctagaagaggagagtccacagtag

SEQ ID NO: 256296 - DNA, 2503 bp, Artificial Sequence
  derived and/or modified sequence
agcctcgcctagctctctgaaagaaagcctgcaacagaagggagagaagcggccccaagtgcagctgaaagcactccttgggagtcagccaagaccctccatccaagcagggctggatccttgcacttggccatgataaggagatgcttccaggtggcagcaagacttggccaccacagaggccttcttgaggccccccgtatcctgcccagactcaaccctgcctcagcatttggatcctccacagactccatgttctcaagattcttgccagagaagacagacttgaaggattatgctcttcccaatgccagctggtgttcggacatgctgagcctgtaccaagaatttctggagaagactaagtctagcggctggatcaagctgccctccttcaagtccaacagagaccacatccggggactcaagctcccatctggactggcagtttcctcagacaaaggtgactgtcgcatcttcaccaggtgcatccaagtggaaggacaaggctttgagtatgtcatctttttccagccaacccagaagaagtcggtctgtcttttccaaccaggctcctacctggaggggcccccagggtttgctcacggcgggtccctggcagccatgatggacgagaccttttctaaaactgccttcctggctggagaggggctgttcacactaagtctcaacatcaggttcaaaaacttgatccccgtggactctctggttgtaatggacgtagaactggacaagattgaggaccagaagctttacatgtcctgcatcgcccacagcagagaccagcagacagtttatgccaagtcctcaggtgttttccttcagctgcagttggaagaagagtctccccagtaacagtcactgtgcctgcaggagagccactgcctcccctgcctgcctcctgcctcctgcctcccctgcctgcctcctgcctcctgcctcccctgcctgcctcctgcctcccctgcctgcctcctgcctcctgcctcccctgcctgcctcctgcctcctgcctcccctgcctgcctgggacccatcaaagagcagggaggggtcctcaagcagcaattggtgaggcgagggaaaggacccttttctctgagtaaataaagtctcacagtcccattctcggcccagggcctttctgtggttggaaatcaaaatccttccagggcatctcacatacccaccttcccattcagcaccgactgaaaagatttactgagtacccgccaggtgtcaggcactgtgtgaggcaccaggcacccagaagtgaaagacagggccccggtctcaagatgcacaatgcgggagccaggtgccaagtcagagtgccctatcacgctcctcccacacccaccctggcttccatcatgagtgcagtgtcatctcagcgggaggaagggctaattttactctacaaaagcaatcagaaaacatcttctagaagaagctcttcctgaactgtctcaaaagttaagtggtgttcattaggcaggcaggggagaggaggatatcccaggcagaagggaagtaagaagtaagacaaaggtgcagaggtgtgaaagtgtacagggactttggagaagagcaaggtgttgaggagggcaggcgtttagggaaagagaaggtgggcaggagcaaaccacaggaaggcttcataatccctgatggagagctggaactttgtcttgcaggcaacagggagcctccaaagggcttgggctggggagtgacagagctttgttatttagaaagatgactcagtggcagtaaggcgtcagcaagactgaaggcaggagtactagttaggagatccccacaggctttacactagagacagtaagggcctgcaggggtcagagctgcgaagctgagagatatgagaaaatgttacaaatacaggaagtgcaggactgtgccactagttatacaatgtggatctgtgaagacgagctccaagtttctggcttatgagtttccaggtggttatcactggaaatacagaaagaggtgggggtaaacaatgagctcagttttacatgcatcgagcttgaagtgcccatggaacttgtaccatgtggcaagtgccagcaggaacgtggatattgtgatatggagcttggagagataagctactgactcaaatcgtgagccaatataaaatgtgacatgaggccggacacggtggctcatgcctgtaatcccagcactttgggaggccgatgcgggctgatcacttgagtgattcgagagtcgagaggctggtcgggagttcgagaccagcctgaccaacatggagaaaccctatctctactaaaaacacaaaaaattagccgggtgtggtggcgcatgcctgtaatcccagctactcaggaggctgaggcaggagaatcacttgaacccgagaggcggaggttgcagtgagccgagatcacaccattgcactccagcctgggcaacaagagcaaaactccgtccc

SEQ ID NO: 256297 - DNA, 753 bp, Artificial Sequence
  derived and/or modified sequence
tgatacgccctgcccaacgccagctggtgcagcgacatgctgagcctgtaccaggagttcctggagaagaccaagagcagcggctggatcaagctgcccagcttcaagagcaacagagaccacatcagaggcctgaagctgcccagcggcctggccgtgagcagcgacaagggcgactgcagaatcttcaccagatgcatccaggtggagggccagggcttcgagtacgtgatcttcttccagcccacccagaagaagagcgtgtgcctgttccagcccggcagctacctggagggcccccccggcttcgcccacggcggcagcctggccgccatgatggacgagaccttcagcaagaccgccttcctggccggcgagggcctgttcaccctgagcctgaacatcagattcaagaacctgatccccgtggacagcctggtggtgatggacgtggagctggacaagatcgaggaccagaagctgtacatgagctgcatcgcccacagcagctggaagaagagcctgcccagcaacagccactgcgcctgcagaagagccaccgccagccccgcctgcctgctgccccccgccagccccgcctgcctgctgccccccgccagccccgcctgcctgctgccccccctgcccgccagctgcctgctgccccccctgcccgccagctgcctgctgccccccctgcccgcctgggaccccagcaagagcagagagggcagcagcagcagcaactggtag

SEQ ID NO: 256298 - DNA, 753 bp, Artificial Sequence
  derived and/or modified sequence
tagtatgctctgcccaacgcaagctggtgctctgatatgctgagcctgtaccaggaattccttgaaaagaccaagagcagcggttggattaagctgccttcatttaagtccaaccgcgaccatatccgaggcttgaagctgccgagtggcctggctgtaagctcagataaaggtgattgtaggatctttaccaggtgtatccaggtcgagggacagggtttcgagtatgtcatattttttcaacctactcagaaaaaaagcgtgtgcctgttccagccaggatcctatctcgaagggccaccggggtttgcccacggtggctctctggccgccatgatggatgagactttctccaaaacagcatttctggccggagaggggctgtttacgctaagcttgaatatacgttttaagaacctgattcctgtggatagcctcgtcgttatggatgtggagttagacaagattgaggaccagaaactgtacatgtcgtgtatcgcacattcctcatggaaaaaatcacttccatctaatagccattgtgcttgcaggcgggctacagcatcacccgcatgtcttctgcctcctgcaagcccagcatgtctgctaccacctgcatctcctgcatgcttattgcctcctctgcccgcttcttgtctgctgccccccctgccagcatcttgtctccttccacccctgcccgcctgggatccttctaagtcgagagaaggcagtagttccagcaactggtag

SEQ ID NO: 256299 - DNA, 753 bp, Artificial Sequence
  derived and/or modified sequence
tgatatgccctgcccaatgcctcctggtgcagcgacatgctgagcctgtaccaggagttcctggagaagaccaagagcagcggctggatcaagctgcccagcttcaagagcaacagagaccacatccggggcctgaagctgcccagcggcctggccgtgtccagtgacaagggggactgccgcatcttcacccgctgcatccaggtggagggccagggctttgaatatgtgatcttcttccagcccacccagaagaagtctgtgtgcctcttccagcccggcagctacctggagggccccccaggctttgcccatggaggcagcctggccgccatgatggatgagaccttcagcaagacagccttcctggccggggagggcctcttcaccctgagcctgaacatccgcttcaagaacctgatccctgtggacagcctggtggtgatggatgtggagctggacaagattgaggaccagaagctgtacatgagctgcatcgcccacagctcctggaagaagagcctgcccagcaacagccactgtgcctgccggcgggccacagccagccctgcctgcctgctgcccccagccagccctgcctgcctgctgcccccagccagccctgcctgcctgctgccccccctgcctgccagctgcctgctgccccccctgcctgccagctgcctgctgccccccctgcctgcctgggaccccagcaagagccgggagggcagcagcagcagcaactggtag

SEQ ID NO: 256300 - DNA, 753 bp, Artificial Sequence
  derived and/or modified sequence
tgatacgccctgcccaacgccagctggtgcagcgacatgctgagcctctaccaggagttcctggagaagacaaagtcatccgggtggattaaactgcctagcttcaaatccaacagagaccacattcgcggactgaagctgccctcaggcttggctgtatcttcagataagggcgactgccggatctttactcgctgtattcaagtcgagggacagggatttgagtacgttatctttttccaacccacacaaaaaaaatcagtctgtctgtttcagccggggagttatctggagggccccccaggctttgctcacggtggctctctcgccgcaatgatggacgagacattcagtaaaactgcatttcttgcaggcgagggtctctttacattaagcctaaacattagatttaaaaacctgatcccagtggactctttggtggttatggacgttgagttggacaaaatcgaggaccaaaagttgtatatgtcttgtatcgctcacagctcatggaagaagagcctaccctccaattctcattgcgcctgcaggagggccactgcctctcccgcctgtctgttgccccctgcctccccagcttgtctgctccctccggcatctcccgcctgtctgttgccaccactgcccgcgagttgcttactgcccccgctccccgcgtcatgtttactgcctcccctccccgcctgggacccgtccaagtctagggagggctccagctcttccaactggtag

SEQ ID NO: 256301 - DNA, 753 bp, Artificial Sequence
  derived and/or modified sequence
taatacgcactgccaaatgccagctggtgttctgatatgctgagcctgtatcaggaatttttagaaaagacgaagagttcagggtggattaaactgccatcatttaagtctaatagggatcatatcagggggctgaaactgccttctggacttgcagtttccagtgacaagggagactgccgcatcttcacacggtgcatacaagtggaaggacagggattcgagtatgtcattttcttccaacccacacagaagaagagcgtgtgtctttttcaacccggatcatacctggagggcccacctggcttcgcccatggcggatcacttgccgcaatgatggatgaaaccttctccaagacagcttttcttgccggtgaggggctctttactcttagcctgaatattcggttcaagaatcttattcctgtcgatagtcttgtcgtcatggacgtggaactcgacaaaatcgaggatcagaaactgtatatgtcatgcatagcgcacagctcgtggaaaaagagtctgcccagcaactctcactgcgcctgccggagagctacagcaagtcccgcatgtctgctccccccagcctcgcctgcatgtctgctgcccccagccagccccgcatgcctgcttccacccctccctgcctcgtgccttctgcctccactcccggcaagctgtctcctccccccactacccgcttgggatccatccaaaagtcgtgaagggagctcctcatctaattggtag

SEQ ID NO: 256302 - DNA, 802 bp, Artificial Sequence
  derived and/or modified sequence
attatgctcttcccaatgccagctggtgttcggacatgctgagcctgtaccaagaatttctggagaagactaagtctagcggctggatcaagctgccctccttcaagtccaacagagaccacatccggggactcaagctcccatctggactggcagtttcctcagacaaaggtgactgtcgcatcttcaccaggtgcatccaagtggaaggacaaggctttgagtatgtcatctttttccagccaacccagaagaagtcggtctgtcttttccaaccaggctcctacctggaggggcccccagggtttgctcacggcgggtccctggcagccatgatggacgagaccttttctaaaactgccttcctggctggagaggggctgttcacactaagtctcaacatcaggttcaaaaacttgatccccgtggactctctggttgtaatggacgtagaactggacaagattgaggaccagaagctttacatgtcctgcatcgcccacagcagttggaagaagagtctccccagtaacagtcactgtgcctgcaggagagccactgcctcccctgcctgcctcctgcctcctgcctcccctgcctgcctcctgcctcctgcctcccctgcctgcctcctgcctcccctgcctgcctcctgcctcctgcctcccctgcctgcctcctgcctcctgcctcccctgcctgcctgggacccatcaaagagcagggaggggtcctcaagcagcaattggtgaggcgagggaaaggacccttttctctgagtaaataaagtctcacagtccca

SEQ ID NO: 256303 - protein, 471 aa, Artificial Sequence
  derived and/or modified sequence
MLAFILSRATPRPALGPLSYREHRVALLHLTHSMSTTGRGVTFTINCSGFGQHGADPTALNSVFNRKPFRPVTNISVPTQVNISFAMSAILDVNEQLHLLSSFLWLEMVWDNPFISWNPEECEGITKMSMAAKNLWLPDIFIIELMDVDKTPKGLTAYVSNEGRIRYKKPMKVDSICNLDIFYFPFDQQNCTLTFSSFLYTVDSMLLDMEKEVWEITDASRNILQTHGEWELLGLSKATAKLSRGGNLYDQIVFYVAIRRRPSLYVINLLVPSGFLVAIDALSFYLPVKSGNRVPFKITLLLGYNVFLLMMSDLLPTSGTPLIGVYFALCLSLMVGSLLETIFITHLLHVATTQPPPLPRWLHSLLLHCNSPGRCCPTAPQKENKGPGLTPTHLPGVKEPEVSAGQMPGPAEAELTGGSEWTRAQREHEAQKQHSVELWLQFSHAMDAMLFRLYLLFMASSIITVICLWNT

SEQ ID NO: 256304 - DNA, 1416 bp, Artificial Sequence
  derived and/or modified sequence
atgcttgcctttatcctcagccgcgcaaccccacggccagcgttgggcccactgtcctacagagagcatcgagtggctctacttcatctaacacacagcatgtctactacgggccgcggcgtgacattcaccattaattgctccgggtttggacagcatggggcagaccccaccgccctgaacagcgtgttcaacagaaaaccctttagaccagtcacgaatatctctgtgcccacgcaggtgaacatttcatttgccatgtccgccattttagatgtgaacgagcaactgcacctgttgtcttcctttctatggcttgagatggtctgggataacccctttatcagctggaacccggaggagtgtgaaggcatcacaaaaatgagcatggcagctaagaacctctggttgccagatatattcattatcgagctgatggatgttgacaagacgccaaaggggttgaccgcctacgtctccaacgagggacgaatacgctacaagaaacctatgaaggtcgattcaatctgtaaccttgacattttttactttccctttgatcagcagaattgtaccctgaccttcagttccttcctttatacggtagactccatgctgcttgatatggaaaaagaggtatgggagatcactgatgccagtagaaatatcctacagacccacggcgaatgggaactcctgggcctgtccaaggccaccgcaaagttgagcagaggagggaacctctatgaccagattgtgttctacgtcgccatacgccgcagaccttcactgtacgtgatcaacttactcgtgcccagtggctttctggtagcaatcgatgccctgagcttctatctcccagtcaagagtggcaatcgcgtaccattcaagatcactctgctactcgggtacaatgtgtttctgctaatgatgtcagatcttttgccaacatccggtaccccactgatcggcgtgtactttgccctgtgcttgtccctgatggtgggaagcctgctggagactatctttatcacacaccttctgcatgtggcaactacccagcccccaccgctgccgcggtggctccattctttgctgcttcattgcaactccccaggccggtgttgccctacggccccccagaaggaaaataagggtcccggactgactcccacccatctgcctggggtgaaagagccagaggtgagcgcaggtcaaatgccagggccagccgaagctgaactaaccgggggtagtgagtggacacgcgcacagcgcgagcatgaagctcagaagcagcactctgtggaactgtggctgcaattctcccatgctatggacgccatgcttttccggctttacctgctgtttatggcctcctcaatcatcactgtgatctgcttatggaatacttag

SEQ ID NO: 256305 - DNA, 1416 bp, Artificial Sequence
  derived and/or modified sequence
atgctggccttcatcctgagccgggccacccccaggcctgccctgggccccctgagctaccgggagcaccgggtggccctgctgcacctgacccacagcatgagcaccaccggccggggcgtgaccttcaccatcaactgcagcggcttcggccagcacggggctgaccccacagccctgaacagcgtcttcaacaggaagcccttccggcctgtgaccaacatctctgtgcccacccaggtgaacatcagctttgccatgtctgccatcctggatgtgaatgagcagctgcacctgctgagcagcttcctgtggctggagatggtgtgggacaaccccttcatctcctggaacccagaagaatgtgagggcatcaccaagatgtccatggccgccaagaacctgtggctgcctgacatcttcatcatcgagctgatggatgtggacaagacccccaagggcctgacagcctacgtgtccaatgaaggccgcatccgctacaagaagcccatgaaggtggacagcatctgcaacctggacatcttctacttcccctttgaccagcagaactgcaccctgaccttcagcagcttcctgtacacagtggacagcatgctgctggacatggagaaggaggtgtgggagatcacagatgccagcaggaacatcctgcagacccatggagagtgggagctgctgggcctgagcaaggccacagccaagctgagcagaggaggcaacctgtatgaccagatcgtgttctacgtggccatcagaagaagacccagcctgtatgtgatcaacctgctggtgcccagcggcttcctggtggccattgatgccctgtccttctacctgcctgtgaagagcggcaacagagtgcccttcaagatcaccctgctgctgggctacaacgtgttcctgctgatgatgtctgacctgctgcccaccagcggcacccccctgattggagtgtactttgccctgtgcctgagcctgatggtgggcagcctgctggagaccatcttcatcacccacctgctgcacgtggccaccacccagcccccacccctgccccgctggctgcacagcctgctgctgcactgcaacagccctggccgctgctgccccacagccccccagaaggaaaataaaggacctggcctgacccccacccacctgcccggggtgaaggagcctgaggtgtctgctggccagatgcctggccctgctgaggccgagctgaccggcggcagcgagtggacccgggcccagcgggagcacgaggcccagaagcagcacagcgtggagctgtggctgcagttcagccacgccatggatgccatgctgttccggctgtacctgctcttcatggccagcagcatcatcaccgtcatctgcctgtggaacacctag

SEQ ID NO: 256306 - DNA, 1416 bp, Artificial Sequence
  derived and/or modified sequence
atgctggccttcatcctgagccgggccaccccccggcccgccctgggacccctgtcctacagggaacaccgggtggcgttgcttcacctgacccactccatgagtaccaccggaagaggcgtgacatttacaatcaattgcagtggcttcggtcagcacggggccgatcctacggcactcaacagcgtgtttaatcgcaaaccttttagacccgtgacaaatatttctgtacctacgcaagttaacatcagctttgcaatgtccgcgatactggatgtgaacgagcagctacacctgctgtcatccttcctgtggctcgaaatggtctgggacaatcccttcattagttggaaccccgaggagtgcgagggcatcacaaaaatgtccatggcagctaaaaacctctggctgccagatatattcatcatcgagctgatggatgttgacaaaacacccaagggattgactgcatacgtctcaaatgaaggccgcattagatacaagaaaccaatgaaagtggactcgatttgcaacctcgacatcttctactttccctttgaccagcagaattgtaccctaaccttttcctccttcctctatactgtggattctatgctgctggacatggaaaaggaagtatgggaaatcactgatgcatcaagaaatatcctacagacccacggcgagtgggaacttctggggctgagcaaggctactgcgaagctgtcccgagggggaaatctgtatgaccagattgtgttttacgtagcgattcgcagacgccccagcttgtatgttatcaatttattggtccctagcggttttctcgtggccatcgacgcactgtctttttacttgccagtgaaatccggtaacagagtcccttttaaaatcacactgctgctgggctataacgtgttccttctaatgatgtccgacttacttccaacttcaggcacccccctgattggcgtttacttcgcactgtgcctgtctctgatggtgggttctctcctggaaacaattttcatcacacatctgctccacgtagcgaccacacaacctcccccgctgcctcgctggctgcattccctgctcctgcactgcaattctccaggacggtgctgtccaacagccccacagaaggaaaataagggacccggcctcactccgactcatttgcccggggtgaaagaaccggaagtttctgctggacagatgcccgggccagcagaggctgaacttacgggaggcagtgaatggactcgggctcaaagagaacacgaggctcagaagcagcacagcgtggagctatggctgcagttttcacacgctatggatgctatgcttttcagactttatctgttgttcatggccagctctataattacagtaatttgcctctggaatacttag

SEQ ID NO: 256307 - DNA, 1416 bp, Artificial Sequence
  derived and/or modified sequence
atgttagccttcatccttagtcgggctacacccaggcccgcactgggccctctgtcctatcgggaacacagagttgcgctcctgcacctgactcacagcatgtctacaactggtaggggtgtcactttcactataaactgcagcgggttcggacagcatggggctgacccaacggccttgaattcagtgttcaatagaaagccatttcgaccggtaacaaacatctccgtcccgacgcaagtgaatatttcttttgcaatgagtgccattctggatgttaatgagcagttgcacctcctcagcagctttctgtggcttgagatggtttgggacaaccccttcatatcatggaacccagaggagtgtgagggcatcacgaagatgagcatggctgcaaagaatctttggttgccggacatctttatcatagagctgatggacgtggataagacacctaagggattgacagcttatgtgtcaaacgagggacgcatccggtacaaaaagccgatgaaagtggactcaatttgcaacctagatatcttctattttccatttgatcagcagaactgcacattaaccttctccagcttcctgtacactgttgattccatgttgctggatatggaaaaggaggtgtgggagataacggatgcaagtagaaatattctgcaaacccatggagaatgggaactactgggtctcagcaaggccacagccaaactgtcccgaggcggtaacctgtacgatcagattgttttctacgtcgcgatcaggaggcgcccttcattgtacgtcatcaacctcctggtaccctcaggattcctggttgccatagatgctctttctttttacctgccggttaagtcagggaacagggtgccattcaagataaccttgttgctgggttataacgtgtttttattgatgatgtccgacctgcttcccacttccggaacccccctgattggagtgtacttcgccctatgcctgtctctcatggtgggatccctgctcgaaaccatcttcatcacccatctcttgcatgtggccactacccagcctccacctctcccaaggtggctgcactcattgttgttacattgcaactcacccggacgctgttgccccactgcacctcagaaagagaacaagggccctggcttaacacccacgcatctccccggagtcaaagagcctgaggttagcgctggtcagatgccagggcctgctgaagccgaactgaccgggggaagtgaatggacccgcgcacagcgcgagcacgaggcccagaagcagcatagtgtggaactgtggcttcagttttcacacgccatggacgcgatgctgttccgcctgtacctgctgttcatggctagcagcatcattaccgtgatatgcctgtggaatacctag

SEQ ID NO: 256308 - DNA, 1912 bp, Artificial Sequence
  derived and/or modified sequence
gaacaagtccggcttctgccttttattggctgtctgactgtaggaagttacttcctcttattgcaccttagttagctcgtttattacatgagggtaaagcagtatctacctgataggggattgggaggattaaatgaggtaatccatttttaaagggcttagaatatacctgacacacagccagtgctcaacaaatgttagctttcattttatcacgggcgaccccacgccctgccttggggcccctctcatatagggagcacagggttgctctccttcatctcacacattcgatgtccactacaggaaggggcgttactttcaccatcaattgctcagggtttggccagcacggggcggatcccactgctctgaattcagtgtttaatagaaagcccttccgtccggtcaccaacatcagcgtccccacccaagtcaacatctccttcgcgatgtctgccatcctagatgtgaatgaacagctgcacctcttgtcatcattcctgtggctggaaatggtttgggataacccatttatcagctggaacccagaggaatgtgagggcatcacgaagatgagtatggcagccaagaacctgtggctcccagacattttcatcattgaactcatggatgtggataagaccccaaaaggcctcacagcatatgtaagtaatgaaggtcgcatcaggtataagaaacccatgaaggtggacagtatctgtaacctggacatcttctacttccccttcgaccagcagaactgcacactcaccttcagctcattcctctacacagtggacagcatgttgctggacatggagaaagaagtgtgggaaataacagacgcatcccggaacatccttcagacccatggagaatgggagctcctgggcctcagcaaggccaccgcaaagttgtccaggggaggcaacctgtatgatcagatcgtgttctatgtggccatcaggcgcaggcccagtctctatgtcataaaccttctcgtgcccagtggctttctggttgccatcgatgccctcagcttctacctgccagtgaaaagtgggaatcgtgtcccattcaagataacgctcctgctgggctacaacgtcttcctgctcatgatgagtgacttgctccccaccagtggcacccccctcatcggtgtctacttcgccctgtgcctgtccctgatggtgggcagcctgctggagaccatcttcatcacccacctgctgcacgtggccaccacccagcccccacccctgcctcggtggctccactccctgctgctccactgcaacagcccggggagatgctgtcccactgcgccccagaaggaaaataagggcccgggtctcacccccacccacctgcccggtgtgaaggagccagaggtatcagcagggcagatgccgggccctgcggaggcagagctgacagggggctcagaatggacaagggcccagcgggaacacgaggcccagaagcagcactcagtggagctgtggttgcagttcagccacgcgatggacgccatgctcttccgcctctacctgctcttcatggcctcctctatcatcaccgtcatatgcctctggaacacctaggcaggtgctcacctgccaacttcagtctggagcttctcttgcctccagggactggccaggtctcccccctttcctgagtaccaactatcatatccccaaagatgactgagtctctgctgtattccatgtatcccaatccggtcctgctgatcaattccaatcccagacatttctccctgttcctgcattttgttggcttccttcagtcctaccatatggttctaggtccctcttacgtcatctgcatagcagactatacctcttctgtccgctgacttgcccaataaataattctgcagaga

SEQ ID NO: 256309 - DNA, 1416 bp, Artificial Sequence
  derived and/or modified sequence
atgctggccttcatcctgagcagagccacccccagacccgccctgggccccctgagctacagagagcacagagtggccctgctgcacctgacccacagcatgagcaccaccggcagaggcgtgaccttcaccatcaactgcagcggcttcggccagcacggcgccgaccccaccgccctgaacagcgtgttcaacagaaagcccttcagacccgtgaccaacatcagcgtgcccacccaggtgaacatcagcttcgccatgagcgccatcctggacgtgaacgagcagctgcacctgctgagcagcttcctgtggctggagatggtgtgggacaaccccttcatcagctggaaccccgaggagtgcgagggcatcaccaagatgagcatggccgccaagaacctgtggctgcccgacatcttcatcatcgagctgatggacgtggacaagacccccaagggcctgaccgcctacgtgagcaacgagggcagaatcagatacaagaagcccatgaaggtggacagcatctgcaacctggacatcttctacttccccttcgaccagcagaactgcaccctgaccttcagcagcttcctgtacaccgtggacagcatgctgctggacatggagaaggaggtgtgggagatcaccgacgccagcagaaacatcctgcagacccacggcgagtgggagctgctgggcctgagcaaggccaccgccaagctgagcagaggcggcaacctgtacgaccagatcgtgttctacgtggccatcagaagaagacccagcctgtacgtgatcaacctgctggtgcccagcggcttcctggtggccatcgacgccctgagcttctacctgcccgtgaagagcggcaacagagtgcccttcaagatcaccctgctgctgggctacaacgtgttcctgctgatgatgagcgacctgctgcccaccagcggcacccccctgatcggcgtgtacttcgccctgtgcctgagcctgatggtgggcagcctgctggagaccatcttcatcacccacctgctgcacgtggccaccacccagcccccccccctgcccagatggctgcacagcctgctgctgcactgcaacagccccggcagatgctgccccaccgccccccagaaggagaacaagggccccggcctgacccccacccacctgcccggcgtgaaggagcccgaggtgagcgccggccagatgcccggccccgccgaggccgagctgaccggcggcagcgagtggaccagagcccagagagagcacgaggcccagaagcagcacagcgtggagctgtggctgcagttcagccacgccatggacgccatgctgttcagactgtacctgctgttcatggccagcagcatcatcaccgtgatctgcctgtggaacacctag

SEQ ID NO: 256310 - protein, 421 aa, Artificial Sequence
  derived and/or modified sequence
MMYRTVGFGTRSRNLKPWMIAVLIVLSLTVVAVTIGLLVHFLVFDQKKEYYHGSFKILDPQINNNFGQSNTYQLKDLRETTENLVSQVDEIFIDSAWKKNYIKNQVVRLTPEEDGVKVDVIMVFQFPSTEQRAVREKKIQSILNQKIRNLRALPINASSVQVNAMSSSTGELTVQASCGKRVVPLNVNRIASGVIAPKAAWPWQASLQYDNIHQCGATLISNTWLVTAAHCFQKYKNPHQWTVSFGTKINPPLMKRNVRRFIIHEKYRSAAREYDIAVVQVSSRVTFSDDIRQICLPEASASFQPNLTVHITGFGALYYGGESQNDLREARVKIISDDVCKQPQVYGNDIKPGMFCAGYMEGIYDACRGDSGGPLVTRDLKDTWYLIGIVSWGDNCGQKDKPGVYTQVTYYRNWIASKTGI

SEQ ID NO: 256311 - DNA, 1266 bp, Artificial Sequence
  derived and/or modified sequence
atgatgtacagaaccgtgggcttcggcaccagaagcagaaacctgaagccctggatgatcgccgtgctgatcgtgctgagcctgaccgtggtggccgtgaccatcggcctgctggtgcacttcctggtgttcgaccagaagaaggagtactaccacggcagcttcaagatcctggacccccagatcaacaacaacttcggccagagcaacacctaccagctgaaggacctgagagagaccaccgagaacctggtgagccaggtggacgagatcttcatcgacagcgcctggaagaagaactacatcaagaaccaggtggtgagactgacccccgaggaggacggcgtgaaggtggacgtgatcatggtgttccagttccccagcaccgagcagagagccgtgagagagaagaagatccagagcatcctgaaccagaagatcagaaacctgagagccctgcccatcaacgccagcagcgtgcaggtgaacgccatgagcagcagcaccggcgagctgaccgtgcaggccagctgcggcaagagagtggtgcccctgaacgtgaacagaatcgccagcggcgtgatcgcccccaaggccgcctggccctggcaggccagcctgcagtacgacaacatccaccagtgcggcgccaccctgatcagcaacacctggctggtgaccgccgcccactgcttccagaagtacaagaacccccaccagtggaccgtgagcttcggcaccaagatcaacccccccctgatgaagagaaacgtgagaagattcatcatccacgagaagtacagaagcgccgccagagagtacgacatcgccgtggtgcaggtgagcagcagagtgaccttcagcgacgacatcagacagatctgcctgcccgaggccagcgccagcttccagcccaacctgaccgtgcacatcaccggcttcggcgccctgtactacggcggcgagagccagaacgacctgagagaggccagagtgaagatcatcagcgacgacgtgtgcaagcagccccaggtgtacggcaacgacatcaagcccggcatgttctgcgccggctacatggagggcatctacgacgcctgcagaggcgacagcggcggccccctggtgaccagagacctgaaggacacctggtacctgatcggcatcgtgagctggggcgacaactgcggccagaaggacaagcccggcgtgtacacccaggtgacctactacagaaactggatcgccagcaagaccggcatctag

SEQ ID NO: 256312 - DNA, 1266 bp, Artificial Sequence
  derived and/or modified sequence
atgatgtaccggactgtgggattcgggacgagatctagaaacctcaagccttggatgatagctgtacttatcgtgctttcactgaccgtcgtagccgtgaccattggattgttggtgcacttcctcgtgtttgaccagaagaaggagtattatcacgggtcctttaaaattttggatccacaaatcaataataacttcgggcagtccaacacatatcagctcaaagacctccgagagactactgagaacctcgtgagccaggttgatgaaatcttcatcgattcagcttggaagaaaaattatattaagaaccaggtggttagattgacacctgaggaggacggtgtcaaggtcgatgtgattatggtgttccagtttcccagcacagagcagcgcgctgtcagggagaaaaagattcaatcaattttgaatcaaaagattcggaatctaagagccctccctatcaatgccagctccgttcaagtgaacgctatgtcgtccagtacgggagagctcaccgtccaggcctcctgtgggaaaagggtggtaccactaaatgtcaaccggatcgccagcggtgtgatcgcacctaaggctgcctggccttggcaggctagcctccagtacgataatatacaccagtgcggagcaacacttattagcaacacgtggcttgtcactgcagcccactgtttccaaaaatacaagaatccccaccagtggaccgttagcttcggcaccaaaattaatcccccattaatgaaaaggaatgtacggcgcttcatcatccacgagaaatatagaagtgccgctagggagtacgatatcgcagtagtacaagtcagctcccgggttaccttctcagatgacatccgccagatttgcctcccggaagcaagcgcgtctttccagcctaacctgactgtccacatcaccggcttcggcgcactgtattatggtggagagagccagaacgatcttagagaggcaagagtcaagatcatttctgatgatgtgtgtaagcagccacaagtgtacggaaatgatattaaacctggaatgttctgtgcgggctatatggagggcatctacgatgcttgcagaggcgacagcggaggaccattggtaactcgggacctgaaagatacatggtatctcatcggaattgtatcctggggggataactgcggacagaaggataaaccaggagtgtacacccaagtgacctactatagaaattggattgcgtcaaaaaccggcatctag

SEQ ID NO: 256313 - DNA, 1266 bp, Artificial Sequence
  derived and/or modified sequence
atgatgtacagaacagtgggcttcggcaccaggagcaggaacctgaagccctggatgattgctgtgctgattgtgctgagcctgactgtggtggccgtgaccatcggcctgctggtgcacttcctggtgtttgaccagaagaaggagtactaccacggcagcttcaagatcctggacccccagatcaacaacaactttggccagagcaacacctaccagctgaaggacctgcgggagaccacagagaacctggtgtcccaggtggatgagatcttcattgattctgcctggaagaagaactacatcaagaaccaggtggtgcggctgaccccagaagaagatggagtgaaggtggatgtgatcatggtgttccagttccccagcacagagcagagagctgtgcgggagaagaagatccagagcatcctgaaccagaagatccggaacctgcgggccctgcccatcaatgccagctctgtgcaggtgaatgccatgagcagcagcactggagagctgactgtgcaggccagctgtgggaagagggtggtgcccctgaatgtgaaccgcatcgccagcggcgtgattgcccccaaggccgcctggccctggcaggccagcctgcagtatgacaacatccaccagtgtggggccaccctcatcagcaacacctggctggtgacagctgcccactgcttccagaagtacaagaacccccaccagtggacagtgtcctttggcaccaagatcaacccccccctgatgaagagaaatgtgcggcgcttcatcatccacgagaagtacagatctgctgcccgggagtatgacattgctgtggtgcaggtgagcagccgggtgaccttcagtgatgacatccggcagatctgcctgcctgaggccagcgccagcttccagcccaacctgactgtgcacatcaccggctttggagccctgtactatggaggagagagccagaatgacctgcgggaggcccgggtgaagatcatcagtgatgatgtgtgcaagcagccccaggtgtatggaaatgacatcaagccaggcatgttctgtgccggctacatggagggcatctatgatgcctgccgcggggacagcggcggccccctggtgacccgggacctgaaggacacctggtacctgattggaattgtgtcctggggagacaactgtggccagaaggacaagccaggagtgtacacccaggtgacctactacagaaactggatcgccagcaagacaggcatctag

SEQ ID NO: 256314 - DNA, 1266 bp, Artificial Sequence
  derived and/or modified sequence
atgatgtaccggaccgtgggcttcggcacccggagccggaacctgaagccatggatgatagccgtcctcattgtcctctccctgaccgtggtggccgttactatcggcctcctggtgcattttttggttttcgaccagaagaaggagtactatcacggatcatttaaaatcctagatccacagatcaataacaatttcgggcagtctaacacataccagctcaaggacctccgcgagactacagaaaatctggtgtcccaggtcgatgaaatcttcatcgactcagcctggaaaaaaaactacatcaaaaatcaggtggttcgtctaactccagaggaggacggtgttaaggtggacgttataatggtgttccagttcccctccaccgaacaaagggcagttcgagagaagaaaatccagagtatcctgaaccagaagatcaggaacctgagagcgttaccaattaacgctagctccgtccaggtgaacgccatgtcctcgtccaccggtgagctgacagtgcaggcttcttgcgggaaacgcgtggttccactcaatgtcaacagaattgcttccggtgttatcgcgccgaaagcggcttggccttggcaagcgtcactccaatacgataacattcatcagtgtggagcgaccctgatatctaacacctggctcgtcactgcagcccactgcttccaaaagtacaagaacccccaccagtggactgtaagcttcggcacgaagatcaatccacctctaatgaaacggaacgtgcgcagatttatcatccacgagaaataccgatcagcagcccgggagtacgatattgccgtggtgcaagtgtcgagccgcgtgactttttccgacgacattcgccagatctgtctgccagaagcgtctgcgtcttttcagcccaacctgactgttcatattacaggcttcggtgccctgtactacgggggcgaatcccagaatgatctacgtgaagcgagggtaaaaatcatctccgatgatgtgtgtaaacaaccccaggtttacggaaacgatattaagccgggaatgttctgtgcgggctacatggaaggaatctatgatgcatgcagaggagactctggcgggcccctggtaacccgcgacctgaaggacacctggtatcttattggaattgttagctggggagacaactgcggccagaaggataagcccggcgtctatacgcaggttacctattatcgaaactggattgcctcgaagacgggaatttag

SEQ ID NO: 256315 - DNA, 1266 bp, Artificial Sequence
  derived and/or modified sequence
atgatgtaccgaaccgtgggatttgggacaaggtcacggaatttgaagccatggatgatagccgtgttaatcgtgttaagcctgacagtggtggcggtgacgatcggcctgttggtgcactttctggttttcgatcagaagaaagagtattaccacggctcctttaagatactggatcctcagattaataataatttcgggcagtctaatacataccagctgaaggacctccgcgaaacaaccgagaatttggtctctcaggtcgacgagatctttattgattctgcctggaaaaagaattatatcaaaaatcaagtcgtgcggctcacccccgaagaggatggagtgaaagtggatgtcatcatggtcttccagtttcctagcactgagcagcgggcagtgcgtgagaagaagatacagagcattctgaatcagaaaatccgcaatttgcgggctcttccaataaatgcctcatcagtccaggttaacgctatgagttcatctactggggaactcacggtgcaggcgtcatgcggaaaacgagtggttcccctgaacgtaaacaggatcgcttcaggggtcattgcccctaaagccgcttggccttggcaagccagcctacagtacgataatatccaccagtgtggcgctacacttatctcaaatacctggctcgtaaccgctgctcactgttttcagaaatataaaaatcctcaccaatggaccgtgagtttcggcacaaagattaatccacctttgatgaaaagaaacgtgaggcgattcatcattcacgaaaaatatcgaagcgccgcacgcgagtatgatattgccgtagtccaagtttctagtcgcgtgaccttctcagacgatatcagacagatatgcctaccagaggcatcggccagttttcagcccaatctgacagttcacattacaggctttggggctctctattatggaggagagagtcagaatgatctgagagaagctagggtcaagatcattagcgatgacgtgtgcaagcagccgcaggtctacggtaacgacatcaagcctggcatgttttgcgccggatacatggaggggatatatgatgcttgcaggggggacagtggagggcctctcgtgacacgcgatctcaaggatacttggtacctgatcggaattgtgagctggggtgacaactgcgggcagaaggataaacctggagtctatacccaggtgacgtattatcgtaattggatcgcttctaagaccggcatctag

SEQ ID NO: 256316 - DNA, 3054 bp, Artificial Sequence
  derived and/or modified sequence
ctgagggagaaggaaagggaccaagagtaggacattgtcaaacatggttttagtctcattttttacaaagaacatgtattaatatgttgtttgtctaattgaaaatgtttatttcttctctttttttcattctgataaatgtctgtcaatgttttatcacattaagtcatttggggaaacatatagttttatattaatttatttgcctgtactctcagaagtgggtatttaaaaaaactattatgtattagtaaattcactatgcttctgtaagatacctgctgttcaacatgaatttatggaatatttcttgagttatatttttattatgtatttagattttaagatctgtttgtttttatctagagcttttatgtgacagtttctttaaaatacttatatacctaccataatcttctttaaattcttaattctagtacattcctaaggtatttctcattctaatctttgtaaccagtttctcctcctttaacaaaattagtccatactaaaaaaatattgctttcttgttgggactatcctgtctctggctttcttcaaggccttctatgggttgaaacttctctgttcagacttgtcaaactagtttcatttcaactacttgtaatttgtttccttatttctttgagccgtagacttctaatacatctagagatgtcatatagttgattagaaagttgagttcagtgggtgcagacctgcaagatcatattcttcctcctgtacatgatgtatcggacagtgggatttggcacccgaagcagaaatctgaagccatggatgattgccgttctcattgtgttgtccctgacagtggtggcagtgaccataggtctcctggttcacttcctagtatttgaccaaaaaaaggagtactatcatggctcctttaaaattttagatccacaaatcaataacaatttcggacaaagcaacacatatcaacttaaggacttacgagagacgaccgaaaatttggtgagtcaggtggatgagatatttatagattcagcctggaagaaaaattatatcaagaaccaagtagtcagactgactccagaggaagatggtgtgaaagtagatgtcattatggtgttccagttcccctctactgaacaaagggcagtaagagagaagaaaatccaaagcatcttaaatcagaagataaggaatttaagagccttgccaataaatgcctcatcagttcaagttaatgcaatgagctcatcaacaggggagttaactgtccaagcaagttgtggtaaacgagttgttccattaaacgtcaacagaatagcatctggagtcattgcacccaaggcggcctggccttggcaagcttcccttcagtatgataacatccatcagtgtggggccaccttgattagtaacacatggcttgtcactgcagcacactgcttccagaagtataaaaatccacatcaatggactgttagttttggaacaaaaatcaaccctcccttaatgaaaagaaatgtcagaagatttattatccatgagaagtaccgctctgcagcaagagagtacgacattgctgttgtgcaggtctcttccagagtcaccttttcggatgacatacgccagatttgtttgccagaagcctctgcatccttccaaccaaatttgactgtccacatcacaggatttggagcactttactatggtggggaatcccaaaatgatctccgagaagccagagtgaaaatcataagtgatgatgtctgcaagcaaccacaggtgtatggcaatgatataaaacctggaatgttctgtgccggatatatggaaggaatttatgatgcctgcaggggtgattctgggggacctttagtcacaagggatctgaaagatacgtggtatctcattggaattgtaagctggggagataactgtggtcaaaaggacaagcctggagtctacacacaagtgacttattaccgaaactggattgcttcaaaaacaggcatctaattcacgataaaagttaaacaaagaaagctgtatgcaggtcatatatgcatgagaattcaactatttagtgggtgtagtacaacaaagtgatattaaattactggatctagtaacatgaaacacacaacgtaagttatttagaatcactttaatcaaccaataatccttagccaatttataagggacttttatttgtaaagtaatggatctggcttgaaaaatacggtagagatacttagctctttaaatcacgaatgttgaagtaccagtgagactcaatacatatttttgaagatagtccatgggatttttagaatgtcgttgtcaagggtctccttttaactgagaaactttttgaactcacaaagtgttcaagaaacccttgtataattccctacatttctctcgagctcacaaatacttttttttctttttccttattcaatcagattttccaaagtacctttccaccataagaaatgaattttctacttctacacccatttgagagacaccaataaaagaaagtcatatgtaggaaacaaagtctgatagtaaaacaagccagagatcttctaactttttttagttataaaacctctaatttttggtgacttttctacacacacacacacatacagtcacatagatattcttatcctacagatataatcagaaaaatcccgattaatgaattatatatagatagatagagtgattagttaatcaaaactatatatttgttaaaaatttgggagaaggtgatggtaatttcattagtcccaaaacaccggcataagaaatttgacatttcacagatgcacttacatattttgaccacaagggggaaattttgtgcattattattgtagggttaaatgcctgaaaaaaataagcatttactaataccttgaaaaatcaaagaacattatgttcctccgtagcaagaaaaattttatgccctcgcattgctacagccaaatagcttataaggcttatggcaatgtcccaactattgcaatcataaaaccctagttttag

SEQ ID NO: 256317 - protein, 387 aa, Artificial Sequence
  derived and/or modified sequence
MVFAFWKVFLILSCLAGQVSVVQVTIPDGFVNVTVGSNVTLICIYTTTVASREQLSIQWSFFHKKEMEPISIYFSQGGQAVAIGQFKDRITGSNDPGNASITISHMQPADSGIYICDVNNPPDFLGQNQGILNVSVLVKPSKPLCSVQGRPETGHTISLSCLSALGTPSPVYYWHKLEGRDIVPVKENFNPTTGILVIGNLTNFEQGYYQCTAINRLGNSSCEIDLTSSHPEVGIIVGALIGSLVGAAIIISVVCFARNKAKAKAKERNSKTIAELEPMTKINPRGESEAMPREDATQLEVTLPSSIHETGPDTIQEPDYEPKPTQEPAPEPAPGSEPMAVPDLDIELELEPETQSELEPEPEPEPESEPGVVVEPLSEDEKGVVKA

SEQ ID NO: 256318 - DNA, 2997 bp, Artificial Sequence
  derived and/or modified sequence
ggcgatgcccagcagataagccaggcaaacctcggtgtgatcgaagaagccaatttgagactcagcctagtccaggcaagctactggcacctgctgctctcaactaacctccacacaatggtgttcgcattttggaaggtctttctgatcctaagctgccttgcaggtcaggttagtgtggtgcaagtgaccatcccagacggtttcgtgaacgtgactgttggatctaatgtcactctcatctgcatctacaccaccactgtggcctcccgagaacagctttccatccagtggtctttcttccataagaaggagatggagccaatttctatttacttttctcaaggtggacaagctgtagccatcgggcaatttaaagatcgaattacagggtccaacgatccaggtaatgcatctatcactatctcgcatatgcagccagcagacagtggaatttacatctgcgatgttaacaaccccccagactttctcggccaaaaccaaggcatcctcaacgtcagtgtgttagtgaaaccttctaagcccctttgtagcgttcaaggaagaccagaaactggccacactatttccctttcctgtctctctgcgcttggaacaccttcccctgtgtactactggcataaacttgagggaagagacatcgtgccagtgaaagaaaacttcaacccaaccaccgggattttggtcattggaaatctgacaaattttgaacaaggttattaccagtgtactgccatcaacagacttggcaatagttcctgcgaaatcgatctcacttcttcacatccagaagttggaatcattgttggggccttgattggtagcctggtaggtgccgccatcatcatctctgttgtgtgcttcgcaaggaataaggcaaaagcaaaggcaaaagaaagaaattctaagaccatcgcggaacttgagccaatgacaaagataaacccaaggggagaaagcgaagcaatgccaagagaagacgctacccaactagaagtaactctaccatcttccattcatgagactggccctgataccatccaagaaccagactatgagccaaagcctactcaggagcctgccccagagcctgccccaggatcagagcctatggcagtgcctgaccttgacatcgagctggagctggagccagaaacgcagtcggaattggagccagagccagagccagagccagagtcagagcctggggttgtagttgagcccttaagtgaagatgaaaagggagtggttaaggcataggctggtggcctaagtacagcattaatcattaaggaacccattactgccatttggaattcaaataacctaaccaacctccacctcctccttccattttgaccaaccttcttctaacaaggtgctcattcctactatgaatccagaataaacacgccaagataacagctaaatcagcaagggttcctgtattaccaatatagaatactaacaattttactaacacgtaagcataacaaatgacagggcaagtgatttctaacttagttgagttttgcaacagtacctgtgttgttatttcagaaaatattatttctctctttttaactactctttttttttattttagacagagtcttgctccgtcgcgcaggctgtgatcgtagtggtgcgatctcggctcactgcaacctccgctccctgggttcaagcgattctcctgcctgagcctcctgagtagctgggactacaggcacgtgccaccacgcccggctaattttttgtatttttagtagagatggggtttcacgttgttagccaggatggtctccatctcctgacctcatgatccgcccaccttggcctcccaaaatgctgggattacaggcatgagccactgcgcccggcctctttttagctactcttatgttccacatgcacatatgacaaggtggcattaattagattcaatattatttctaggaatagttcctcattcatttttatattgaccactaagaaaataattcatcagcattatctcatagattggaaaattttctccaaatacaatagaggagaatatgtaaagggtatacattaattggtacgtagcatttaaaatcaggtcttataattaatgcttcattcctcatattagatttcccaagaaatcaccctggtatccaatatctgagcatggcaaatttaaaaaataacacaatttcttgcctgtaaccctagcactttgggaggccgaggcaggtggatcacctgaggtcaggagttcgagaccagcctggccaacatggcgaaaccccttctctactaaaaatacaaaaattagctgggcgtggtagtgcatgcctgtaatcccagctacttgggaggctgaggcaggagaatcgcttgaacccaggaggtggaggttgcagtgagccgagattgtgccactgcactccaacctgggtgacagagtgagattccatctgaaaaacaaaaacaaaaacagaaaacaaacaaacaaaaaacaaaaaatccccacaactttgtcaaataatgtacaggcaaacactttcaaatataatttccttcagtgaatacaaaatgttgatatcataggtgatgtacaatttagttttgaatgagttattatgttatcactgtgtctgatgttatctactttgaaaggcagtccagaaaagtgttctaagtgaactcttaagatctattttagataatttcaactaattaaataacctgttttactgcctgtacattccacattaataaagcgataccaatcttatatgaatgctaatattactaaaatgcactgatatcacttcttcttcccctgttgaaaagctttctcatgatcatatttcacccacatctcaccttgaagaaacttacaggtagacttaccttttcacttgtggaattaatcatatttaaatcttactttaaggctcaataaataatactcataatgtctca

SEQ ID NO: 256319 - DNA, 1164 bp, Artificial Sequence
  derived and/or modified sequence
atggtgtttgctttctggaaggttttcttaattttgagttgtctagcaggacaagttagcgttgtacaggtgaccattccagacggctttgtgaacgtgaccgttggatctaacgtcacattgatctgtatctacaccacgactgtcgccagccgggagcagctgagcatccaatggtctttcttccacaaaaaagagatggaaccgatctcaatctacttcagccaaggcggacaggctgtcgccataggccaattcaaagacaggatcactggaagtaacgatcccggaaatgcctccataaccatctcccatatgcagcctgcagattcaggcatttatatctgtgacgtgaataaccccccagactttctggggcagaatcagggcattctcaatgtgtcagttctggtgaagcctagtaagcccctgtgtagtgtgcaaggacgccctgagactgggcacactattagtctctcctgcctgtcagcgttgggcactcctagtcctgtgtactattggcacaagctggaagggagagatatcgtccctgtgaaggagaactttaacccaacaaccgggattctggtgattggaaatcttacaaactttgaacaagggtactatcagtgcacagctattaataggctgggaaacagctcgtgtgaaatagatttgacttcttctcaccctgaagttggcatcattgttggagccctcatcggttctctggttggtgcggcaatcatcattagtgttgtttgtttcgcgaggaataaagccaaggcaaaggcaaaggagaggaacagtaaaacaatcgccgagttggagccaatgactaagatcaaccctagaggagaatctgaagccatgccaagagaagatgcaacacaacttgaagtcacacttccttcctcaattcacgagacaggacctgatacaatccaagaacccgattacgagcccaagccaacgcaggaaccggcccctgaacctgctccaggttctgagccaatggccgtgccagaccttgatatcgaactcgagctggaacccgagacccagagtgagttagagccagagcctgagccagaacccgaatccgagcccggggttgtcgtggagcccctctccgaggatgagaaaggggttgtgaaggcatag

SEQ ID NO: 256320 - DNA, 1164 bp, Artificial Sequence
  derived and/or modified sequence
atggtgtttgccttctggaaggtgttcctgatcctgagctgcctggccggccaggtgtctgtggtgcaggtgaccatcccagatggctttgtgaatgtgacagtgggcagcaatgtgaccctcatctgcatctacaccaccaccgtggccagccgggagcagctgagcatccagtggagcttcttccacaagaaggagatggagcccatcagcatctacttcagccagggcggccaggccgtggccatcggccagttcaaggaccgcatcaccggcagcaatgaccctggaaatgccagcatcaccatcagccacatgcagcctgctgacagcggcatctacatctgtgatgtgaacaaccccccagacttcctgggccagaaccagggcatcctgaatgtgtctgtgctggtgaagcccagcaagcccctgtgcagcgtgcagggccggcctgagaccggccacaccatcagcctgagctgcctgagcgccctgggcacccccagccctgtgtactactggcacaagctggagggccgggacatcgtgcctgtgaaggagaacttcaaccccaccaccggcatcctggtgattggcaacctgaccaactttgagcagggctactaccagtgcacagccatcaaccggctgggcaacagcagctgtgaaattgacctgaccagcagccaccctgaggtgggcatcatcgtgggcgccctgattggcagcctggtgggcgccgccatcatcatctctgtggtgtgctttgccaggaacaaggccaaggccaaggccaaggagaggaacagcaagaccatcgccgagctggagcccatgaccaagatcaaccccagaggagagagcgaggccatgccccgggaggatgccacccagctggaggtgaccctgcccagcagcatccacgagaccggccctgacaccatccaggagccagactatgagcccaagcccacccaggagcccgcccctgagcccgcccctggcagcgagcccatggctgtgcctgacctggacatcgagctggagctggagcctgagacccagagcgagctggagcctgagcctgagcctgagcctgagagcgagcccggggtggtggtggagcccctgtctgaagatgagaagggcgtggtgaaggcctag

SEQ ID NO: 256321 - DNA, 1164 bp, Artificial Sequence
  derived and/or modified sequence
atggtgttcgccttctggaaggtgttcctgatcctgagctgcctggccggccaggtctccgttgttcaggtcactattcctgacgggtttgtcaatgtgaccgtcgggtcaaacgtgactctgatttgtatctacactaccaccgtggcaagcagagagcagctctctatccaatggtcttttttccacaagaaagagatggagcctatcagcatatacttttcacaaggaggccaggctgttgccataggacaattcaaggaccgtatcacaggttcgaatgatcctgggaacgcctctataacgataagccacatgcaaccagctgactcgggaatttatatctgcgacgtgaacaaccctcctgacttcctgggccagaaccaagggattctcaatgtgtcagtcttagtcaaaccatcaaagcctctgtgcagcgtgcaagggcggcctgaaaccggccataccattagtctgagctgtctctccgccctaggcactcccagcccagtctactactggcataaactggaggggagagacattgtgcctgtgaaggaaaactttaatcctactaccggtatcttggtcatcggcaacctgacaaatttcgagcagggctattaccagtgtacagctattaatagattgggaaactccagttgtgaaatagatcttacgtcgagtcaccctgaggtgggaatcatagtcggcgccctcatcgggagtctcgtgggggccgccatcatcatttcagtcgtgtgcttcgcacgaaacaaggccaaggctaaagccaaggaaagaaactcgaaaactatcgcagagctggaacccatgactaagatcaaccccagaggagaatcagaggctatgcccagggaagacgcaacccagctggaagtcacactaccttcatctattcacgaaacaggacccgacaccattcaggagcccgactacgagcccaagccaactcaggaaccagcacccgagcctgccccagggagtgagcctatggccgtgcctgatttagatattgagctggagttggaacccgagacacagtccgagctggaaccagagccagaacctgagcccgagtccgagcccggcgtggtcgtggagcccctgagcgaagatgaaaaaggtgtagtcaaagcctag

SEQ ID NO: 256322 - DNA, 1164 bp, Artificial Sequence
  derived and/or modified sequence
atggtttttgccttttggaaagtgttcctgatcctgtcttgcctcgccggacaagtgtcagtcgtccaggtgaccatccctgatggattcgttaatgtgaccgtgggatctaacgttactctcatttgcatctataccacaacagtggcatcaagagaacagctaagtatccagtggtcttttttccataaaaaagaaatggaaccaattagtatttatttttcccaggggggacaggccgtggctataggtcagtttaaagatcgaataaccggaagcaacgatccaggaaacgccagtattacaatctcccacatgcagccagcagacagtggcatttatatttgtgacgtcaataacccaccagattttctggggcagaaccagggcattctgaacgtatcagtcctcgtcaagccatcgaaacccctctgctccgtccagggcaggcccgagacaggacacacaattagcctgtcttgtttgtcggctctcggtaccccctcacccgtgtattactggcacaagctggaaggacgggatatcgttccagtgaaagaaaacttcaatccaaccacgggaatcctggtcattggaaatctcaccaacttcgaacaaggatactatcagtgcacggcaataaatcggttgggtaactcatcctgcgagattgatctgactagcagtcatcccgaagtaggcatcattgtcggcgctctcattggttcacttgtgggcgcagctataattatctctgtagtgtgtttcgctagaaacaaggcaaaggctaaagcgaaggaacgaaatagcaaaacaattgctgaactggaacccatgaccaagataaacccgcgtggggaatctgaggccatgcccagagaggatgcaacccagttggaagtcactctgccctcttccatacatgagaccggacccgacacaatccaagaacccgattatgaacctaaacctacccaagagccagcacccgagcccgctccagggagcgaaccaatggccgtcccggacctcgacatcgagctcgagctggagccagagacacagagtgaactggaaccagagccagaaccagaacccgaatctgaacctggagtggtcgtggagccactctcggaggatgagaaaggtgtcgttaaggcttag

SEQ ID NO: 256323 - DNA, 1164 bp, Artificial Sequence
  derived and/or modified sequence
atggtgttcgccttctggaaggtgttcctgatcctgagctgcctggccggccaggtgagcgtggtgcaggtgaccatccccgacggcttcgtgaacgtgaccgtgggcagcaacgtgaccctgatctgcatctacaccaccaccgtggccagcagagagcagctgagcatccagtggagcttcttccacaagaaggagatggagcccatcagcatctacttcagccagggcggccaggccgtggccatcggccagttcaaggacagaatcaccggcagcaacgaccccggcaacgccagcatcaccatcagccacatgcagcccgccgacagcggcatctacatctgcgacgtgaacaacccccccgacttcctgggccagaaccagggcatcctgaacgtgagcgtgctggtgaagcccagcaagcccctgtgcagcgtgcagggcagacccgagaccggccacaccatcagcctgagctgcctgagcgccctgggcacccccagccccgtgtactactggcacaagctggagggcagagacatcgtgcccgtgaaggagaacttcaaccccaccaccggcatcctggtgatcggcaacctgaccaacttcgagcagggctactaccagtgcaccgccatcaacagactgggcaacagcagctgcgagatcgacctgaccagcagccaccccgaggtgggcatcatcgtgggcgccctgatcggcagcctggtgggcgccgccatcatcatcagcgtggtgtgcttcgccagaaacaaggccaaggccaaggccaaggagagaaacagcaagaccatcgccgagctggagcccatgaccaagatcaaccccagaggcgagagcgaggccatgcccagagaggacgccacccagctggaggtgaccctgcccagcagcatccacgagaccggccccgacaccatccaggagcccgactacgagcccaagcccacccaggagcccgcccccgagcccgcccccggcagcgagcccatggccgtgcccgacctggacatcgagctggagctggagcccgagacccagagcgagctggagcccgagcccgagcccgagcccgagagcgagcccggcgtggtggtggagcccctgagcgaggacgagaagggcgtggtgaaggcctag

SEQ ID NO: 256324 - DNA, 2670 bp, Artificial Sequence
  derived and/or modified sequence
cgccattcccggatccgccggctgggaatcgcgggtccccgcgcgtcctgcagcacttcccgcgccgcgcccccagcccagtgcgccggctctgtgccggggtgcccgggcggtcgggagaatgagccgcatctaccacgacggcgcgctccggaacaaggcggtgcagagcgtccggctgccaggggcctgggaccccgccgcccaccaggggggaaatggtgtcctgctggagggagaactgatcgatgtatctcggcacagcatcttggacactcatggcaggaaggagcgctactacgtgctgtatatccggcccagtcacatccatcgccgtaaattcgacgccaagggaaatgaaatcgagcccaacttcagcgccaccaggaaggtgaacacgggcttcctcatgtcgtcctacaaggtggaagccaagggggacactgacaggctcacgcccgaggcgctgaaggggctggtcaacaagccagagctgctcgcgctgacagagagcctcacccccgaccacacagtggcgttctggatgcccgagtcagagatggaggtgatggaactcgagctgggggccggggtacggctgaagactcggggcgatggtcccttcctggattcattggccaaacttgaggctggaacagtgaccaagtgtaatttcactggtgatggaaagacaggggcatcctggacagacaacatcatggcccaaaagtgttcgaagggggctgcagcggagatccgagagcagggggatggggcagaggacgaggagtgggatgactgagggacgtggctgcctctgggggcaccagcaccttctgtagcattgtggaacatttcttccatgaacttctactctggagctggagagaacagtctgccaagtcttacctggttcttccccatagccaccttggaatactctttgaacaagctctgctaaaaccaaacccatgaccactgtgttggtggtggggcctcatgctgtggctcagggagggcccctccctgcatgtgagtctagccttcctagacattacatgatgaccctttaaaaaaaaattagagatggaggtctcactatgttgcccaggctgatctcaaactcctggactcaagcgatccacccccctccacctcccaaggtgttgggattacaggcgtgagccactgcacccagcctcatgttgaccctggccctggatagcagctttgtttgtagaggcaggtggtgggagagaccctaggacagcctgagagtaactggacctggtattggtgcggagtggggaatatcccttgtctaaatgcagagcagctgagagaagttagcggggctcttcctccgttctcattgtttcctgctttccttccccacccaccccttcctcagcactctgtgttgtagcctgtactatcctgcttcaagcctccgtgtcccttgtaccttccccctaccttgagttgccagttctttactccctcaaatgttcccatgccacctctggggtttctgttatctgacatccctggctgctttcctggtagatgccattcccagagaggccaacagcgttcccaggcgtggctggctggtccgcatctctcagactcactctgccaggctacagttttgagaataccttttttgttgttgttttgtacctggagaactttttatgaatgagtaaatcttcagaaaggaattcctccacccttactgggttattgtcaggtgtaaacggcctttcagctgagcaatgttcctatgagaaggaagccatttctcttggctcatgaacactgccttttgggtagtatacccacacccagatctgtgaagagacctggaattgaagtctccatgtcgtcaggacttggtggcatgtggatcttgcttgacttgggaaaagagagggtggtggtgaactaataattatggagtccccctaatgtgtcgaacacaatgctagatgatttccatgataataattactcatacttgtgctaagcacttgcgatatcgtacttctcacaacagtccatgaggtactgattattattcccattttctcatgagactaaagctcagagctctaggatagtatacagtggcaagaggaatttacatccaagcactcagatttcaaagcccacattcttaactaccggactattcatattacagagcaggaaaagggtctcagacaggttaagcaacctgcccagagtcacacagctaatgagtagcagaatcaggattcaaacccagagctgtcaaaagcaaaccttatgttccttccactgtcccctgcttccttgcccttcagaaaggtcttggaaacaggggccagaggatgtggtagccacttcactggtgttctgtgtctgaatgggactttctcacaggcaggccatgctgggacctcagccatgggggtggccagggaggtggttgagcagaaggatagctggggacactgactgggggtagagtcacccagtgtctttagacatcctgctgtctaaagcactgtgtccaaagggtatggcacacttatatggacaggtcaccattccaaacaaggaggcccagtgtgtcaataggagaggtcctaaagcaacaaaaagggcggggtgtcttggatgggc

SEQ ID NO: 256325 - DNA, 681 bp, Artificial Sequence
  derived and/or modified sequence
atgagcagaatctaccacgacggcgccctgagaaacaaggccgtgcagagcgtgagactgcccggcgcctgggaccccgccgcccaccagggcggcaacggcgtgctgctggagggcgagctgatcgacgtgagcagacacagcatcctggacacccacggcagaaaggagagatactacgtgctgtacatcagacccagccacatccacagaagaaagttcgacgccaagggcaacgagatcgagcccaacttcagcgccaccagaaaggtgaacaccggcttcctgatgagcagctacaaggtggaggccaagggcgacaccgacagactgacccccgaggccctgaagggcctggtgaacaagcccgagctgctggccctgaccgagagcctgacccccgaccacaccgtggccttctggatgcccgagagcgagatggaggtgatggagctggagctgggcgccggcgtgagactgaagaccagaggcgacggccccttcctggacagcctggccaagctggaggccggcaccgtgaccaagtgcaacttcaccggcgacggcaagaccggcgccagctggaccgacaacatcatggcccagaagtgcagcaagggcgccgccgccgagatcagagagcagggcgacggcgccgaggacgaggagtgggacgactag

SEQ ID NO: 256326 - DNA, 681 bp, Artificial Sequence
  derived and/or modified sequence
atgagccgaatataccacgacggggctttgcggaataaggctgtccagagtgtcaggctgcccggagcctgggatcctgcggcccatcagggtggcaacggtgttctcctggaaggagagctgatagacgtctccaggcattcgatcctggacacccatggtagaaaagagagatactacgtcctgtacattagaccaagtcacatccatcggagaaagttcgacgctaaggggaacgagattgagcctaatttttcggcgaccagaaaggtcaacaccgggtttttgatgagcagctacaaagttgaggctaaaggggatacagaccgcctgacgcccgaggcactgaagggattggtgaacaagccggaactcctggccctgacagagagcttgactccggaccacactgtcgctttctggatgcctgagtctgagatggaggtaatggaattggagttgggtgctggcgtgagactaaaaacccgcggtgatggacctttcctggatagcctagccaagttggaagctggaaccgtcacaaaatgcaacttcacaggcgacgggaaaaccggcgcatcctggacagacaacatcatggcccagaaatgctcaaagggtgccgccgctgagatccgtgagcagggtgatggagccgaagatgaagagtgggacgattag

SEQ ID NO: 256327 - DNA, 681 bp, Artificial Sequence
  derived and/or modified sequence
atgagccgcatctaccatgatggagccctgaggaacaaggctgtgcagagcgtgcggctgcccggggcctgggaccctgctgcccaccagggcggcaatggagtgctgctggagggggagctgattgatgtgagccgccacagcatcctggacacccacggcaggaaggagcgctactacgtgctgtacatccggcccagccacatccacaggaggaagtttgatgccaagggaaatgaaattgagcccaacttcagcgccaccaggaaggtgaacacaggcttcctgatgagcagctacaaggtggaggccaagggggacacagaccggctgaccccagaggccctgaagggcctggtgaacaagccagagctgctggccctgacagagagcctgaccccagaccacacagtggccttctggatgcctgagagcgagatggaggtgatggagctggagctgggcgctggggtgcggctgaagaccagaggagatggccccttcctggacagcctggccaagctggaggccggcaccgtgaccaagtgcaacttcaccggagatggcaagacaggagcctcctggacagacaacatcatggcccagaagtgcagcaaaggagctgctgctgagatccgggagcagggagatggagcagaagatgaggagtgggatgactag

SEQ ID NO: 256328 - DNA, 681 bp, Artificial Sequence
  derived and/or modified sequence
atgagccggatctaccacgacggcgccctgcggaacaaggccgtgcagagtgtgcggctgcccggggcatgggatcccgcagctcaccagggagggaatggagtgctgttggagggcgagctcatcgatgtgagtaggcatagtatcctcgacacgcacggccgtaaggagagatattacgtgttgtatatccgaccgagtcatatccatcgcaggaaattcgatgccaaaggcaacgagattgagcccaacttcagtgcaacaaggaaagtaaatactggcttccttatgtcttcttacaaagtggaggccaagggggacacagacagactgacacccgaagcacttaagggtctcgttaataaaccggagctgctggccctgaccgagagtctgactccagatcacacagtcgctttctggatgccagaatccgagatggaagtgatggaattagagctcggcgctggagttcgcctcaaaacaagaggcgatggcccctttctcgactctctagcaaaattagaagccggcaccgttactaagtgtaatttcaccggtgacggaaagactggcgcctcatggaccgacaacatcatggctcaaaaatgttctaagggcgccgctgccgagatcagggagcagggtgacggagcggaggacgaagaatgggatgactag

SEQ ID NO: 256329 - DNA, 681 bp, Artificial Sequence
  derived and/or modified sequence
atgagtaggatataccatgatggcgctctgagaaacaaggcggtgcagtccgtccggcttcccggtgcttgggatcctgccgcacaccagggaggcaacggcgtcttgttagagggggaacttatagacgtatcaaggcattctatactggacactcacggtcgcaaggagcgctactatgtactatatataagaccttcacacatccacagacggaaattcgatgcaaagggcaacgagatagagcctaacttcagcgccactcgcaaagttaatactggcttcctcatgagctcttataaagtcgaggccaaaggcgacaccgaccgcctgacccccgaagcattaaaaggcttggtgaataagccagaacttctggccctaactgagtctcttaccccagaccatacagtggcattttggatgcctgaatctgagatggaggttatggaactagaactgggggcaggtgtacgcctaaagactcggggtgatggcccttttcttgacagcctggccaagctggaggcgggtaccgttaccaagtgtaatttcaccggcgacggtaagaccggagctagctggaccgacaatatcatggcccagaagtgctcaaagggggctgccgctgagattcgggagcagggagatggggcagaggatgaggagtgggacgactag

SEQ ID NO: 256330 - protein, 121 aa, Artificial Sequence
  derived and/or modified sequence
MEAEVDKLELMFQKAESDLDYIQYRLEYEIKTNHPDSASEKNPVTLLKELSVIKSRYQTLYARFKPVAVEQKESKSRICATVKKTMNMIQKLQKQTDLELSPLTKEEKTAAEQFKFHMPDL

SEQ ID NO: 256331 - protein, 126 aa, Artificial Sequence [sequence omitted]

SEQ ID NO: 256332 - DNA, 366 bp, Artificial Sequence
  derived and/or modified sequence
atggaggccgaggtggacaagctggagctgatgttccagaaggccgagagcgacctggactacatccagtacagactggagtacgagatcaagaccaaccaccccgacagcgccagcgagaagaaccccgtgaccctgctgaaggagctgagcgtgatcaagagcagataccagaccctgtacgccagattcaagcccgtggccgtggagcagaaggagagcaagagcagaatctgcgccaccgtgaagaagaccatgaacatgatccagaagctgcagaagcagaccgacctggagctgagccccctgaccaaggaggagaagaccgccgccgagcagttcaagttccacatgcccgacctgtag

SEQ ID NO: 256333 - DNA, 2972 bp, Artificial Sequence
  derived and/or modified sequence
aactacaaaattgaaagtagagaggagggggcagccaatggaaaaaaaaatttgcacagcagccaatcctcctgcggcgttttgtgcctttgcccaacaggaaaatgtgtctcatgcagaggggcgttacccagtctccaatgggcgggagccggtggaacggaggagccaatgagtgcgagatgttgagtgacagctgtccaatggaggccctccgtgctagtacggcttgcggcttaagcgccgccgcggtctgcggaatgtcaactattcaacatggaggcggaggtcgataagctggaactgatgttccagaaagctgagtctgatctggattacattcaatacaggctggaatatgaaatcaagactaatcatcctgattcagcaagtgagaaaaatccagttacactcttaaaggaattgtcagtgataaagtctcgatatcaaactttgtatgcccgctttaaaccagttgctgttgagcagaaagagagtaagagccgcatttgtgctactgtgaaaaagactatgaatatgatacaaaaactacagaagcaaacagacctggagctgtcaccactgactaaagaagagaaaactgcggcagagcaattcaaatttcacatgccagatttatgaagaaatggacttggaaaggaaattctaacagagaagagcttaattccggagaaatttaggaagatgtcttgttaacccttgatgtctagagattgggggctggtgaagggggtttggcttcaatgactggataatgatatctttcatgagagagattataagaagaagggcagataatatatgaataaagttcagccaaaaggatcaaatgagaataaaacgatttaaatatatgtacacacgcatgcacacacacacttagtcttgtaatttcaggccagaaattctcaacactattttgcatctgttttctttttctaagtcatgataatatagatgttctggtctatcataaaagaatgtttatgtacatttcagtcattcggtatgtggctttgtaaattaaagtataggcaaaacatttgtgttatacatgatatataatttcattttgtaaatgttgattgcacatgtggtcacattattgttgagactgcttttatgtgacctgtagtctcccacagaacctaaagtaataagctggcttttctgtgatagccacgtttgcgtatttctttccctatttcccttgcctgctaatgttgaacagcatgaacttgctttctgatgctgttttagactgtccctgttgtatctcaataatatctttgttttccttcagcctttattactataattgttcattctacatgaaagctaggaaactgaaattagaagagcacttatctgctacttgccagttttgcgtgagtgtgttatatgtatgtgtcaatttccctttaaaataactatttattttaaaataactattggcaataaggaaactgttcaaagtagaggcagatcttgatagaaagatgttaatcacagggttgtttataatagcaatatacatacacatttggctagtactaggtgaataggaaaataaatcatgctgtatgtatacaataagaggtcaagttgccaataaattattactgttaatgttctgggaaatgctgaaactatgctaagtgggggagagggaaagcaggtattgcagttttgtagtgaagattgggctttggagtcatatctgagatgtaagtagcagcttttaaattctagctatgaccctgtgcagatcacttaacttttgagtgtcaggatgtttggaaggacaagacaggaaagtgttttaatacagggttcagtatttagtaagccttcaataagtgatattacatacatgtaataaaaactaagcattgaaaggactaggaaaaatgcatcaaatgttagttctgcaggttatagaattatacttttatgtaattttaaaatttcagttatgaacatgtttgtccattaacaaacttataatagctgaaaaacagggttgtgagaacagcttcagttaaaattgtcctgtctagtttgaatatttcaagaacagaaagcctttttttttttttttttttttttgagacggagtctcactctgttgcccaggctggaatgcagtggtacgctctcagctcactgcaacctccacctcccaggttcaagcagttctctgccccaccctcccgagtagctgggattacaggcgcccgccaccacgcccggctatttttttgtatttttagtagagatggggcttcaccatcttgaccaggctggtctttaactcctgatggtgatccacccacctcggcctcccaaagtgctgggattacaggcatgagctaccgtgcctggcccccttttttttaattacagagaaataagttacaccttagtatcagatattaattttcttcagtgttcaggcaattagtatttagaaagctcttgtcatgagatggctctgggatgtgatgatgattgttgggattgaaaaaacggtagtatcatggagagatcataataaattcttagtattaaaagtggttttgctttcagttagggagaaaaattagattgtactatttttcctctatgatttccttcagttatcttccaaatgttgttttttccccacagcccccttaacattgttctctatgcacttctcaatacattttcatttgtttctcaagcctctttgtggatgactcctaaatataacttcttccactagctctagatccgtatttccaataaaatcccctacctgaatattcaagttaaacatgtccagaatacttactgattttattgttaatagccactattctgttgtctggaattaaaacctgtataactaatttgcatccctttatcttcttagtcaataaaacctacaatcctctttctaaaatggt

SEQ ID NO: 256334 - DNA, 366 bp, Artificial Sequence
  derived and/or modified sequence
atggaggctgaagtcgacaaactcgagcttatgtttcagaaagccgaaagtgatttggattacatccagtaccgtttggagtacgagatcaagacaaaccacccagactcagcctcagaaaaaaatcctgtgaccctcctgaaagagctgtccgttatcaagagccgatatcaaaccttatacgcacgattcaaacctgtcgctgtcgaacaaaaggagagtaagtctcggatttgtgccaccgtcaaaaagacaatgaatatgattcagaagctccagaagcagacggatttggagctgtccccgctcactaaagaagagaaaaccgcagcagagcagttcaagtttcacatgccagacctctag

SEQ ID NO: 256335 - DNA, 366 bp, Artificial Sequence
  derived and/or modified sequence
atggaggccgaggtggacaagctggagctgatgttccagaaggccgagagtgacctggactacatccagtaccgcctggagtatgagatcaagaccaaccacccagattctgccagcgagaagaaccctgtgaccctgctgaaggagctgagcgtcatcaagagccgctaccagaccctgtatgcccgcttcaagcctgtggccgtggagcagaaggagagcaagagccgcatctgtgccaccgtgaagaagaccatgaacatgatccagaagctgcagaagcagacagacctggagctgagccccctgaccaaggaggagaagacagctgctgagcagttcaagttccacatgccagacctgtag

SEQ ID NO: 256336 - DNA, 366 bp, Artificial Sequence
  derived and/or modified sequence
atggaggccgaggtggacaagctggagctgatgttccagaaggccgaatcagacctagattatatccaatataggctggagtacgaaattaagacgaatcatccggactccgcaagcgaaaagaaccccgttactcttctaaaagagttgagtgttatcaaaagcaggtaccagaccctgtacgctcgattcaagccagtagccgtcgagcagaaggaatctaaaagtcgcatctgtgccacagtgaagaagaccatgaatatgatccagaagctgcaaaaacagacagacctcgagctgagccccttaaccaaggaggagaaaacagccgccgagcagtttaagtttcacatgccagacctctag

SEQ ID NO: 256337 - DNA, 366 bp, Artificial Sequence
  derived and/or modified sequence
atggaagctgaggtggataaattggagctcatgttccagaaggcagaatctgatctggattatattcaatatcgacttgagtacgagatcaagactaaccacccagatagtgctagtgaaaaaaaccccgtgaccctacttaaagagctgagcgtgatcaagtccagataccaaacactgtacgcacggtttaagcccgtagctgtggagcaaaaagagagtaagtcacgaatctgcgccactgtgaaaaagactatgaatatgatccagaagctgcagaaacagaccgacctcgagctttcccctttgactaaagaagagaaaaccgctgctgagcagttcaagtttcacatgccagatctctag

SEQ ID NO: 256338 - DNA, 381 bp, Artificial Sequence
  derived and/or modified sequence
atgagcaccatcaacatggaggccgaggtggacaagctggagctgatgttccagaaggccgagagcgacctggactacatccagtacagactggagtacgagatcaagaccaaccaccccgacagcgccagcgagaagaaccccgtgaccctgctgaaggagctgagcgtgatcaagagccagtaccagaccctgtacgccagattcaagcccgtggccgtggagcagaaggagaccaagagcagaatctgcgccggcatgaccaagaccatgaacgtgatccagaagctgcagaagcagaccgacctggacctgagccccctgaccaaggaggagaagaccgccgccgagcagttcaagagccacgtgcccgacctgtag

SEQ ID NO: 256339 - DNA, 381 bp, Artificial Sequence
  derived and/or modified sequence
atgtctacaatcaatatggaggcagaggtagataagctcgagctgatgttccaaaaggctgagagtgatttggactacatccagtaccgtctggagtacgagatcaagacaaaccacccggatagtgctagcgagaagaatcccgtgacccttctcaaggagttgtccgtcattaagtcacaataccaaacactgtatgccaggttcaaacccgtggccgttgaacaaaaagagaccaagagtcggatttgcgcaggaatgaccaaaaccatgaacgttatccagaagctccagaaacagaccgacttggacttgagtccactgaccaaggaagagaaaacggctgctgaacagtttaagtcacacgtgcctgacctttag

SEQ ID NO: 256340 - DNA, 381 bp, Artificial Sequence
  derived and/or modified sequence
atgagcaccatcaacatggaggccgaggtggacaagctggagctgatgttccagaaggccgagagtgacctggactacatccagtaccgcctggagtatgagatcaagaccaaccacccagacagcgccagcgagaagaaccctgtgaccctgctgaaggagctgagcgtcatcaagagccagtaccagaccctgtatgcccgcttcaagcctgtggccgtggagcagaaggagaccaagagccgcatctgtgccggcatgaccaagaccatgaatgtcatccagaagctgcagaagcagacagacctggacctgagccccctgaccaaggaggagaagacagctgctgagcagttcaagagccacgtgcctgacctgtag

SEQ ID NO: 256341 - DNA, 381 bp, Artificial Sequence
  derived and/or modified sequence
atgagcaccatcaacatggaggccgaggtggacaagctggagctgatgttccagaaggccgagtctgatcttgattacattcaataccgtctggaatatgaaattaagactaaccaccccgatagcgccagcgagaaaaatcccgtcactctgctcaaggagctgtcagttatcaagtcacagtaccagacgttgtatgcgcgatttaagcctgttgcagtagagcagaaggagaccaagagcagaatatgtgcagggatgactaagactatgaatgtgatacagaagctgcagaagcagaccgatctggacttatcccccctgaccaaggaggagaagactgctgccgagcagtttaagagccatgtacccgatctctag

SEQ ID NO: 256342 - DNA, 381 bp, Artificial Sequence
  derived and/or modified sequence
atgtcaacaattaatatggaagccgaagtggataagctggaactgatgttccaaaaagctgagagcgacctggactacatccaatacagactagagtacgaaattaagactaatcaccctgattcggctagcgaaaaaaaccctgttaccctgttgaaggagctttccgttatcaaatctcaatatcaaactctttacgcccgtttcaaaccagtcgccgtggagcaaaaagaaactaagtcaaggatttgtgccggaatgacaaagacgatgaatgttatccagaaactgcagaaacagactgatctcgacctgtctccgttaaccaaagaggagaaaaccgcagccgagcagtttaaatcccacgtccccgacttgtag

SEQ ID NO: 256343 - DNA, 826 bp, Artificial Sequence
  derived and/or modified sequence
gtcggaggaatgtcaactattaacatggaggcggaggtcgataagctggaactgatgttccagaaagctgagtctgatctggattacattcaatacaggctggaatatgaaatcaagactaatcatcctgattcagcaagtgagaaaaatccagttacactcttaaaggaattgtcagtgataaagtctcaatatcaaactttgtatgcccgctttaaaccagttgctgttgagcagaaagagactaagagccgcatttgtgctggtatgactaaaactatgaatgtgatacaaaaactacagaagcaaacagacctggatctgtcaccactgactaaagaagagaaaactgcggcagagcaattcaaatctcacgtgccagatttatgaagaaatggacttggaaaggaaattctaacagagaagagcttaattccagagaaatttaggaagatgtcttgttaacccttgatgtctagagattgggggctggtgaaggaagtttggcttcaatgactggataatgatgtctttcatgagagagactataagaagaagggcagataatatatgaataaagttcagccaaaaggattaaatgagaataaaatgatttaaatatatgtacacacgcatgtacacacatacttagtcttgtaatttcaggccagaaaatctcttaacactattttgcatgtgttttctttttctaaatcatgataatgtagaggttctggtctatcataaaagaatgtttatgtacatttcagtcattcggtatgtggccttgtaaattaaagtataggcaaaacaaaaaaaagaagaa

SEQ ID NO: 256344 - protein, 908 aa, Artificial Sequence
  derived and/or modified sequence
MGVNDLWQILEPVKQHIPLRNLGGKTIAVDLSLWVCEAQTVKKMMGSVMKPHLRNLFFRISYLTQMDVKLVFVMEGEPPKLKADVISKRNQSRYGSSGKSWSQKTGRSHFKSVLRECLHMLECLGIPWVQAAGEAEAMCAYLNAGGHVDGCLTNDGDTFLYGAQTVYRNFTMNTKDPHVDCYTMSSIKSKLGLDRDALVGLAILLGCDYLPKGVPGVGKEQALKLIQILKGQSLLQRFNRWNETSCNSSPQLLVTKKLAHCSVCSHPGSPKDHERNGCRLCKSDKYCEPHDYEYCCPCEWHRTEHDRQLSEVENNIKKKACCCEGFPFHEVIQEFLLNKDKLVKVIRYQRPDLLLFQRFTLEKMEWPNHYACEKLLVLLTHYDMIERKLGSRNSNQLQPIRIVKTRIRNGVHCFEIEWEKPEHYAMEDKQHGEFALLTIEEESLFEAAYPEIVAVYQKQKLEIKGKKQKRIKPKENNLPEPDEVMSFQSHMTLKPTCEIFHKQNSKLNSGISPDPTLPQESISASLNSLLLPKNTPCLNAQEQFMSSLRPLAIQQIKAVSKSLISESSQPNTSSHNISVIADLHLSTIDWEGTSFSNSPAIQRNTFSHDLKSEVESELSAIPDGFENIPEQLSCESERYTANIKKVLDEDSDGISPEEHLLSGITDLCLQDLPLKERIFTKLSYPQDNLQPDVNLKTLSILSVKESCIANSGSDCTSHLSKDLPGIPLQNESRDSKILKGDQLLQEDYKVNTSVPYSVSNTVVKTCNVRPPNTALDHSRKVDMQTTRKILMKKSVCLDRHSSDEQSAPVFGKAKYTTQRMKHSSQKHNSSHFKESGHNKLSSPKIHIKETEQCVRSYETAENEESCFPDSTKSSLSSLQCHKKENNSGTCLDSPLPLRQRLKLRFQST

SEQ ID NO: 256345 - protein, 126 aa, Artificial Sequence
  derived and/or modified sequence
MGVNDLWQILEPVKQHIPLRNLGGKTIAVDLSLWVCEAQTVKKMMGSVMKPHLRNLFFRISYLTQMDVKLVFVMEGEPPKLKADVISKRNQSRYGSSGKSWSQKTGRSHFKSVLRECLHMLECLGI

SEQ ID NO: 256346 - protein, 93 aa, Artificial Sequence
  derived and/or modified sequence
MGVNDLWQILEPVKQHIPLRNLGGKTIAVDLSLWVCEAQTVKKMMGSVMKPHLRNLFFRISYLTQMDVKLVFVMEGEPPKLKADVISKRNQSR

SEQ ID NO: 256347 - protein, 476 aa, Artificial Sequence
  derived and/or modified sequence
MEWPNHYACEKLLVLLTHYDMIERKLGSRNSNQLQPIRIVKTRIRNGVHCFEIEWEKPEHYAMEDKQHGEFALLTIEEESLFEAAYPEIVAVYQKQKLEIKGKKQKRIKPKENNLPEPDEVMSFQSHMTLKPTCEIFHKQNSKLNSGISPDPTLPQESISASLNSLLLPKNTPCLNAQEQFMSSLRPLAIQQIKAVSKSLISESSQPNTSSHNISVIADLHLSTIDWEGTSFSNSPAIQRNTFSHDLKSEVESELSAIPDGFENIPEQLSCESERYTANIKKVLDEDSDGISPEEHLLSGITDLCLQDLPLKERIFTKLSYPQDNLQPDVNLKTLSILSVKESCIANSGSDCTSHLSKDLPGIPLQNESRDSKILKGDQLLQEDYKVNTSVPYSVSNTVVKTCNVRPPNTALDHSRKVDMQTTRKILMKKSVCLDRHSSDEQSAPVFGKAKYTTQRMKHSSQKHNSSHFKESGHNE

SEQ ID NO: 256348 - DNA, 2727 bp, Artificial Sequence
  derived and/or modified sequence
atgggcgtcaacgacctgtggcagatccttgagcccgtgaaacagcatattcctttgagaaatctgggtggcaagactatcgctgtggatctctctttatgggtatgtgaggcacaaactgtgaaaaagatgatggggtcagtgatgaagccacacctgagaaacctcttctttcgcattagctatttaacacaaatggacgtgaagttagtgttcgtgatggagggtgagcctcccaaattaaaagcagatgtcatcagtaaaaggaaccagtctagatacggaagtagcggaaaatcgtggtctcagaagaccggcagaagccactttaaaagtgtcttgcgtgaatgtcttcacatgctggaatgcctgggcatcccatgggtgcaggcggcgggtgaagccgaagctatgtgtgcttaccttaacgccggaggccacgtagatggctgtttgactaacgatggcgataccttcctctacggagcccagaccgtctatagaaatttcactatgaataccaaagatcctcacgtcgattgctatactatgtcgtcaattaagtccaaattaggactggaccgcgacgctttagtgggattggccattcttcttggatgtgactacctgcctaaaggcgttcctggggtcggcaaagagcaagcactgaagctgattcagattctgaaaggtcaaagcttgctccagagattcaacagatggaacgagactagctgcaactcgtctccccagcttctggtcaccaaaaagctggcgcactgcagcgtgtgctcgcatcctggctcccccaaggatcatgaacgcaatggctgtaggctgtgcaagtctgataaatactgcgagccccatgactacgagtattgttgcccttgtgaatggcaccgaacggagcatgatcgccagctttccgaggtggagaataacatcaagaagaaggcctgttgttgtgagggctttccatttcacgaggtgattcaggaatttcttttaaataaggacaaactcgttaaggtgattagataccagcgtcccgatctgctgctatttcagcggttcacactggagaagatggagtggcccaaccactacgcttgcgaaaagctcttggtgctactgacccactacgacatgattgaacgaaagctgggcagccggaatagcaatcagttgcagcccatccggatcgtcaaaaccaggattagaaatggggtccattgctttgaaatcgaatgggaaaaacctgagcactacgcaatggaggataagcagcatggagagtttgctcttctgacgatcgaagaggagtctcttttcgaagcagcctatcctgagatcgtggctgtgtatcaaaagcagaagttagagattaaggggaaaaaacagaaacggatcaagcctaaggaaaataaccttcccgagcctgacgaagtgatgtcatttcagtcccatatgacattaaaaccaacttgtgaaatttttcacaaacagaactcaaagttgaatagtggcatctccccggatcccactctgcctcaggagtccatctctgcaagcttgaattcgctgttgctgcccaaaaatactccctgcctgaacgcccaggaacagtttatgagcagccttcggccgcttgctatccagcagattaaagccgtgtctaagtccctgatatcagagtctagccagcctaatacctcttcccacaatattagtgtcattgctgacttgcatctttctacaatcgactgggaaggcacgtctttctctaactcccccgcgattcagagaaacacgttttcgcacgatctgaaaagcgaagtagagtccgagctgagtgccattccagacgggttcgagaacattcccgaacagttgtcctgcgaaagtgaacggtacactgctaacataaagaaggtcttggacgaggacagcgatggcatctcccccgaagagcatctgctgagcggcatcacagacctgtgcttgcaagatctgccactgaaggagcggattttcaccaagctgtcatatcctcaggataacctacagcccgatgttaacctgaagactttaagtattctcagtgttaaggaaagctgcatagctaatagcggctctgactgtacctcgcacctgtcaaaagatttgccaggaattcccctccaaaacgagtctcgggactccaaaatcctgaagggtgatcagctgcttcaggaggattataaggtcaacacttcagtgccatactccgtgagcaataccgtggtaaaaacttgcaatgtgcgtccccctaacacagcgctggatcacagccgcaaggtcgatatgcagacgactcgtaaaatccttatgaagaagtccgtgtgcctggaccggcactcatctgatgagcagtctgcccccgtctttggtaaggccaagtacaccacgcagaggatgaagcatagttcacagaaacataacagctcccacttcaaggagtccggccataacaaactatctagtccaaagattcacatcaaggaaactgagcaatgcgttcggtcctacgagactgccgagaacgaggagtcctgcttccccgacagtacaaagagttctctgtcttctctgcaatgccataagaaggaaaataatagcggtacctgcctggacagccccttgcctttacgccagcgcctgaagctgcgcttccagagcacctag

SEQ ID NO: 256349 - DNA, 2727 bp, Artificial Sequence
  derived and/or modified sequence
atgggggtgaacgacctgtggcagattttggagccagtgaagcagcacatcccgttaagaaatttgggaggaaaaacaatcgcagtggacctgtccttgtgggtgtgtgaggctcagaccgtaaagaaaatgatgggctctgtcatgaagccgcacctgagaaatctattcttccggatctcatacttgacacagatggacgttaaactggtatttgtcatggaaggagaacctccgaagctcaaggccgatgtgatttctaaacgcaatcagtctaggtacgggagttcaggtaaaagctggtctcaaaaaacgggacgctctcattttaagtctgtgcttagagaatgcctgcatatgttggagtgtctggggatcccatgggtgcaagccgccggtgaagcagaggccatgtgtgcttatctaaatgctggcggccatgtggatggctgccttaccaacgacggcgatacattcctttatggcgctcagacagtttacaggaactttactatgaatacaaaagatcctcatgttgactgttatactatgtcaagcatcaagtccaaactcggcctagacagggatgcactggtcgggcttgctatcctcctaggctgcgactatcttcctaagggagtgcctggggtgggcaaggagcaagccctgaagttgattcaaatcctgaaagggcagtctctgttacagcgatttaacagatggaacgagactagctgcaacagctcaccgcaactgttggtgactaagaaactcgctcattgttctgtttgctcacacccagggtcccccaaggatcacgagcgcaatggatgtcggctgtgcaagtcagacaagtattgcgagccccatgattatgagtactgttgtccctgtgagtggcatcggactgagcacgaccgccagctgagcgaggtggaaaataatataaaaaaaaaagcctgctgttgtgaaggattcccctttcatgaagtcatacaagagtttcttctaaacaaggataagttggtgaaagttattcgttaccaaagaccagacctgttactgttccagcgatttaccctggagaaaatggagtggcccaaccactacgcctgtgagaagttgttggtcctgttaacccactacgatatgatagaacgaaaactcggtagccgtaactcaaatcaactgcagccaatccggatcgttaagacccgaattcgaaacggagtacattgtttcgagatcgagtgggaaaaacctgagcactatgctatggaggacaaacagcacggggaatttgcgctactgactattgaggaggagtccctgttcgaggccgcctatcccgaaatcgtggcagtctaccaaaaacagaagctggagatcaagggcaagaaacagaagaggatcaagccaaaggaaaacaatctgccagagcctgatgaggtcatgtcgttccagagccatatgaccctgaagccaacttgtgaaatattccataaacagaattcaaagctgaactcgggaatctcccccgacccaaccctaccccaggagtcaatatccgcgtcactcaacagcctgctcctgccgaagaatactccttgcttgaacgcccaggagcaattcatgtcaagtctcaggccccttgctatccagcagatcaaagcagtcagcaagtccctgataagcgaaagttcgcagcccaacacaagcagtcacaatatcagcgttatcgccgatctccatttgtctacaattgactgggaaggcaccagcttctccaatagtcccgccatccaaagaaatacattctctcatgatcttaaatctgaggtcgagtctgagctcagtgcaattcccgacggattcgagaatatccctgagcaactatcttgcgagtccgagaggtacacagctaacattaagaaggttttagacgaagattctgacggcatcagccctgaggagcacctgctctctggcatcacagatctgtgccttcaagacctcccgctgaaggaaagaatctttacgaaactttcctacccacaggataacctccagcccgacgtgaatctcaaaactctgtccatcctctcagtaaaggagtcatgcatcgccaacagtggatcagactgtaccagtcacttgtcaaaagatttaccaggcataccgctgcaaaacgaaagccgcgattccaaaattctcaagggcgatcagctgctgcaagaagactataaggtgaatacatcagtgccatattccgtgtccaacacagtagtcaaaacatgtaatgttcgccccccgaatacagcccttgatcatagtcgtaaggtcgatatgcagactacgagaaaaatccttatgaaaaagtcagtgtgtttagatagacacagctcggacgagcagtccgcacctgtgttcggcaaggcgaagtatactacccaacggatgaagcactctagtcaaaaacataatagctctcatttcaaggaatctggtcataacaaactatcctctcccaaaattcacattaaagaaacggaacagtgtgttcgttcttatgaaaccgctgagaatgaggagagctgtttcccagactcaacgaaatcgagcctgagctcgctacagtgccataaaaaagagaacaacagcggcacgtgcttggattcccctctccccctgagacagagacttaaattacgcttccagtcaacttag

SEQ ID NO: 256350 - DNA, 381 bp, Artificial Sequence
  derived and/or modified sequence
atgggcgtgaacgatttatggcaaatcctggaacccgttaagcaacatatccccctccgcaacctaggcggcaaaaccattgcggtcgatcttagcctgtgggtgtgcgaagcacagactgtaaagaagatgatgggaagcgtaatgaaaccgcatttgaggaatcttttttttcggatttcgtatttgactcaaatggacgttaaactcgtgttcgtaatggagggagagcccccaaaactgaaagctgacgtcatctctaaaaggaatcaatcccgatacggatcaagcggcaaaagttggtcacaaaaaactgggcggtctcattttaaatcggtgttgagggagtgcctccatatgctcgagtgtctgggaatctag

SEQ ID NO: 256351 - DNA, 282 bp, Artificial Sequence
  derived and/or modified sequence
atgggggtcaatgacctttggcagatacttgaacccgtaaagcagcacattccccttcgcaatctcgggggtaaaaccattgccgtcgacctatctttgtgggtgtgcgaggctcagactgtgaagaagatgatgggttccgtgatgaaaccgcatttgaggaacttgttcttccgaatcagttacctgactcagatggatgtaaagctggtctttgtgatggagggagagccacctaagttgaaggccgatgtcatttctaagcgcaaccagtccagatag

SEQ ID NO: 256352 - DNA, 1431 bp, Artificial Sequence
  derived and/or modified sequence
atggagtggcctaatcattacgcatgtgaaaaactccttgtgctgctgacccactacgacatgatcgaacgaaagctcggcagccgtaactccaatcagctgcagccgatcagaattgttaaaactcggatccgaaacggcgtgcactgcttcgagatagaatgggagaaaccagagcactatgccatggaagacaaacagcacggagaatttgccctccttaccatcgaggaggagtctctttttgaggccgcgtaccctgaaatcgtagccgtgtaccagaagcagaagcttgaaattaagggtaaaaaacaaaagagaataaaacccaaggaaaacaacttaccagaaccagacgaggtgatgtcgttccaatcccacatgacactcaaaccaacatgtgaaatctttcacaaacagaacagcaagctcaattccggcatatctccagatcctaccctgccacaggaatccatttctgccagcttgaattcgcttctgcttccaaagaacactccctgcctaaacgcacaggaacagttcatgtcatcacttcgtcctctcgctatacagcaaattaaagccgtgtctaaatccttgatcagcgaaagttcccaaccgaatacatctagccacaatattagcgttatcgccgaccttcatctttcgactatcgattgggaaggcacatcgttcagtaattctccggcaatccagaggaatacattcagtcacgatctaaagagcgaggttgagagtgagctgtccgcgattcctgacggcttcgaaaacatcccagaacagctgtcctgtgaatccgaacgctacaccgcaaacattaagaaagtgttggacgaagattccgatggaatctctcccgaagagcacttattgagtggtatcaccgacttgtgtttgcaggacctgcccttaaaagagcggattttcactaaattatcgtaccctcaagataatctccagccagatgttaacctaaaaacgctgagcattctaagtgtaaaggagtcgtgtatcgccaacagtggaagtgactgcacttcccacctgtcaaaggacctcccaggtatcccgctgcagaatgagtcaagggacagcaaaatccttaagggggatcaattactgcaggaggattacaaggttaatacatcagtcccttactcagtttcaaacaccgtcgtaaagacttgtaacgtcaggcccccaaacacagcccttgatcactctcggaaagtggatatgcagacgaccaggaaaattctaatgaaaaagagtgtgtgtcttgataggcattccagtgatgaacagagcgcacctgtgttcggcaaagcaaaatacacgacacagagaatgaaacactctagccaaaaacacaattcaagccacttcaaagaatcagggcataacgaatag

SEQ ID NO: 256353 - DNA, 5722 bp, Artificial Sequence
  derived and/or modified sequence
gcagttgcggggtttcgcgccgccggagtctgagaggccggaagtgccccttagcgggtgggggaagctggtaggcacgggcggctccgcagtgaccggactcgggggagcagataatcaccagaatgggagtgaatgacttgtggcaaattttggagcctgttaagcaacacatccccttgcgtaatcttggtgggaaaaccattgcagttgatctgagtctctgggtgtgtgaggcacagacagtcaaaaaaatgatgggcagcgtcatgaagccccacctcaggaacttattttttcgtatctcatatttaacacaaatggatgtaaaactggtatttgttatggaaggggaaccaccaaagctgaaagctgatgtcataagcaagaggaatcagtctcggtatgggtcttctggaaaatcgtggtctcagaaaacagggagatcacattttaaatcagtcttaagagagtgcctccatatgctcgaatgcttaggaatcccctgggttcaggctgctggggaagctgaagccatgtgtgcttatctcaatgctggtggtcatgtcgatggctgcctcaccaatgatggagatactttcctttatggggcccagactgtttacaggaatttcactatgaatacaaaggacccacatgttgactgttacacaatgtcatctatcaagagtaaactaggtttggatagagatgctctggttggattagcaatacttcttggctgtgattatctcccaaagggagtccctggagttggaaaagagcaagcattaaaacttatacagattttgaaagggcaaagtttacttcagaggtttaatcggtggaatgaaacatcttgtaactctagtccacaactgctagtcactaaaaaactggctcattgttccgtatgttcccatccaggttcacctaaggatcatgaacgtaatggatgcagattatgtaaaagtgataaatattgtgagccacatgactatgaatactgctgtccttgtgagtggcaccgtacagaacatgataggcaactcagtgaagtagagaacaatattaagaagaaagcttgctgttgtgagggattcccattccatgaggttattcaagaattccttttaaacaaggataaattggtgaaggttatcaggtaccaaagacctgatttgttattgtttcagagatttactcttgaaaaaatggagtggcccaatcactatgcatgtgagaaattgctggtacttttgacccattatgacatgatagaaagaaagcttggtagcagaaactctaatcaactacagccaattcgaattgttaagactcgaatcagaaatggagttcattgttttgaaatagaatgggaaaagcctgaacattatgctatggaagataaacaacatggagaatttgctttattaacaattgaggaagaatcattgtttgaagcagcatatcctgagatcgttgctgtttaccaaaaacaaaagttagaaattaaagggaagaaacaaaaacgtattaagcctaaagaaaacaatttgccagaaccagatgaagtaatgagctttcagtcacacatgactttaaaacccacatgtgaaatctttcataagcagaattccaagttaaattcggggatttcccctgatcctacattaccacaggaatctatttctgcctcattgaatagcttgcttttacctaaaaatactccatgtttgaatgcacaagaacagttcatgtcttctctaagacctttggctatacagcaaattaaagctgtcagtaagtctctaatttcagaatctagtcaacccaatacctcatctcataatatatccgtgattgctgatctacacttgagcactattgactgggaaggtacttcttttagtaattctccagctattcaaaggaatactttttctcatgatttaaaatcagaagttgaatcagagctatcagccatccctgatggctttgaaaatatcccagaacaactgtcctgtgaatcagaaaggtacactgcaaacataaagaaagtgttggatgaggattctgatgggattagtcctgaagagcatctactttctggcattactgatttatgtcttcaggatttgcctttaaaggaacgaatatttacaaaattatcatatcctcaggataatctacaaccagatgtcaacctgaaaactttgtccatacttagtgtaaaagaatcttgtattgctaacagtggttctgattgtacatcacatctttcaaaggatcttccaggaattcccttgcaaaatgaatccagagactctaaaattctaaaaggagaccagctgcttcaagaagactataaagtcaatacttctgtcccttattctgtcagtaacacagtggtaaagacctgcaatgttagaccaccaaatactgctttagatcatagtagaaaagttgatatgcaaaccactcggaaaattttaatgaagaagagtgtttgccttgacagacattcctctgatgaacaaagtgccccagtgtttgggaaagctaagtacacaactcaaagaatgaagcacagttctcaaaagcataattcatcccatttcaaagaaagtggccataacaagttgagtagccctaagatacatattaaagaaactgaacagtgtgtcagatcttatgaaacagctgaaaatgaagaaagctgtttcccagattcaacaaaaagttctctgagttctctacaatgtcataagaaagaaaacaactctggtacttgtttggatagccctcttcctttacgccagagattaaaactaagattccaaagcacttgaaatttaaaacacttaggtataacttaactattttagtactatcagcaatagcagagacagagggaaggtatctagttcatgtgtggtaaaaattttaatgttctctgtgtcatgaaacacttgccattttaatcaaagttgtaatttttaaaaagtcacctaaaactctggttttaaaagatcctctgtattgaaaacttctgataatgtatgtcattatgtccttactattccttaattgtagttttaaaatattggtatagtacttgacagagtaaatacttcatctgattgttcatttttactttttcttccacaagcctctaaagtatttatattccagcttgttcccaagaggataattctttatacttctcttcattcttttaaggccttgcaaggtcttccgttataactcgctttcctaaaagctattttctccctcagtgtgaagatacctttagtgtgctcttccactttggaaggccatgcaaggtgttccattataactctttttcctaagagttatattctccctcagtttgaagatacctttagtgtgctcttccacttttggtgtcttagtctcttttgaggggcaaaaatagaaaaggagagaagatgtcagtatgtttagtaaaaatcatgctcgtaatggctgaataaactgagcaaagtaactccttatgtatccccagaagttcacaggtatatcgggtggaaaaagatttggaaaatcaaatgtataaccaaaaggattagaaactagcccaggatcacgtagctaactaataatcctgtgggaatcagttttcttgcctgctaatttttttatttttctattttttccttctatagcacttttcccccttttgttttgaatctatgcaatattgactttaataccaccaaatattaagtcatgcattaatttaggtcgcactcaaaaattctagagaggcatccagattgaaaaggaaaatggtgtctgcagatgacaagattgtatgcatcaaaaattctaagaaatccactagaaaactattaaaactgataaagcgagttcatccaggtcgtagaatacaagaccaatgtgcaatgatcattgcattttgtttttgtttgtttgtttttttttgagacagagtctcactcttgtcgagactggggtgtagtggcgccatcttggctcactgcaacctctgcctcccaggttcacgcaattcacatgcctcagccacctgagtagcagggattacaggtgtgtgccaccatgcctggctaatttttagtatttttagtagagatgggattttcccttgttggtcaggctagtcatgaactcctggcctcaagcgatccacccatcttggcctcccagagtgctgggattacaggtgtgaatcaccatactcagcctcaattgtatttctgtacacctctaaataaatggaaatacattccatgttcatgaatcagaagacataagatgaccatactccccaaactgatctacaggttaaatgtaattcccattaattccagctggtttctttgctgattctaaaattcatatggaaatttcaggaacacagaatattaggaagaatcttgaaagagtttgaatgacccacccttcctgattttaagtatacagaactacagtaatgaatgtgttgtactggtataaaggtagacatataggtcaatatagatcaatggcatagaattgagaattcagaaaaaaagccttcacgtttatggtcagttgattttaaaccagagtgccaagacaattcaatgggaaaaggaaacagtctttgaaccaactgtcttctggatctattggatatctatgtaaaaaagagtgacatttgattcctacttcacatgatatttaagaagtaacttaagatggatcaaatacctaaatgtaagctaaagctataaaactcttagaagaaaacatagacgtaaatctttgtgactttggattaggcaaggatttcttaaatatacccaaagcataggcaacaaaagagaatacacaaactggacttcatcaaaactaaaaactgttgtttgaaatgacaccatcaagaaagtgaaaagacagcttacagaatgggagaaaatatttgcaaatcataaatgtgataagggacttgtatcttggtggtatataaagaactcgtaactcaattataaaaagacaactttgaaatgggcaaaatagctcaacaggcttttctgcaaagaagaaatacaaatgaccaagaagcacatttaaaaattttcagtactattactcatcaggaaaatgcaaatcaaaaccacaagacacccaatgtctacaatcaaaaagataataactagtattgatgaggatgtggagaaattgaaattctcataacatgctggtaggaatgtaaaatggggcagccactttggaaaaagtctggtagttcttcaaatggttaaatgtagagttacgatatgatccagcaattcctctcccaggtatatacccaagataaatgaaaacttatatccacataaaaacctgtgcacaaatgtccatagcagcgttattcataatagcctaaaagtggaaacaatcccagttccagaatgaggaaggggagaaactaatgtgtattagctattgtgtgctaagcattcaactagattatttacaaaccttgtatcatctcaactctttaaggactgtattgcaatgttttgaatattcagagagaaaaaagtcgttgctaaaacattttccaaggttctgcttattctgatttgttcagtcgtggctgtgatagttcaggaccatctagaccaggtaaataaaatatctagaggca

SEQ ID NO: 256354 - DNA, 6367 bp, Artificial Sequence
  derived and/or modified sequence
gaaacgcttcctggtgctcctgggcctggcggttgagcccggggagctagtctttgcttgggtaaagaaagaggactttcctttttttttttccttttgagaaaattcagaaatttggaggcacagtagttaggattcaggccaaactggtaaatgacgaaggggcttcttccagagccaaggaggaagggttgtccggcagataatcaccagaatgggagtgaatgacttgtggcaaattttggagcctgttaagcaacacatccccttgcgtaatcttggtgggaaaaccattgcagttgatctgagtctctgggtgtgtgaggcacagacagtcaaaaaaatgatgggcagcgtcatgaagccccacctcaggaacttattttttcgtatctcatatttaacacaaatggatgtaaaactggtatttgttatggaaggggaaccaccaaagctgaaagctgatgtcataagcaagaggaatcagtctcggtatgggtcttctggaaaatcgtggtctcagaaaacagggagatcacattttaaatcagtcttaagagagtgcctccatatgctcgaatgcttaggaatcccctgggttcaggctgctggggaagctgaagccatgtgtgcttatctcaatgctggtggtcatgtcgatggctgcctcaccaatgatggagatactttcctttatggggcccagactgtttacaggaatttcactatgaatacaaaggacccacatgttgactgttacacaatgtcatctatcaagagtaaactaggtttggatagagatgctctggttggattagcaatacttcttggctgtgattatctcccaaagggagtccctggagttggaaaagagcaagcattaaaacttatacagattttgaaagggcaaagtttacttcagaggtttaatcggtggaatgaaacatcttgtaactctagtccacaactgctagtcactaaaaaactggctcattgttccgtatgttcccatccaggttcacctaaggatcatgaacgtaatggatgcagattatgtaaaagtgataaatattgtgagccacatgactatgaatactgctgtccttgtgagtggcaccgtacagaacatgataggcaactcagtgaagtagagaacaatattaagaagaaagcttgctgttgtgagggattcccattccatgaggttattcaagaattccttttaaacaaggataaattggtgaaggttatcaggtaccaaagacctgatttgttattgtttcagagatttactcttgaaaaaatggagtggcccaatcactatgcatgtgagaaattgctggtacttttgacccattatgacatgatagaaagaaagcttggtagcagaaactctaatcaactacagccaattcgaattgttaagactcgaatcagaaatggagttcattgttttgaaatagaatgggaaaagcctgaacattatgctatggaagataaacaacatggagaatttgctttattaacaattgaggaagaatcattgtttgaagcagcatatcctgagatcgttgctgtttaccaaaaacaaaagttagaaattaaagggaagaaacaaaaacgtattaagcctaaagaaaacaatttgccagaaccagatgaagtaatgagctttcagtcacacatgactttaaaacccacatgtgaaatctttcataagcagaattccaagttaaattcggggatttcccctgatcctacattaccacaggaatctatttctgcctcattgaatagcttgcttttacctaaaaatactccatgtttgaatgcacaagaacagttcatgtcttctctaagacctttggctatacagcaaattaaagctgtcagtaagtctctaatttcagaatctagtcaacccaatacctcatctcataatatatccgtgattgctgatctacacttgagcactattgactgggaaggtacttcttttagtaattctccagctattcaaaggaatactttttctcatgatttaaaatcagaagttgaatcagagctatcagccatccctgatggctttgaaaatatcccagaacaactgtcctgtgaatcagaaaggtacactgcaaacataaagaaagtgttggatgaggattctgatgggattagtcctgaagagcatctactttctggcattactgatttatgtcttcaggatttgcctttaaaggaacgaatatttacaaaattatcatatcctcaggataatctacaaccagatgtcaacctgaaaactttgtccatacttagtgtaaaagaatcttgtattgctaacagtggttctgattgtacatcacatctttcaaaggatcttccaggaattcccttgcaaaatgaatccagagactctaaaattctaaaaggagaccagctgcttcaagaagactataaagtcaatacttctgtcccttattctgtcagtaacacagtggtaaagacctgcaatgttagaccaccaaatactgctttagatcatagtagaaaagttgatatgcaaaccactcggaaaattttaatgaagaagagtgtttgccttgacagacattcctctgatgaacaaagtgccccagtgtttgggaaagctaagtacacaactcaaagaatgaagcacagttctcaaaagcataattcatcccatttcaaagaaagtggccataacaagttgagtagccctaagatacatattaaagaaactgaacagtgtgtcagatcttatgaaacagctgaaaatgaagaaagctgtttcccagattcaacaaaaagttctctgagttctctacaatgtcataagaaagaaaacaactctggtacttgtttggatagccctcttcctttacgccagagattaaaactaagattccaaagcacttgaaatttaaaacacttaggtataacttaactattttagtactatcagcaatagcagagacagagggaaggtatctagttcatgtgtggtaaaaattttaatgttctctgtgtcatgaaacacttgccattttaatcaaagttgtaatttttaaaaagtcacctaaaactctggttttaaaagatcctctgtattgaaaacttctgataatgtatgtcattatgtccttactattccttaattgtagttttaaaatattggtatagtacttgacagagtaaatacttcatctgattgttcatttttactttttcttccacaagcctctaaagtatttatattccagcttgttcccaagaggataattctttatacttctcttcattcttttaaggccttgcaaggtcttccgttataactcgctttcctaaaagctattttctccctcagtgtgaagatacctttagtgtgctcttccactttggaaggccatgcaaggtgttccattataactctttttcctaagagttatattctccctcagtttgaagatacctttagtgtgctcttccacttttggtgtcttagtctcttttgaggggcaaaaatagaaaaggagagaagatgtcagtatgtttagtaaaaatcatgctcgtaatggctgaataaactgagcaaagtaactccttatgtatccccagaagttcacaggtatatcgggtggaaaaagatttggaaaatcaaatgtataaccaaaaggattagaaactagcccaggatcacgtagctaactaataatcctgtgggaatcagttttcttgcctgctaatttttttatttttctattttttccttctatagcacttttcccccttttgttttgaatctatgcaatattgactttaataccaccaaatattaagtcatgcattaatttaggtcgcactcaaaaattctagagaggcatccagattgaaaaggaaaatggtgtctgcagatgacaagattgtatgcatcaaaaattctaagaaatccactagaaaactattaaaactgataaagcgagttcatccaggtcgtagaatacaagaccaatgtgcaatgatcattgcattttgtttttgtttgtttgtttttttttgagacagagtctcactcttgtcgagactggggtgtagtggcgccatcttggctcactgcaacctctgcctcccaggttcacgcaattcacatgcctcagccacctgagtagcagggattacaggtgtgtgccaccatgcctggctaatttttagtatttttagtagagatgggattttcccttgttggtcaggctagtcatgaactcctggcctcaagcgatccacccatcttggcctcccagagtgctgggattacaggtgtgaatcaccatactcagcctcaattgtatttctgtacacctctaaataaatggaaatacattccatgttcatgaatcagaagacataagatgaccatactccccaaactgatctacaggttaaatgtaattcccattaattccagctggtttctttgctgattctaaaattcatatggaaatttcaggaacacagaatattaggaagaatcttgaaagagtttgaatgacccacccttcctgattttaagtatacagaactacagtaatgaatgtgttgtactggtataaaggtagacatataggtcaatatagatcaatggcatagaattgagaattcagaaaaaaagccttcacgtttatggtcagttgattttaaaccagagtgccaagacaattcaatgggaaaaggaaacagtctttgaaccaactgtcttctggatctattggatatctatgtaaaaaagagtgacatttgattcctacttcacatgatatttaagaagtaacttaagatggatcaaatacctaaatgtaagctaaagctataaaactcttagaagaaaacatagacgtaaatctttgtgactttggattaggcaaggatttcttaaatatacccaaagcataggcaacaaaagagaatacacaaactggacttcatcaaaactaaaaactgttgtttgaaatgacaccatcaagaaagtgaaaagacagcttacagaatgggagaaaatatttgcaaatcataaatgtgataagggacttgtatcttggtggtatataaagaactcgtaactcaattataaaaagacaactttgaaatgggcaaaatagctcaacaggcttttctgcaaagaagaaatacaaatgaccaagaagcacatttaaaaattttcagtactattactcatcaggaaaatgcaaatcaaaaccacaagacacccaatgtctacaatcaaaaagataataactagtattgatgaggatgtggagaaattgaaattctcataacatgctggtaggaatgtaaaatggggcagccactttggaaaaagtctggtagttcttcaaatggttaaatgtagagttacgatatgatccagcaattcctctcccaggtatatacccaagataaatgaaaacttatatccacataaaaacctgtgcacaaatgtccatagcagcgttattcataatagcctaaaagtggaaacaatcccagttccagaatgaggaaggggagaaactaatgtgtattagctattgtgtgctaagcattcaactagattatttacaaaccttgtatcatctcaactctttaaggactgtattgcaatgttttgaatattcagagagaaaaaagtcgttgctaaaacattttccaaggttctgcttattctgatttgttcagtcgtggctgtgatagttcaggaccatctagaccaggtaaataaaatatctagaggcattcttgagattgtatgagatgaaaataacaaaattagttgggagtggccagtctgagttcattttgctatatagctcaggagtccccaacccctgggctatggacaggtaccagtccatcacctgtcaggaaccggcctgcacagcaggtgttgagcggcatgcaagcgagaattaccgcctgagctctgcctcctgtcagatcagcggtggcattagagtctcataggagcatgaaccctattgtgaactacgcatgcgaggatctagtttgtgcactcctactgagaatctaatgcctgatgatataaggtggaacagcttcatcccacagccatctccccctcatcatccgtggaaaaactgttttccacgaaagtggtcctcggtgccagaaaggttggggactgctgatatacctaatataggcataagtgtaaaattatagttcctcctcctcaaggatttctctgttttcattgtccaggttataccaattctttttaaagcattccatgttcttgttccttgatgtggtcatgttatcacttgtaaat

SEQ ID NO: 256355 - DNA, 593 bp, Artificial Sequence
  derived and/or modified sequence
gaaacgcttcctggtgctcctgggcctggcggttgagcccggggagctagtctttgcttgggtaaagaaagaggactttcctttttttttttccttttgagaaaattcagaaatttggaggcacagtagttaggattcaggccaaactggtaaatgacgaaggggcttcttccagagccaaggaggaagggttgtccggcagataatcaccagaatgggagtgaatgacttgtggcaaattttggagcctgttaagcaacacatccccttgcgtaatcttggtgggaaaaccattgcagttgatctgagtctctgggtgtgtgaggcacagacagtcaaaaaaatgatgggcagcgtcatgaagccccacctcaggaacttattttttcgtatctcatatttaacacaaatggatgtaaaactggtatttgttatggaaggggaaccaccaaagctgaaagctgatgtcataagcaagaggaatcagtctcggtatgggtcttctggaaaatcgtggtctcagaaaacagggagatcacattttaaatcagtcttaagagagtgcctccatatgctcgaatgcttaggaatcc

SEQ ID NO: 256356 - DNA, 498 bp, Artificial Sequence
  derived and/or modified sequence
gtgctcctgggcctggcggttgagcccggggagctagtctttgcttgggtaaagaaagaggactttcctttttttttttccttttgagaaaattcagaaatttggaggcacagtagttaggattcaggccaaactggtaaatgacgaaggggcttcttccagagccaaggaggaagggttgtccggtgtgtttcacataacagcagataatcaccagaatgggagtgaatgacttgtggcaaattttggagcctgttaagcaacacatccccttgcgtaatcttggtgggaaaaccattgcagttgatctgagtctctgggtgtgtgaggcacagacagtcaaaaaaatgatgggcagcgtcatgaagccccacctcaggaacttattttttcgtatctcatatttaacacaaatggatgtaaaactggtatttgttatggaaggggaaccaccaaagctgaaagctgatgtcataagcaagaggaatcagtctcggt

SEQ ID NO: 256357 - DNA, 2158 bp, Artificial Sequence
  derived and/or modified sequence
gataaatattgtgagccacatgactatgaatactgctgtccttgtgagtggcaccgtacagaacatgataggcaactcagtgaagtagagaacaatattaagaagaaagcttgctgttgtgagggattcccattccatgaggttattcaagaattccttttaaacaaggataaattggtgaaggttatcaggtaccaaagacctgatttgttattgtttcagagatttactcttgaaaaaatggagtggcccaatcactatgcatgtgagaaattgctggtacttttgacccattatgacatgatagaaagaaagcttggtagcagaaactctaatcaactacagccaattcgaattgttaagactcgaatcagaaatggagttcattgttttgaaatagaatgggaaaagcctgaacattatgctatggaagataaacaacatggagaatttgctttattaacaattgaggaagaatcattgtttgaagcagcatatcctgagatcgttgctgtttaccaaaaacaaaagttagaaattaaagggaagaaacaaaaacgtattaagcctaaagaaaacaatttgccagaaccagatgaagtaatgagctttcagtcacacatgactttaaaacccacatgtgaaatctttcataagcagaattccaagttaaattcggggatttcccctgatcctacattaccacaggaatctatttctgcctcattgaatagcttgcttttacctaaaaatactccatgtttgaatgcacaagaacagttcatgtcttctctaagacctttggctatacagcaaattaaagctgtcagtaagtctctaatttcagaatctagtcaacccaatacctcatctcataatatatccgtgattgctgatctacacttgagcactattgactgggaaggtacttcttttagtaattctccagctattcaaaggaatactttttctcatgatttaaaatcagaagttgaatcagagctatcagccatccctgatggctttgaaaatatcccagaacaactgtcctgtgaatcagaaaggtacactgcaaacataaagaaagtgttggatgaggattctgatgggattagtcctgaagagcatctactttctggcattactgatttatgtcttcaggatttgcctttaaaggaacgaatatttacaaaattatcatatcctcaggataatctacaaccagatgtcaacctgaaaactttgtccatacttagtgtaaaagaatcttgtattgctaacagtggttctgattgtacatcacatctttcaaaggatcttccaggaattcccttgcaaaatgaatccagagactctaaaattctaaaaggagaccagctgcttcaagaagactataaagtcaatacttctgtcccttattctgtcagtaacacagtggtaaagacctgcaatgttagaccaccaaatactgctttagatcatagtagaaaagttgatatgcaaaccactcggaaaattttaatgaagaagagtgtttgccttgacagacattcctctgatgaacaaagtgccccagtgtttgggaaagctaagtacacaactcaaagaatgaagcacagttctcaaaagcataattcatcccatttcaaagaaagtggccataacgagtagccctaagatacatattaaagaaactgaacagtgtgtcagatcttatgaaacagctgaaaatgaagaaagctgtttcccagattcaacaaaaagttctctgagttctctacaatgtcataagaaagaaaacaactctggtacttgtttggatagccctcttcctttacgccagagattaaaactaagattccaaagcacttgaaatttaaaacacttaggtataacttaactattttagtactatcagcaatagcagagacagagggaaggtatctagttcatgtgtggtaaaaattttaatgttctctgtgtcatgaaacacttgccattttaatcaaagttgtaatttttaaaaagtcacctaaaactctggttttaaaagatcctctgtattgaaaacttctgataatgtatgtcattatgtccttactattccttaattgtagttttaaaatattggtatagtacttgacagagtaaatacttc

SEQ ID NO: 256358 - DNA, 2727 bp, Artificial Sequence
  derived and/or modified sequence
atgggcgtgaatgacctgtggcagatcctggagcctgtgaagcagcacatccccctgaggaacctgggcggcaagaccatcgctgtggacctgagcctgtgggtgtgtgaggcccagacagtgaagaagatgatgggctctgtgatgaagccccacctgaggaacctcttcttccgcatctcctacctgacccagatggatgtgaagctggtgtttgtgatggagggggagccccccaagctgaaggcagatgtgatcagcaagaggaaccagagccgctatggcagcagcggcaagtcctggagccagaagacaggccgcagccacttcaagtctgtgctgcgggagtgcctgcacatgctggagtgcctgggcatcccctgggtgcaggccgccggggaggccgaggccatgtgtgcctacctgaatgctgggggccacgtggatggctgcctgaccaatgatggagacaccttcctgtatggagcccagacagtgtacagaaacttcaccatgaacaccaaggacccccacgtggactgctacaccatgagcagcatcaagagcaagctgggcctggacagagatgccctggtgggcctggccatcctgctgggctgtgactacctgcccaagggcgtgcctggggtgggcaaggagcaggccctgaagctgatccagatcctgaagggccagagcctgctgcagcgcttcaaccgctggaatgagaccagctgcaacagcagcccccagctgctggtgaccaagaagctggcccactgcagcgtgtgcagccaccctggcagccccaaggaccatgaaagaaatggctgccgcctgtgcaagagtgacaagtactgtgagccccatgactatgagtactgctgcccctgtgagtggcacaggacagaacatgaccggcagctgtctgaggtggagaacaacatcaagaagaaggcctgctgctgtgagggcttccccttccatgaagtcatccaggagttcctgctgaacaaggacaagctggtgaaggtgatccgctaccagaggccagacctgctgctcttccagcgcttcaccctggagaagatggagtggcccaaccactacgcctgtgagaagctgctggtgctgctgacccactatgacatgattgaaaggaagctgggcagcaggaacagcaaccagctgcagcccatccgcatcgtgaagacccgcatcagaaatggagtgcactgctttgaaattgagtgggagaagccagagcactacgccatggaggacaagcagcacggggagtttgccctgctgaccatcgaggaggagagcctgtttgaagctgcctacccagagatcgtggccgtgtaccagaagcagaagctggagatcaagggcaagaagcagaagaggatcaagcccaaggagaacaacctgcctgagccagatgaggtgatgtccttccagagccacatgaccctgaagcccacctgtgagatcttccacaagcagaacagcaagctgaacagcggcatcagcccagaccccaccctgccccaggagagcatcagcgccagcctgaacagcctgctgctgcccaagaacaccccctgcctgaatgcccaggagcagttcatgagcagcctgcggcccctggccatccagcagatcaaggctgtgtccaagagcctcatcagcgagagcagccagcccaacaccagcagccacaacatctctgtgattgctgacctgcacctgagcaccatcgactgggagggcaccagcttcagcaacagccctgccatccagaggaacaccttcagccatgacctgaagtctgaggtggagagcgagctgagcgccatcccagatggctttgagaacatccctgagcagctgagctgtgagagcgagcgctacacagccaacatcaagaaggtgctggatgaagattctgatggcatcagccctgaggagcacctgctgagcggcatcacagacctgtgcctgcaggacctgcccctgaaggagcgcatcttcaccaagctgagctacccccaggacaacctgcagccagatgtgaacctgaagaccctgagcatcctgtctgtgaaggagagctgcatcgccaacagcggcagtgactgcaccagccacctgagcaaggacctgcccggcatccccctgcagaatgaaagccgggacagcaagatcctgaagggggaccagctgctgcaggaggactacaaggtgaacacctctgtgccctacagcgtgagcaacacagtggtgaagacctgcaatgtgcggccccccaacacagccctggaccacagcaggaaggtggacatgcagaccaccaggaagatcctgatgaagaagtctgtgtgcctggacagacacagcagtgatgagcagagcgcccctgtgtttgggaaggccaagtacaccacccagaggatgaagcacagcagccagaagcacaacagcagccacttcaaggagagcggccacaacaagctgagcagccccaagatccacatcaaggagacagagcagtgtgtgcgctcctatgaaacagcagaaaatgaggagagctgcttcccagacagcaccaagagcagcctgagcagcctgcagtgccacaagaaggagaacaacagcggcacctgcctggacagccccctgcccctgcggcagaggctgaagctgcgcttccagagcacctag

SEQ ID NO: 256359 - DNA, 381 bp, Artificial Sequence
  derived and/or modified sequence
atgggcgtgaatgacctgtggcagatcctggagcctgtgaagcagcacatccccctgaggaacctgggcggcaagaccatcgctgtggacctgagcctgtgggtgtgtgaggcccagacagtgaagaagatgatgggctctgtgatgaagccccacctgaggaacctcttcttccgcatctcctacctgacccagatggatgtgaagctggtgtttgtgatggagggggagccccccaagctgaaggcagatgtgatcagcaagaggaaccagagccgctatggcagcagcggcaagtcctggagccagaagacaggccgcagccacttcaagtctgtgctgcgggagtgcctgcacatgctggagtgcctgggcatctag

SEQ ID NO: 256360 - DNA, 282 bp, Artificial Sequence
  derived and/or modified sequence
atgggcgtgaatgacctgtggcagatcctggagcctgtgaagcagcacatccccctgaggaacctgggcggcaagaccatcgctgtggacctgagcctgtgggtgtgtgaggcccagacagtgaagaagatgatgggctctgtgatgaagccccacctgaggaacctcttcttccgcatctcctacctgacccagatggatgtgaagctggtgtttgtgatggagggggagccccccaagctgaaggcagatgtgatcagcaagaggaaccagagcaggtag

SEQ ID NO: 256361 - DNA, 1431 bp, Artificial Sequence
  derived and/or modified sequence
atggagtggcccaaccactacgcctgtgagaagctgctggtgctgctgacccactatgacatgattgaaaggaagctgggcagcaggaacagcaaccagctgcagcccatcagaattgtgaagacccgcatcagaaatggagtgcactgctttgaaattgagtgggagaagccagagcactacgccatggaggacaagcagcacggggagtttgccctgctgaccatcgaggaggagagcctgtttgaggccgcctacccagaaattgtggccgtgtaccagaagcagaagctggagatcaagggcaagaagcagaagaggatcaagcccaaggagaacaacctgcctgagccagatgaggtgatgtccttccagagccacatgaccctgaagcccacctgtgagatcttccacaagcagaacagcaagctgaacagcggcatcagcccagaccccaccctgccccaggagagcatcagcgccagcctgaacagcctgctgctgcccaagaacaccccctgcctgaatgcccaggagcagttcatgagcagcctgcggcccctggccatccagcagatcaaggctgtgtccaagagcctcatcagcgagagcagccagcccaacaccagcagccacaacatctctgtgattgctgacctgcacctgagcaccatcgactgggagggcaccagcttcagcaacagccctgccatccagaggaacaccttcagccatgacctgaagtctgaggtggagagcgagctgagcgccatcccagatggctttgagaacatccctgagcagctgagctgtgagagcgagcgctacacagccaacatcaagaaggtgctggatgaggacagtgatggcatcagccctgaggagcacctgctgagcggcatcacagacctgtgcctgcaggacctgcccctgaaggagcgcatcttcaccaagctgagctacccccaggacaacctgcagccagatgtgaacctgaagaccctgagcatcctgtctgtgaaggagagctgcatcgccaacagcggcagtgactgcaccagccacctgagcaaggacctgcccggcatccccctgcagaatgaaagccgggacagcaagatcctgaagggggaccagctgctgcaggaggactacaaggtgaacacctctgtgccctacagcgtgagcaacacagtggtgaagacctgcaatgtgcggccccccaacacagccctggaccacagcaggaaggtggacatgcagaccaccaggaagatcctgatgaagaagtctgtgtgcctggacagacacagcagtgatgagcagagcgcccctgtgtttgggaaggccaagtacaccacccagaggatgaagcacagcagccagaagcacaacagcagccacttcaaggagagcggccacaatgaatag

SEQ ID NO: 256362 - DNA, 2727 bp, Artificial Sequence
  derived and/or modified sequence
atgggcgtgaacgacctgtggcagatcctggagcccgtgaagcagcacattccgctgcgtaatcttgggggcaaaaccatagccgtggatctctcgctctgggtctgcgaagcccagaccgtgaagaaaatgatgggttccgtgatgaagccgcaccttagaaatctgttcttcagaatcagttacttaacacaaatggatgtgaagttagtcttcgtgatggaaggagagccacctaaattgaaggccgatgtcatctcaaaaaggaaccagtcccgatacggatccagtggtaaatcttggtctcaaaaaacaggccgctctcactttaaatccgttctccgtgagtgtctccacatgcttgagtgcctgggtattccctgggtccaagcggccggagaggcagaagctatgtgcgcttacctgaatgcaggagggcacgtggatggctgccttaccaacgacggagatacattcctctatggcgcccagaccgtgtacaggaactttacaatgaatacgaaggatccccacgttgactgctatactatgtcctcgattaagtccaaacttggtttggacagggatgctctcgttgggctagccattctcctggggtgcgattacttgcctaagggggtgcctggggtgggcaaggaacaggcacttaaactgatccagatcctcaagggacagtctctgctgcagcggtttaaccgctggaacgagactagctgtaactcgtcaccacaattattagtgacaaagaaactcgcacattgcagcgtgtgctcccaccctggatcccccaaagaccacgagaggaacggatgccgcctctgtaagtccgataagtattgcgaacctcacgattacgaatactgttgcccctgcgagtggcatcggaccgagcatgatagacagttatctgaggtggagaacaacatcaagaagaaggcttgctgttgtgagggcttcccgttccatgaggtcattcaggagtttctcctgaataaagacaagttggttaaggtgattcgctaccagcggccagacctcctattattccagcggttcaccttagaaaaaatggagtggcctaaccattatgcgtgtgagaagctgctggttctgctgactcactacgacatgattgaaaggaagctgggatctcgaaattctaaccagctgcagccaattaggatcgtcaaaacacgcattcggaacggagtccattgtttcgagattgaatgggaaaagcctgaacattacgccatggaggacaagcagcacggtgaattcgccctgctgaccattgaggaagagtccctgtttgaagccgcttatcctgaaattgtcgcggtataccagaaacagaaacttgagataaagggaaagaaacagaagagaattaaacctaaggaaaacaacctccccgaaccagacgaagtcatgtcttttcagagtcatatgacgctcaagccaacatgcgaaatcttccacaaacagaacagcaagcttaattctggcatctctcccgacccaactctgcctcaggagtccatatcggcctctctgaattccctcctgttgcccaagaacacgccctgtctgaacgcacaggaacaattcatgtcatcactgcgcccgcttgcaatacaacagatcaaggccgtgtcaaagtccctgataagcgagagctctcagcctaacacgtcaagtcacaatatctcagtcatcgccgacttgcacctgtcgactatcgactgggaggggaccagcttctcaaacagtcccgccatccagaggaatacgttctctcatgatttgaagagcgaggtagaatccgaattaagcgctatcccggatggatttgaaaacatccccgagcagttatcctgcgagtccgaacggtacaccgccaatatcaaaaaggtgctggacgaagacagcgatggtatctcccccgaggagcacctgttgtccggcatcacagacctatgtctccaggacctgcccttgaaggaaagaatcttcaccaagctgtcttacccccaagataacctgcaacctgatgtaaatctgaagactctgagcatcttgtcagtcaaggaatcctgcattgccaacagcggttcggattgtaccagtcatctttcaaaagatctgcctggaatcccgcttcagaatgaatcacgcgattctaaaatcctaaagggcgaccaactccttcaggaagattataaagtgaacactagcgttccctactcggtgagtaacacagtggtgaagacatgtaacgttcggccacctaatacagcgcttgaccactctagaaaggtggatatgcaaacaacccggaagatcctaatgaaaaagtccgtgtgcctggatagacatagtagcgatgagcagtccgcgccagtgttcggcaaagcaaagtatacaacccagcgtatgaagcactcatcacagaagcacaactccagccacttcaaggagagcggccacaataagctgtcttcgcctaagatacacatcaaggaaactgagcagtgcgtgcggagctacgagacagctgaaaatgaggagagttgtttccctgacagtactaagagcagcctgtccagtttgcagtgtcacaagaaggagaacaactccggaacatgtttggacagcccactgcccttgaggcagcgcctcaagctgaggtttcagagcacctag

SEQ ID NO: 256363 - DNA, 2727 bp, Artificial Sequence
  derived and/or modified sequence
atgggcgtgaacgacctgtggcagatcctggagcccgtgaagcagcatatcccactgcggaatctcggtggaaagacgatcgcagtcgatctctctctgtgggtgtgcgaagcgcaaacagtaaaaaaaatgatgggatcagtcatgaagcctcaccttcgaaacctgttttttaggatttcatacctgacccaaatggacgtcaagctggtcttcgtaatggaaggggagccgccaaagctcaaagcagatgttattagcaagcgcaaccagtccagatacggcagcagtggaaagtcctggagtcagaaaactggcagatcgcactttaaatccgtgctaagggaatgtctccatatgttagaatgcctggggatcccgtgggtgcaagcggctggcgaagccgaggccatgtgtgcttacctgaacgcaggtggacacgtcgatgggtgccttacaaatgatggcgacacctttctctacggtgcccagaccgtttaccgcaatttcaccatgaacaccaaagacccacatgtggattgctacaccatgtcttccatcaagtctaagttgggtctcgatagagatgctctggtgggactggccattttgttggggtgtgactatctccccaaaggcgtgccaggcgtaggaaaagagcaggctctgaagttaattcagatattaaaggggcaatccttgctccagaggttcaacaggtggaacgaaacatcatgcaacagctcaccccaactactcgtgaccaaaaagttggctcactgtagcgtctgtagtcatccaggcagcccaaaagaccacgaacggaacggatgtcgtctgtgcaagagtgacaaatactgcgagccccacgattacgagtattgttgcccatgtgagtggcacaggaccgaacatgacagacaactgagcgaggtggagaacaacatcaagaaaaaggcgtgctgttgcgagggcttccccttccatgaggttatacaggagtttctgctcaataaggataaactagtcaaagtgatcagataccagagacccgacttgctgctgttccagcgtttcacattggaaaaaatggagtggccgaaccactacgcctgcgagaagctccttgtgcttctgacacactatgatatgattgagaggaagctgggatcaaggaattctaatcagctacagccaatccgcatcgtgaagacgagaatccgtaatggtgtgcactgcttcgaaatcgaatgggagaagcccgagcattatgcaatggaggacaagcaacacggggagttcgcactgctgactatagaagaagagtctctgttcgaagccgcctatcctgaaatcgtcgccgtgtaccagaagcagaagcttgagatcaaaggtaaaaaacagaaacgtatcaagcccaaagagaataacttacctgagccggacgaggtcatgtcctttcagtcccacatgaccctcaaacctacctgtgagattttccacaaacagaacagcaagctgaattccggaatcagtccagatccaaccctccctcaggaatccatctctgcttccctcaatagcctattactcccaaaaaatactccctgtttgaatgcccaggagcagtttatgtcctcccttaggcccctggccatccagcagatcaaggccgttagcaagagtcttatcagtgagagctctcagcctaatacaagctcccacaatatcagtgtaatcgccgacctgcatctctctacaatagactgggagggcacgagcttctctaactcgccagctattcagaggaataccttttcacatgatctgaaaagtgaggtggagagcgaactgtcagcaatcccagacggcttcgagaatatcccagagcaacttagctgcgagtcggaacgatacacagctaacatcaaaaaggtcctcgatgaggattcagatggaatcagtccggaggaacatctgctgagcggtattaccgatttgtgcctacaagacctccctttgaaagagagaatctttactaaattatcataccctcaggacaatctccaaccagacgtgaatctcaagacattgtcaatcctctccgtcaaggagtcttgcatcgctaattccggtagcgattgtacttcacacctctccaaagacctgcccgggatcccgcttcaaaatgaaagtcgtgatagcaaaatcctaaagggcgatcagttgttacaggaagattacaaggtcaatacttcggtgccatacagcgtttctaatactgtggtcaaaacttgcaacgttcgccctcccaacactgcgcttgaccattcacgcaaagtagacatgcagaccacccgcaagattctgatgaagaaatccgtgtgcctggaccgccactcttctgacgagcaaagcgcccctgtctttgggaaggctaaatacacaacccagcgaatgaagcatagtagtcagaaacacaactcttcacactttaaggaatcgggtcacaataagttgtcatccccaaaaatccatatcaaagagacagagcaatgtgtgcgatcatacgagactgcggagaatgaggagagctgcttcccagattcaaccaagtccagcctgtcgtctcttcaatgtcacaaaaaagaaaataacagtgggacatgtctggactccccccttccgctccggcagcggctgaagctgcggttccagagcacttag

SEQ ID NO: 256364 - DNA, 381 bp, Artificial Sequence
  derived and/or modified sequence
atgggcgtgaacgacctgtggcagatcctggagcccgtgaagcagcacattcctcttcgcaatctggggggcaagactatcgccgtggatctctcactgtgggtctgtgaggcccaaaccgtgaagaagatgatgggcagcgttatgaagccccatctgagaaacttattttttcgcattagctatctaacccaaatggatgtgaaactggtattcgttatggaaggagagccaccaaaacttaaagccgatgtgatcagcaaacgaaatcagagtcgctacgggagctctggaaagtcatggtcccagaaaaccggccggtcccatttcaagtcagtcttgagggagtgcttgcacatgctcgagtgcctcggcatctag

SEQ ID NO: 256365 - DNA, 282 bp, Artificial Sequence
  derived and/or modified sequence
atgggcgtgaacgacctgtggcagatcctggagcccgtgaagcagcacatccctctccggaacctcggcggaaagaccatcgccgttgatctcagtctctgggtctgcgaggcccaaacggtgaagaagatgatgggctccgttatgaagccccacttgcggaatctcttctttagaattagttacttgactcaaatggacgtcaaactggtgtttgttatggaaggggagcctcctaagctgaaagctgacgtgatttctaagcggaatcagtcaaggtag

SEQ ID NO: 256366 - DNA, 1431 bp, Artificial Sequence
  derived and/or modified sequence
atggagtggcccaaccactacgcctgcgagaagctgctggtgctgctgacccattatgacatgatcgagcggaagttggggtcccgaaactctaaccagttacagcccattcgcatcgtcaagacacgaattcgaaatggggtccactgcttcgagattgaatgggagaaacccgagcactatgctatggaggataagcagcacggcgaatttgccttgctgacaatagaggaggagtccctgttcgaggctgcctatcccgagattgtggctgtttaccagaagcagaagttggagataaaggggaaaaagcagaagaggattaagcccaaagaaaacaaccttccagagcccgatgaggtgatgtcctttcagtctcacatgacactcaaaccaacctgcgagatctttcacaagcagaattctaaattgaactcaggtatttcacccgacccgacacttccccaggaatcaattagcgcaagtctcaattctttgcttcttcctaaaaataccccttgtctgaatgcgcaggagcagttcatgtcttcccttcggcctcttgcgattcagcagatcaaagccgtctcgaaatctctgatcagcgaatctagtcagcctaatacttcttcccataatatatctgttatcgctgatctgcatctcagcacaattgactgggaaggcacctctttctctaatagcccagcaatccagcggaacaccttcagccatgatctcaagtccgaggtcgaatctgagttatcagccattcccgatggtttcgagaatattccagagcaactgtcctgtgagtccgagagatacacagctaatattaagaaggtgctggatgaggactccgacggtatctcacctgaggagcacctgctctctgggatcacagatttgtgcctgcaggacctgcctctgaaagagcgaatctttacaaaactgagctatccacaagacaatttacaacctgacgttaatctgaagacactgagtatcctttctgtgaaagaatcatgcatcgcgaacagcggaagcgattgcacttcacacctctcaaaagacctgcctggcatcccactgcagaacgagtccagagatagtaagattctcaaaggtgaccagcttctgcaagaagattataaagtgaataccagcgtgccgtactccgtgagtaacactgtcgtgaaaacatgcaatgtgcgcccacccaataccgccctcgaccatagccggaaggtcgacatgcagaccactagaaagattctcatgaagaagtccgtgtgtctggaccggcattcatccgatgaacagagcgctcccgtgtttggtaaagcaaagtatacaactcagcgtatgaaacactcttcacaaaagcataattcatctcattttaaggagtcggggcacaacgaatag

SEQ ID NO: 256367 - DNA, 2727 bp, Artificial Sequence
  derived and/or modified sequence
atgggagtcaacgatctgtggcagattctcgaaccggtcaaacaacacatccccttgagaaacctgggcggaaagactatagccgtggatctgagtctgtgggtgtgcgaggcccaaacagtgaagaaaatgatgggcagcgtgatgaagccgcatctgcggaacctcttttttaggatcagctacctgacccagatggatgtaaaactagttttcgttatggaaggcgagccaccaaagcttaaagcggacgtcataagtaaacgtaatcagtcaagatatggctcatcaggtaaatcatggagccaaaaaaccggcaggagccattttaaaagcgtgttgagggagtgtttgcacatgctcgagtgtctggggattccgtgggtgcaggctgctggggaggcggaagcaatgtgtgcttacctcaatgctggaggacacgttgatggatgcctcacaaatgatggagatacgtttctgtatggagcccagaccgtgtatcggaatttcaccatgaacacaaaggacccacacgtagattgttacactatgagttccatcaaatctaagctgggactagaccgggacgctctggtcggactggcaatactgttggggtgcgactatctgccgaaaggagtgcctggagtcggaaaggagcaggccctgaagcttattcaaattctcaagggccaatccttgcttcagcggttcaatcgatggaacgagacttcttgcaacagcagcccccagctcctcgtaactaaaaaactcgcacactgtagcgtgtgctctcatcctgggagccctaaagatcatgaaagaaacggttgccgcctgtgtaaaagcgataaatactgtgaacctcatgactatgagtattgctgtccctgcgagtggcacaggaccgaacacgatcggcagttgagtgaggtggagaacaacattaagaagaaagcgtgctgctgcgagggattcccattccatgaagtcatccaagagttcctgctgaataaggataagctcgtaaaagtgattagataccagagaccagacctgttgctgtttcaacggttcaccttagagaagatggagtggccaaatcattatgcctgtgagaaacttctggtccttcttacacactatgatatgattgagcgaaagctcgggagtcggaattctaatcagctgcaacctattcggattgtcaagacgcggatacgtaacggagtgcactgctttgaaatagaatgggagaaaccagaacactatgccatggaggataaacagcatggagagtttgcccttctgactatcgaggaggagagtttgttcgaggcggcttaccccgaaattgtggccgtctaccagaagcagaagctcgagattaaaggcaaaaagcagaagcgcatcaagcccaaagagaataatctgcccgaaccagacgaggtgatgagctttcagagtcatatgacactcaagccaacctgcgagatttttcacaaacagaatagcaagctgaattcaggcattagtccggacccaaccctgccacaggaaagcatctccgcaagtttgaacagcctgttactcccaaaaaacacaccttgcctgaacgcccaggagcagttcatgtcatccctgcgcccactcgcaattcagcagatcaaggccgtgtccaagtccttgatctccgagtcgagccaacccaacacttcctcacacaacatttctgtgattgctgatctgcacctcagtacaatcgactgggaaggtacatcttttagcaactcccccgcaatccagcgcaataccttcagccacgatctgaagagcgaagtggaatcagaactaagtgccattccagacggcttcgagaacattcctgagcagctgtcatgcgagtcagagcggtatacagctaatatcaagaaggtactcgatgaagactcggacggaatctcacctgaggagcacctcctctcgggaataacagatctgtgcctgcaggacctacctctgaaggagcgcatattcactaagttgtcttatccacaggataacctgcaaccagatgtgaacctgaagaccctctcgatactgtctgtgaaggagtcatgcatagcaaattcaggctcagattgcacgagccacctgagcaaagatctcccaggtataccgctgcaaaacgaatctcgggattctaagattctgaagggagaccaacttctgcaggaagactacaaagttaacacaagcgtaccctactctgtgagcaacacagtggtcaagacctgtaatgtgcggcctcccaatacagccttggatcattcccggaaggttgacatgcagaccacgaggaagattctgatgaaaaagtccgtctgcctcgacagacacagctccgatgaacagagtgccccagttttcgggaaggctaaatatactacccaacgaatgaaacactcttcccaaaagcacaattcaagtcactttaaagaaagcgggcacaacaaacttagcagcccaaagattcacatcaaagagactgagcagtgtgttagatcttacgaaaccgccgagaacgaagagtcatgttttcctgactctactaaaagtagccttagctcgctgcagtgtcataagaaggagaataattcaggtacatgcctggattcccctttaccactgcggcagcgcctgaagctacgctttcagagtacttag

SEQ ID NO: 256368 - DNA, 2727 bp, Artificial Sequence
  derived and/or modified sequence
atgggagtgaacgatttgtggcagatcctggaaccggttaagcagcacatcccgctgcggaacctggggggtaaaaccatcgccgtcgacctgtccctctgggtgtgtgaagcgcagacagtgaagaaaatgatgggcagtgtgatgaaaccccatctgaggaatctgtttttccgcatctcctatctaacccagatggatgtcaagttggtattcgtcatggaaggcgagcctcctaaactgaaggctgacgtgatcagcaagaggaatcagagtagatacggatctagcggaaagtcatggtcccagaaaactggtcgctctcatttcaagtcagtgctgagggagtgtctacacatgctagaatgtctcggcatcccttgggtacaagccgctggcgaagccgaggccatgtgcgcgtacctcaatgcaggcggtcacgtggacgggtgcctgacaaatgacggagacacctttttgtacggagcgcaaaccgtatatcggaacttcactatgaacaccaaagaccctcacgtggactgctatacgatgagcagcattaaatcgaagcttggtctggacagggatgccctggttggcctcgctatcctgctgggctgcgactaccttcctaaaggcgttcctggcgtcggaaaagagcaggcactgaagttgatccagatactgaagggccagtccctgcttcaacgcttcaaccgctggaacgaaacatcatgcaatagttcgccccagttgttggtgactaaaaaactcgctcattgttccgtgtgcagccatcccggatcccctaaagaccatgaaagaaacggctgtagactctgtaaaagcgataagtattgcgagcctcatgactacgagtactgttgtccctgtgaatggcataggactgagcatgataggcagctgtctgaggtcgaaaacaacataaagaaaaaagcctgttgctgcgagggattcccattccacgaggttattcaagagtttttgttgaataaagacaaacttgtaaaggtgatccggtaccagcgacccgacctgctcctgtttcaacggttcaccctggaaaaaatggagtggcctaaccactatgcatgcgagaagctcctggtgcttcttactcactatgacatgatcgaaagaaaattaggctctcgaaattccaaccaattacagccaataagaattgtaaaaactcggattaggaacggagttcactgttttgagattgaatgggagaagcccgaacattatgccatggaagataaacagcatggcgagttcgcactactgacaatagaggaagagtcccttttcgaagccgcttacccagagattgtagccgtgtatcagaagcagaaactggagataaagggaaaaaaacaaaaaaggatcaaaccaaaggagaacaacctaccagagcctgatgaagtcatgagcttccagtcccacatgactttaaagcccacgtgcgagattttccacaagcaaaatagcaaacttaatagtggcattagccctgatcccaccctacctcaggaatcgattagcgcctcgctgaactctctgctgctgccaaagaacactccttgcctgaacgcccaggaacagtttatgtcctcactcaggccactcgccattcagcagatcaaggctgtctccaagagtctcatatcagaaagttctcagcctaatacatcctcccacaacatctcggtgattgcagatctgcatctctctaccatcgactgggagggaactagcttctcaaatagcccagcaatccagcgaaacactttctctcacgacttgaaatcggaagttgagtccgagctgtccgccattcctgacggcttcgaaaatatccccgaacagttatcttgtgagtccgaaagatacacagccaatatcaaaaaagtgctggatgaagactctgacggtatttcgcccgaagaacacctattatccgggataaccgacctctgtctccaggatctgcccctcaaggaacgaattttcacaaagttatcatatccacaggacaatttacagccagatgtaaacctgaagacattgagcatcctctcggtaaaagaatcgtgtatagcaaactccggctctgactgcactagccatctttccaaggatcttcctgggattccattgcagaacgaatcaagggatagcaagatccttaagggcgaccagcttctgcaggaagactacaaagtgaacacaagcgtcccttattctgtctctaacactgttgtcaagacttgtaatgtaaggccccctaatacggctctcgaccattctcgcaaagtcgacatgcagacgacccgaaagattctgatgaagaaatcagtgtgcctggataggcatagttctgacgagcagagtgctcctgtgttcggaaaggctaaatataccacacagcgaatgaaacactcaagccagaagcataatagctctcacttcaaagagtctggtcacaacaaactgagcagtcctaagatacacattaaggaaactgaacagtgcgtgagatcctatgagaccgcagagaatgaagaatcgtgtttccctgattccactaagtcctcactgtcaagcctgcagtgccacaaaaaagaaaataacagtggcacatgcctggacagccccctccctctgcggcagagattgaagctccgatttcagagcacctag

SEQ ID NO: 256369 - DNA, 381 bp, Artificial Sequence
  derived and/or modified sequence
atgggagtcaatgacctctggcagattctcgagccagtgaagcagcacattcctctacggaatttggggggaaaaaccatcgcggttgacttatctctgtgggtgtgcgaagcccagacagttaaaaagatgatgggttcggtgatgaaaccacaccttcgcaacttgttctttagaattagctacctgactcagatggacgtaaaactcgttttcgtaatggagggtgaaccacccaaattgaaagccgacgtgatttccaaacgcaatcaatcccggtatgggagcagtggtaagtcttggtcgcagaagacaggtagatcccacttcaagtcagtattacgggaatgtctgcacatgctggagtgcctgggcatatag

SEQ ID NO: 256370 - DNA, 282 bp, Artificial Sequence
  derived and/or modified sequence
atgggggtgaacgatctctggcaaatcctggagcctgtgaaacagcatatacctttacggaacctggggggaaaaacaatagcagttgacctgtcactgtgggtttgcgaagcacagactgtgaagaaaatgatgggaagcgtcatgaaaccgcatcttagaaacctattcttcagaatcagctatcttacccagatggatgtgaaacttgtgtttgtgatggaaggagagcctcccaagctgaaggccgatgttatttcgaagcgtaatcagagcagatag

SEQ ID NO: 256371 - DNA, 1431 bp, Artificial Sequence
  derived and/or modified sequence
atggagtggcctaatcactatgcatgcgagaagcttttggttttgctgactcactatgacatgattgagcggaaactaggatcgagaaacagcaaccagctccagcctatccgtatcgtgaaaactcggatcaggaacggggtacactgctttgagatcgagtgggaaaagcctgagcactacgccatggaggataaacagcacggcgaattcgcactgctaacaatcgaggaagagtcactctttgaagcagcctatccagaaatcgtggcagtgtatcagaaacagaagctggagatcaaaggaaagaagcagaaacgaataaagccgaaagaaaacaatctacccgagcccgatgaagtcatgtctttccaatcacacatgaccctgaaacccacctgcgagatattccacaaacaaaacagcaagttgaattccgggatatccccagatccaacccttccccaagaatccatctcagcttccctgaacagtcttttgctcccaaagaacaccccgtgtctcaatgcgcaagaacagttcatgagttctttacggccactcgcaatccagcagattaaggctgtctccaagtctctcatttccgagtctagccagcctaacaccagtagtcataatatatccgtgatagcagacttgcatctgagcaccattgactgggaaggtacttcgttttctaacagccctgcaatacagcgcaacacgttcagccacgacctcaaatccgaggtggagtctgaactttccgccatccctgacggctttgaaaacattccagaacagctgtcctgcgagagtgagcgctataccgccaatattaaaaaagtgctagatgaagactctgacggcatcagtccagaggagcatctgctgtccggaatcaccgatctttgtcttcaggatctgccactcaaggagcgcatcttcaccaagttatcctatccccaggataacctccaacctgacgttaatctcaaaaccctcagtatactgagtgtgaaggagtcatgtatcgcgaattcaggcagcgattgtacttcccacctgagcaaagatcttccgggtattccactgcagaacgagagtcgggatagcaaaatccttaaaggtgaccagctcctccaggaggattacaaggtcaataccagtgtaccatacagtgttagcaatacagtagtgaagacatgtaatgttaggccccctaatacagcccttgaccatagccgcaaggttgatatgcagaccacacgaaagattctgatgaagaagtctgtctgtttggatcgacacagctccgacgaacagtctgcccctgtctttggcaaggctaaatacactacgcagagaatgaaacacagctcccaaaaacacaacagcagccatttcaaagagtctgggcacaatgaatag

SEQ ID NO: 256372 - DNA, 2727 bp, Artificial Sequence
  derived and/or modified sequence
atgggcgtgaacgacctgtggcagatcctggagcccgtgaagcagcacatccccctgagaaacctgggcggcaagaccatcgccgtggacctgagcctgtgggtgtgcgaggcccagaccgtgaagaagatgatgggcagcgtgatgaagccccacctgagaaacctgttcttcagaatcagctacctgacccagatggacgtgaagctggtgttcgtgatggagggcgagccccccaagctgaaggccgacgtgatcagcaagagaaaccagagcagatacggcagcagcggcaagagctggagccagaagaccggcagaagccacttcaagagcgtgctgagagagtgcctgcacatgctggagtgcctgggcatcccctgggtgcaggccgccggcgaggccgaggccatgtgcgcctacctgaacgccggcggccacgtggacggctgcctgaccaacgacggcgacaccttcctgtacggcgcccagaccgtgtacagaaacttcaccatgaacaccaaggacccccacgtggactgctacaccatgagcagcatcaagagcaagctgggcctggacagagacgccctggtgggcctggccatcctgctgggctgcgactacctgcccaagggcgtgcccggcgtgggcaaggagcaggccctgaagctgatccagatcctgaagggccagagcctgctgcagagattcaacagatggaacgagaccagctgcaacagcagcccccagctgctggtgaccaagaagctggcccactgcagcgtgtgcagccaccccggcagccccaaggaccacgagagaaacggctgcagactgtgcaagagcgacaagtactgcgagccccacgactacgagtactgctgcccctgcgagtggcacagaaccgagcacgacagacagctgagcgaggtggagaacaacatcaagaagaaggcctgctgctgcgagggcttccccttccacgaggtgatccaggagttcctgctgaacaaggacaagctggtgaaggtgatcagataccagagacccgacctgctgctgttccagagattcaccctggagaagatggagtggcccaaccactacgcctgcgagaagctgctggtgctgctgacccactacgacatgatcgagagaaagctgggcagcagaaacagcaaccagctgcagcccatcagaatcgtgaagaccagaatcagaaacggcgtgcactgcttcgagatcgagtgggagaagcccgagcactacgccatggaggacaagcagcacggcgagttcgccctgctgaccatcgaggaggagagcctgttcgaggccgcctaccccgagatcgtggccgtgtaccagaagcagaagctggagatcaagggcaagaagcagaagagaatcaagcccaaggagaacaacctgcccgagcccgacgaggtgatgagcttccagagccacatgaccctgaagcccacctgcgagatcttccacaagcagaacagcaagctgaacagcggcatcagccccgaccccaccctgccccaggagagcatcagcgccagcctgaacagcctgctgctgcccaagaacaccccctgcctgaacgcccaggagcagttcatgagcagcctgagacccctggccatccagcagatcaaggccgtgagcaagagcctgatcagcgagagcagccagcccaacaccagcagccacaacatcagcgtgatcgccgacctgcacctgagcaccatcgactgggagggcaccagcttcagcaacagccccgccatccagagaaacaccttcagccacgacctgaagagcgaggtggagagcgagctgagcgccatccccgacggcttcgagaacatccccgagcagctgagctgcgagagcgagagatacaccgccaacatcaagaaggtgctggacgaggacagcgacggcatcagccccgaggagcacctgctgagcggcatcaccgacctgtgcctgcaggacctgcccctgaaggagagaatcttcaccaagctgagctacccccaggacaacctgcagcccgacgtgaacctgaagaccctgagcatcctgagcgtgaaggagagctgcatcgccaacagcggcagcgactgcaccagccacctgagcaaggacctgcccggcatccccctgcagaacgagagcagagacagcaagatcctgaagggcgaccagctgctgcaggaggactacaaggtgaacaccagcgtgccctacagcgtgagcaacaccgtggtgaagacctgcaacgtgagaccccccaacaccgccctggaccacagcagaaaggtggacatgcagaccaccagaaagatcctgatgaagaagagcgtgtgcctggacagacacagcagcgacgagcagagcgcccccgtgttcggcaaggccaagtacaccacccagagaatgaagcacagcagccagaagcacaacagcagccacttcaaggagagcggccacaacaagctgagcagccccaagatccacatcaaggagaccgagcagtgcgtgagaagctacgagaccgccgagaacgaggagagctgcttccccgacagcaccaagagcagcctgagcagcctgcagtgccacaagaaggagaacaacagcggcacctgcctggacagccccctgcccctgagacagagactgaagctgagattccagagcacctag

SEQ ID NO: 256373 - DNA, 381 bp, Artificial Sequence
  derived and/or modified sequence
atgggcgtgaacgacctgtggcagatcctggagcccgtgaagcagcacatccccctgagaaacctgggcggcaagaccatcgccgtggacctgagcctgtgggtgtgcgaggcccagaccgtgaagaagatgatgggcagcgtgatgaagccccacctgagaaacctgttcttcagaatcagctacctgacccagatggacgtgaagctggtgttcgtgatggagggcgagccccccaagctgaaggccgacgtgatcagcaagagaaaccagagcagatacggcagcagcggcaagagctggagccagaagaccggcagaagccacttcaagagcgtgctgagagagtgcctgcacatgctggagtgcctgggcatctag

SEQ ID NO: 256374 - DNA, 282 bp, Artificial Sequence
  derived and/or modified sequence
atgggcgtgaacgacctgtggcagatcctggagcccgtgaagcagcacatccccctgagaaacctgggcggcaagaccatcgccgtggacctgagcctgtgggtgtgcgaggcccagaccgtgaagaagatgatgggcagcgtgatgaagccccacctgagaaacctgttcttcagaatcagctacctgacccagatggacgtgaagctggtgttcgtgatggagggcgagccccccaagctgaaggccgacgtgatcagcaagagaaaccagagcagatag

SEQ ID NO: 256375 - DNA, 1431 bp, Artificial Sequence
  derived and/or modified sequence
atggagtggcccaaccactacgcctgcgagaagctgctggtgctgctgacccactacgacatgatcgagagaaagctgggcagcagaaacagcaaccagctgcagcccatcagaatcgtgaagaccagaatcagaaacggcgtgcactgcttcgagatcgagtgggagaagcccgagcactacgccatggaggacaagcagcacggcgagttcgccctgctgaccatcgaggaggagagcctgttcgaggccgcctaccccgagatcgtggccgtgtaccagaagcagaagctggagatcaagggcaagaagcagaagagaatcaagcccaaggagaacaacctgcccgagcccgacgaggtgatgagcttccagagccacatgaccctgaagcccacctgcgagatcttccacaagcagaacagcaagctgaacagcggcatcagccccgaccccaccctgccccaggagagcatcagcgccagcctgaacagcctgctgctgcccaagaacaccccctgcctgaacgcccaggagcagttcatgagcagcctgagacccctggccatccagcagatcaaggccgtgagcaagagcctgatcagcgagagcagccagcccaacaccagcagccacaacatcagcgtgatcgccgacctgcacctgagcaccatcgactgggagggcaccagcttcagcaacagccccgccatccagagaaacaccttcagccacgacctgaagagcgaggtggagagcgagctgagcgccatccccgacggcttcgagaacatccccgagcagctgagctgcgagagcgagagatacaccgccaacatcaagaaggtgctggacgaggacagcgacggcatcagccccgaggagcacctgctgagcggcatcaccgacctgtgcctgcaggacctgcccctgaaggagagaatcttcaccaagctgagctacccccaggacaacctgcagcccgacgtgaacctgaagaccctgagcatcctgagcgtgaaggagagctgcatcgccaacagcggcagcgactgcaccagccacctgagcaaggacctgcccggcatccccctgcagaacgagagcagagacagcaagatcctgaagggcgaccagctgctgcaggaggactacaaggtgaacaccagcgtgccctacagcgtgagcaacaccgtggtgaagacctgcaacgtgagaccccccaacaccgccctggaccacagcagaaaggtggacatgcagaccaccagaaagatcctgatgaagaagagcgtgtgcctggacagacacagcagcgacgagcagagcgcccccgtgttcggcaaggccaagtacaccacccagagaatgaagcacagcagccagaagcacaacagcagccacttcaaggagagcggccacaacgagtag

SEQ ID NO: 256376 - protein, 397 aa, Artificial Sequence
  derived and/or modified sequence
MAHAPEPDPAACDLGDERPKWDNKAQYLLSCTGFAVGLGNIWRFPYLCQTYGGGAFLIPYVIALVFEGIPIFHVELAIGQRLRKGSVGVWTAISPYLSGVGLGCVTLSFLISLYYNTIVAWVLWYLLNSFQHPLPWSSCPPDLNRTGFVEECQGSSAVSYFWYRQTLNITADINDSGSIQWWLLICLAASWAVVYMCVIRGIETTGKVIYFTALFPYLVLTIFLIRGLTLPGATKGLIYLFTPNNPRVWLDAATQIFFSLSLAFGGHIAFASYNSPRNDCQKDAVVIALVNRMTSLYASIAVFSVLGASGPGLAFVVFTETDLHMPGAPVWAMLFFGMLFTLGLSTMFGTVEAVITPLLDSGNYWLEIFDNFAASPNLLMLAFLEVVGVVYVYGMKR

SEQ ID NO: 256377 - protein, 628 aa, Artificial Sequence
  derived and/or modified sequence
MAHAPEPDPAACDLGDERPKWDNKAQYLLSCTGFAVGLGNIWRFPYLCQTYGGGAFLIPYVIALVFEGIPIFHVELAIGQRLRKGSVGVWTAISPYLSGVGLGCVTLSFLISLYYNTIVAWVLWYLLNSFQHPLPWSSCPPDLNRTGFVEECQGSSAVSYFWYRQTLNITADINDSGSIQWWLLICLAASWAVVYMCVIRGIETTGKVIYFTALFPYLVLTIFLIRGLTLPGATKGLIYLFTPNMHILQNPRVWLDAATQIFFSLSLAFGGHIAFASYNSPRNDCQKDAVVIALVNRMTSLYASIAVFSVLGFKATNDYEHCLDRNILSLINDFDFPEQSISRDDYPAVLMHLNATWPKRVAQLPLKACLLEDFLDKSASGPGLAFVVFTETDLHMPGAPVWAMLFFGMLFTLGLSTMFGTVEAVITPLLDVGVLPRWVPKEALTGLVCLVCFLSATCFTLQSGNYWLEIFDNFAASPNLLMLAFLEVVGVVYVYGMKRFCDDIAWMTGRRPSPYWRLTWRVVSPLLLTIFVAYIILLFWKPLRYKAWNPKYELFPSRQEKLYPGWARAACVLLSLLPVLWVPVAALAQLLTRRRRTWRDRDARPDTDMRPDTDTRPDTDMRPDTDMR

SEQ ID NO: 256378 - DNA, 1194 bp, Artificial Sequence
  derived and/or modified sequence
atggcccacgcccccgagcccgaccccgccgcctgcgacctgggcgacgagagacccaagtgggacaacaaggcccagtacctgctgagctgcaccggcttcgccgtgggcctgggcaacatctggagattcccctacctgtgccagacctacggcggcggcgccttcctgatcccctacgtgatcgccctggtgttcgagggcatccccatcttccacgtggagctggccatcggccagagactgagaaagggcagcgtgggcgtgtggaccgccatcagcccctacctgagcggcgtgggcctgggctgcgtgaccctgagcttcctgatcagcctgtactacaacaccatcgtggcctgggtgctgtggtacctgctgaacagcttccagcaccccctgccctggagcagctgcccccccgacctgaacagaaccggcttcgtggaggagtgccagggcagcagcgccgtgagctacttctggtacagacagaccctgaacatcaccgccgacatcaacgacagcggcagcatccagtggtggctgctgatctgcctggccgccagctgggccgtggtgtacatgtgcgtgatcagaggcatcgagaccaccggcaaggtgatctacttcaccgccctgttcccctacctggtgctgaccatcttcctgatcagaggcctgaccctgcccggcgccaccaagggcctgatctacctgttcacccccaacaaccccagagtgtggctggacgccgccacccagatcttcttcagcctgagcctggccttcggcggccacatcgccttcgccagctacaacagccccagaaacgactgccagaaggacgccgtggtgatcgccctggtgaacagaatgaccagcctgtacgccagcatcgccgtgttcagcgtgctgggcgccagcggccccggcctggccttcgtggtgttcaccgagaccgacctgcacatgcccggcgcccccgtgtgggccatgctgttcttcggcatgctgttcaccctgggcctgagcaccatgttcggcaccgtggaggccgtgatcacccccctgctggacagcggcaactactggctggagatcttcgacaacttcgccgccagccccaacctgctgatgctggccttcctggaggtggtgggcgtggtgtacgtgtacggcatgaagagatag

SEQ ID NO: 256379 - DNA, 1887 bp, Artificial Sequence
  derived and/or modified sequence
atggcccacgcccccgagcccgaccccgccgcctgcgacctgggcgacgagagacccaagtgggacaacaaggcccagtacctgctgagctgcaccggcttcgccgtgggcctgggcaacatctggagattcccctacctgtgccagacctacggcggcggcgccttcctgatcccctacgtgatcgccctggtgttcgagggcatccccatcttccacgtggagctggccatcggccagagactgagaaagggcagcgtgggcgtgtggaccgccatcagcccctacctgagcggcgtgggcctgggctgcgtgaccctgagcttcctgatcagcctgtactacaacaccatcgtggcctgggtgctgtggtacctgctgaacagcttccagcaccccctgccctggagcagctgcccccccgacctgaacagaaccggcttcgtggaggagtgccagggcagcagcgccgtgagctacttctggtacagacagaccctgaacatcaccgccgacatcaacgacagcggcagcatccagtggtggctgctgatctgcctggccgccagctgggccgtggtgtacatgtgcgtgatcagaggcatcgagaccaccggcaaggtgatctacttcaccgccctgttcccctacctggtgctgaccatcttcctgatcagaggcctgaccctgcccggcgccaccaagggcctgatctacctgttcacccccaacatgcacatcctgcagaaccccagagtgtggctggacgccgccacccagatcttcttcagcctgagcctggccttcggcggccacatcgccttcgccagctacaacagccccagaaacgactgccagaaggacgccgtggtgatcgccctggtgaacagaatgaccagcctgtacgccagcatcgccgtgttcagcgtgctgggcttcaaggccaccaacgactacgagcactgcctggacagaaacatcctgagcctgatcaacgacttcgacttccccgagcagagcatcagcagagacgactaccccgccgtgctgatgcacctgaacgccacctggcccaagagagtggcccagctgcccctgaaggcctgcctgctggaggacttcctggacaagagcgccagcggccccggcctggccttcgtggtgttcaccgagaccgacctgcacatgcccggcgcccccgtgtgggccatgctgttcttcggcatgctgttcaccctgggcctgagcaccatgttcggcaccgtggaggccgtgatcacccccctgctggacgtgggcgtgctgcccagatgggtgcccaaggaggccctgaccggcctggtgtgcctggtgtgcttcctgagcgccacctgcttcaccctgcagagcggcaactactggctggagatcttcgacaacttcgccgccagccccaacctgctgatgctggccttcctggaggtggtgggcgtggtgtacgtgtacggcatgaagagattctgcgacgacatcgcctggatgaccggcagaagacccagcccctactggagactgacctggagagtggtgagccccctgctgctgaccatcttcgtggcctacatcatcctgctgttctggaagcccctgagatacaaggcctggaaccccaagtacgagctgttccccagcagacaggagaagctgtaccccggctgggccagagccgcctgcgtgctgctgagcctgctgcccgtgctgtgggtgcccgtggccgccctggcccagctgctgaccagaagaagaagaacctggagagacagagacgccagacccgacaccgacatgagacccgacaccgacaccagacccgacaccgacatgagacccgacaccgacatgagatag

SEQ ID NO: 256380 - DNA, 1194 bp, Artificial Sequence
  derived and/or modified sequence
atggcccacgctcccgagcctgacccagccgcatgcgacctgggagatgaaagaccaaaatgggataataaggcccagtaccttctgagttgtacagggtttgcggtcggccttggaaacatatggcgcttcccttacctttgccaaacatacggaggaggagctttcctgatcccctacgtaatcgctctggtttttgagggcatacccattttccacgtcgaactggccatcggacagaggctcagaaaggggtcggtgggcgtgtggactgcgatatcaccttatctttcgggcgtgggattgggatgcgtcacgctatcctttctgatttctttgtactacaacacaatcgtggcctgggtcctatggtacctgttgaattcttttcagcaccctctgccctggtcatcctgtcctccagatctcaacaggaccggtttcgtcgaagagtgtcagggatccagcgccgttagctacttttggtacaggcagaccttaaacattacagctgacatcaatgactctggttccatccagtggtggctgctaatatgccttgcagcttcctgggctgttgtttatatgtgcgtgattcggggaattgagacaaccggaaaggtgatttacttcaccgcattgtttccatatctggtgctgactatattcctgatccgagggcttacgctcccaggcgctacgaaaggtctgatatatctgttcaccccaaacaatccccgagtctggttagatgccgctacccagatctttttctccttatcgctggcctttggcgggcatatcgcttttgccagctataattcacccagaaacgattgccagaaagatgctgtcgtcatcgcactggtgaaccgtatgaccagtttgtatgctagtatcgcggtgttttcagttctcggcgcaagtgggcctggcctggcattcgttgtattcacggaaactgaccttcacatgccgggcgctcccgtgtgggccatgctgttcttcggtatgctcttcacgttggggctgagcactatgtttgggacggtcgaggctgtgatcacccccctcctggactctgggaactactggttagaaatctttgacaatttcgctgcttccccgaaccttttgatgctcgcattccttgaggtggttggggtcgtgtacgtatacggcatgaagcgttag

SEQ ID NO: 256381 - DNA, 1887 bp, Artificial Sequence
  derived and/or modified sequence
atggcccatgcccctgagcctgaccccgcagcctgcgatttgggtgacgagcggcctaaatgggataataaggctcaatacctgctgtcttgcactggcttcgccgtagggttaggcaacatttggagattcccatatctgtgccaaacctacggcggcggcgcatttctgattccctacgtgatagcacttgtatttgaaggcatccctatatttcacgtcgagttggcaatcggccaaagattgcgaaaaggctccgtaggggtctggactgccatttccccctacctgtcaggcgtgggactcggctgtgtaactctctcgttccttataagcctgtactacaatacaatcgtcgcatgggtcctctggtacttgttaaactcttttcaacaccctttaccttggtcttcttgtcctcctgatctcaaccgcacgggctttgtggaagagtgccagggatctagtgcagtgtcatatttctggtataggcagaccctgaatattaccgcagatattaatgactcggggtccatccagtggtggttgctaatatgtctcgctgcatcatgggcagtggtgtacatgtgtgtgatccgaggtatagagacgactggaaaagtgatctactttacagccctgtttccttacctcgtcctcacgatctttttgattagaggtctgacactgcctggcgcaaccaagggcctcatatatcttttcactcccaatatgcacatacttcagaaccctcgggtctggctggacgctgccactcagatcttttttagcctgagcttagcttttgggggacacattgcttttgctagctataactcgcctaggaacgattgccaaaaggacgcggtggtcatcgccttggtgaacaggatgacatcattatatgccagcatcgccgtgttttctgtgctcgggttcaaagctactaacgattatgagcattgtcttgacagaaatatactgtccctgattaacgacttcgatttcccagagcagtccatctctagagatgactatcctgccgtattgatgcatttgaatgccacatggccgaagagggtggctcagttgcccctcaaggcatgcctgctcgaggattttctggataagagcgcgtcaggcccgggcttagccttcgtggtgttcaccgagacagatttgcacatgccaggggctcccgtttgggcaatgctgttcttcgggatgcttttcaccttgggcctctcaaccatgttcggcactgtggaagctgtgatcacaccccttctggacgtgggagtcctgccgcgctgggtgccaaaggaagcgctgacagggctggtgtgcttagtatgtttcctgtccgccacatgttttaccctgcaatctggtaattattggttggagatcttcgacaatttcgctgctagccctaacctgctgatgttagcatttctggaagtcgttggggttgtttacgtttatggcatgaagcgcttttgtgatgatatcgcgtggatgaccggtcggaggccatctccatactggcggctgacctggagggtggtaagtccgctccttttgacaatctttgtggcgtatataatacttctgttttggaaacccctgcgctacaaagcttggaatcccaagtacgagctcttcccaagtcgacaggagaaactgtacccaggttgggctcgcgccgcttgcgtcctgctttcactcctcccagtgctgtgggtgcctgttgcagccctcgcacaactgctaacaagaaggcgtcgcacctggcgagaccgggacgcacgtcccgatacagacatgaggcctgatacggacactcggcctgatacggacatgaggcccgataccgatatgaggtag

SEQ ID NO: 256382 - DNA, 1194 bp, Artificial Sequence
  derived and/or modified sequence
atggcccacgcccctgagccagaccctgctgcctgtgacctgggagatgagcggcccaagtgggacaacaaggcccagtacctgctgagctgcaccggctttgctgtgggcctgggcaacatctggaggttcccctacctgtgccagacctatggaggaggagccttcctgatcccctacgtgattgccctggtgtttgagggcatccccatcttccacgtggagctggccatcggccagaggctgaggaagggctctgtgggcgtgtggacagccatcagcccctacctgagcggcgtgggcctgggctgtgtgaccctgtccttcctgatcagcctgtactacaacaccatcgtggcctgggtgctgtggtacctgctgaacagcttccagcaccccctgccctggagcagctgccccccagacctgaacagaacaggctttgtggaggagtgccagggcagcagcgctgtgtcctacttctggtaccggcagaccctgaacatcacagctgacatcaatgacagcggcagcatccagtggtggctgctgatctgcctggccgcctcctgggccgtggtgtacatgtgtgtgatccggggcatcgagaccaccgggaaggtgatctacttcaccgccctcttcccctacctggtgctgaccatcttcctgatccggggcctgaccctgcccggggccaccaagggcctcatctacctgttcacccccaacaacccccgggtgtggctggatgctgccacccagatcttcttcagcctgagcctggccttcggcggccacatcgcctttgccagctacaacagccccagaaatgactgccagaaggatgctgtggtgattgccctggtgaacaggatgaccagcctgtatgccagcattgctgtgttttctgtgctgggcgccagcggccctggcctggcctttgtggtgttcacagaaacagacctgcacatgcctggggcccctgtgtgggccatgctgttcttcggcatgctgttcaccctgggcctgagcaccatgtttggcaccgtggaggccgtcatcacccccctgctggacagcggcaactactggctggagatctttgacaactttgctgccagccccaacctgctgatgctggccttcctggaggtggtgggcgtggtgtatgtgtatggcatgaagaggtag

SEQ ID NO: 256383 - DNA, 1887 bp, Artificial Sequence
  derived and/or modified sequence
atggcccacgcccctgagccagaccctgctgcctgtgacctgggagatgagcggcccaagtgggacaacaaggcccagtacctgctgagctgcaccggctttgctgtgggcctgggcaacatctggaggttcccctacctgtgccagacctatggaggaggagccttcctgatcccctacgtgattgccctggtgtttgagggcatccccatcttccacgtggagctggccatcggccagaggctgaggaagggctctgtgggcgtgtggacagccatcagcccctacctgagcggcgtgggcctgggctgtgtgaccctgtccttcctgatcagcctgtactacaacaccatcgtggcctgggtgctgtggtacctgctgaacagcttccagcaccccctgccctggagcagctgccccccagacctgaacagaacaggctttgtggaggagtgccagggcagcagcgctgtgtcctacttctggtaccggcagaccctgaacatcacagctgacatcaatgacagcggcagcatccagtggtggctgctgatctgcctggccgcctcctgggccgtggtgtacatgtgtgtgatccggggcatcgagaccaccgggaaggtgatctacttcaccgccctcttcccctacctggtgctgaccatcttcctgatccggggcctgaccctgcccggggccaccaagggcctcatctacctgttcacccccaacatgcacatcctgcagaacccccgggtgtggctggatgctgccacccagatcttcttcagcctgagcctggcctttggaggccacatcgcctttgccagctacaacagccccagaaatgactgccagaaggatgctgtggtgattgccctggtgaacaggatgaccagcctgtatgccagcattgctgtgttttctgtgctgggcttcaaggccaccaatgactatgagcactgcctggacaggaacatcctgagcctcatcaatgactttgacttccctgagcagagcatcagcagagatgactacccagctgtgctgatgcacctgaatgccacctggcccaagagggtggcccagctgcccctgaaggcctgcctgctggaggacttcctggacaagagcgccagcggccctggcctggcctttgtggtgttcacagaaacagacctgcacatgcctggggcccctgtgtgggccatgctgttcttcggcatgctgttcaccctgggcctgagcaccatgtttggaacagtggaggccgtcatcacccccctgctggatgtgggcgtgctgccccgctgggtgcccaaggaggccctgaccggcctggtgtgcctggtgtgcttcctgagcgccacctgcttcaccctgcagagcggcaactactggctggagatctttgacaactttgctgccagccccaacctgctgatgctggccttcctggaggtggtgggcgtggtgtatgtgtatggcatgaagcgcttctgtgatgacatcgcctggatgacaggccggcggcccagcccctactggaggctgacctggagggtggtgagccccctgctgctgaccatctttgtggcctacatcatcctgctcttctggaagcccctgcgctacaaggcctggaaccccaagtatgagctgttccccagccggcaggagaagctgtacccaggctgggcccgggccgcctgtgtgctgctgagcctgctgcctgtgctgtgggtgcctgtggccgccctggcccagctgctgaccaggagaagaaggacctggagggacagagatgcccggccagacacagacatgaggccagacacagacaccaggccagacacagacatgaggccagacacagacatgaggtag

SEQ ID NO: 256384 - DNA, 1194 bp, Artificial Sequence
  derived and/or modified sequence
atggcccacgcccccgagcccgaccccgccgcctgcgacctgggcgacgagaggccaaaatgggacaataaagcacaatatttactgtcctgtaccggctttgctgtgggccttggtaatatctggcgattcccctacttgtgtcagacctacggtggtggagcctttctgattccgtatgtcattgccctcgtattcgagggcatcccgatctttcacgttgagctggccattggacagagacttagaaagggcagtgttggtgtgtggacagcaatcagtccatacctttccggggtggggctgggctgtgtgactttgtctttcttgatttctctctactacaacaccattgtggcttgggtcctgtggtacctgttaaattccttccagcacccactcccctggagctcgtgtcctcctgatctcaacagaacaggtttcgtggaggaatgccagggatcttccgccgtatcttacttctggtaccgacagaccctgaatatcactgctgacattaatgattccggatccattcaatggtggctcttgatctgccttgcagccagttgggctgttgtgtacatgtgtgtaattcgagggatcgagacaacgggcaaggtgatatactttaccgccttgttcccttaccttgtgctcaccatttttctcatcagaggtctgactctgcccggcgccacgaaagggctgatatacctgttcacaccaaacaaccccagggtgtggctagatgcagcaactcagatcttctttagcctctctctggccttcgggggccacattgcctttgcgtcttataactcgcctagaaacgattgccaaaaggacgccgtggtcatagcgctcgttaatagaatgactagtctatatgcgtctattgctgttttttctgtgttaggtgcgtccgggcctggacttgcttttgttgtgttcacagagaccgatctgcacatgccaggggcacctgtgtgggccatgctgtttttcggtatgcttttcaccctcggcttgagcaccatgttcggtaccgtggaggccgtgataacacctcttttggattcggggaattattggttggagattttcgacaattttgccgcctctcccaatctactgatgctcgctttcttggaagtggttggggtggtgtacgtttatggcatgaagcgctag

SEQ ID NO: 256385 - DNA, 1887 bp, Artificial Sequence
  derived and/or modified sequence
atggcccacgcccccgagcccgaccccgccgcctgcgacctgggcgatgagcgacccaaatgggataacaaagcacaatacctgctctcttgtacagggttcgcggtaggacttgggaacatatggagattcccttacctctgccagacttacggcgggggcgcttttttaattccctatgttatcgcactcgtgttcgagggtataccaatatttcatgttgagctcgcaattggtcagcgacttcgcaaaggctctgtcggcgtgtggacagcaatctccccctacttgagtggggtgggtttgggttgtgtgacattaagttttctgattagtctgtattacaataccattgtcgcttgggtgttatggtacctgctgaactccttccagcaccccctgccttggtcctcctgccccccagacttaaatcgcacaggtttcgtcgaggagtgccaaggcagctcagcggtctcttatttttggtatcgccagactctcaacatcaccgcggacatcaatgactccgggtccatccagtggtggcttctgatttgtctggcggccagctgggctgtcgtgtatatgtgcgtgatacgtggaatcgaaacgaccggcaaagttatttatttcaccgcactgttcccatatttggtcctgacgatattcctgatcaggggtcttacgctgcccggcgccaccaagggactcatctatctctttactcctaacatgcacatcctccagaaccctcgggtgtggctggacgccgcaactcagatcttcttcagcctgtccctagcctttgggggccacattgccttcgcatcttacaattccccacggaacgactgccagaaggacgctgtggtgatcgcactggtgaatcgcatgacctcactatatgctagcatagctgtgttttccgttctcggattcaaggcgactaacgactacgagcactgtctcgataggaatatcctgtccctgatcaatgattttgactttcctgaacagtccattagcagggacgactatccagcagttctgatgcatctcaacgcaacatggcctaagagggtggcgcagctgcctctgaaagcttgcctgttggaggacttcctcgacaaaagtgcttctggccccggcctcgctttcgtggtctttacggaaacagatttgcatatgcctggggctccagtgtgggcaatgcttttcttcggcatgttattcactttaggcctctctacgatgtttggtaccgttgaggcggtcatcacaccgctgctggacgtcggcgtcctgccccgctgggttcccaaagaagccctgaccggtctagtatgcctcgtgtgctttcttagcgccacatgcttcaccctgcagtccggtaactattggctcgaaattttcgataacttcgccgcaagtccaaacctgctgatgctggcctttctggaagttgtcggggtcgtgtacgtgtatggaatgaagcgcttctgtgatgatatagcctggatgacaggtcggcgaccttctccttactggcggctgacatggagggtggtttctcccctcctgctgacgatcttcgtcgcctatatcatcctgttgttctggaagcctcttagatacaaggcatggaaccccaaatacgagttgtttccctcaagacaggaaaagctttacccaggttgggctagagcagcatgtgtcctgctctccctgcttccagttttgtgggttcccgtggcagcgctggctcaacttttgacccgccgccgccgcacctggcgcgaccgggacgcacgtcccgatacagacatgaggcccgacactgacacccgccctgacactgacatgaggccggatacagacatgaggtag

SEQ ID NO: 256386 - DNA, 1194 bp, Artificial Sequence
  derived and/or modified sequence
atggctcacgcccctgaacctgatcccgctgcatgtgacctgggcgatgagaggcccaaatgggataataaagcacaatatcttttaagctgcactggatttgccgtgggactgggcaatatctggcggttcccttatctctgccagacatacggaggtggtgcattcctaattccatatgtgatagccctagtgtttgaaggtatccccatcttccacgtcgaactggcaatcggacagcgactgcgaaaggggtccgtcggcgtgtggacggctatttcaccctacctgtccggggtgggtcttggctgcgttacactcagctttctcattagcctctactacaacactatcgttgcctgggtgctgtggtacctgcttaattcgttccaacatcctctgccctggtcctcttgtccccctgatcttaaccgtaccggatttgtagaagagtgccagggcagcagtgctgtgagttatttttggtaccggcagacgctgaacattacagctgacattaacgacagcggatcaatccagtggtggctgctcatctgcctagccgcttcctgggctgtggtctacatgtgcgtcattcgcggaattgaaactaccggaaaggtgatctacttcaccgctttatttccctatctggtgctcacaatattccttatcagaggcctgacactccccggtgctactaaaggactgatttatctgtttacccccaacaaccccagagtttggctggatgcagcaacccagatttttttcagtctctctttggcattcggcggacacatcgctttcgcatcatataacagcccgagaaatgactgccagaaggatgctgtggtgattgcactggtgaataggatgacctccctttacgcatctattgccgttttcagcgtgctaggtgcttcaggcccaggcctcgctttcgtggtgtttacggagactgatctgcacatgcctggggctcccgtatgggctatgctgtttttcggtatgttgttcactctgggcctgagtaccatgttcggaaccgttgaggcagtgattacgccgctgctagatagcggcaattattggctggaaatctttgataacttcgcggcatcaccgaatctcctgatgctggcctttctggaggttgtaggggttgtttacgtctatgggatgaaacgttag

SEQ ID NO: 256387 - DNA, 1887 bp, Artificial Sequence
  derived and/or modified sequence
atggctcacgcacctgagccagacccagctgcctgcgaccttggggatgaacgaccaaaatgggataacaaagctcaatatttactctcatgcacaggcttcgctgtcggcttagggaacatatggcgctttccttatttgtgccagacctatggaggcggagctttcctgatcccttatgtcatagctctggttttcgaaggtatcccaatctttcacgtggaactggccattggtcagcggttgcgcaaaggcagtgtaggggtatggaccgctatctctccctacttatcaggggtagggctaggctgtgtcactttgagcttcttaatcagcctgtactataataccatcgtggcatgggtgttgtggtatctcttgaactcatttcaacatccactcccctggtcttcctgtcctccggatttgaaccggacgggcttcgtagaggaatgtcagggaagttcggcggtgagctacttctggtataggcagacgctaaacatcacagctgacatcaatgattcgggctccattcagtggtggctcctcatttgcctggccgcttcttgggctgtcgtttacatgtgcgtcattcggggaatcgagaccactggcaaggttatttactttaccgccctgttcccatacctggttttgactatctttcttattagggggcttacactgcccggtgccaccaaaggactgatttatctcttcacccctaatatgcatattttgcaaaaccctagagtgtggctggacgcagccacccagatctttttttctctgtccctggcatttggcggtcacattgcctttgcatcatataatagcccgaggaacgattgccagaaggatgcggtggtgatagcgttagttaaccgtatgacatcactgtacgccagcattgctgttttttctgtgctgggattcaaagctacaaatgactatgagcactgtctcgataggaatattctctcgctgattaacgactttgacttccccgaacaatcaatcagcagggacgactaccctgctgtcctcatgcacctgaatgccacctggcccaagcgggtagcacagctgcccctaaaagcatgcctcctcgaggatttccttgataagtccgcctcagggcctggattagctttcgtagttttcactgaaaccgatctccacatgccaggtgcccctgtgtgggcaatgcttttttttggcatgctgtttactttgggcctgagcacgatgttcggcacagtcgaggccgtgattacccctcttctagacgtaggagtgctgccccgttgggtccccaaggaggccctgacaggcctggtctgccttgtgtgttttcttagtgcgacttgtttcaccctgcagtctggcaattattggctggagattttcgacaacttcgcagccagtcccaacctactgatgcttgccttccttgaggtggtgggtgtggtgtacgtctacggcatgaagcgcttctgtgacgatattgcttggatgaccgggagacgccctagcccctactggaggctgacctggcgggtagttagccccctgcttctgaccatctttgtagcctacattatactcctcttttggaaaccgttacgttacaaagcctggaaccccaaatatgaattatttcccagcagacaggagaagctctacccaggctgggctcgcgctgcatgtgttctgttgagcttgttaccagtgctgtgggtgcctgtggccgctctcgcccagttgctgacccggagaaggcgcacgtggcgggacagagacgctcggccagatacagatatgagaccagacaccgacactagaccagacacagacatgaggccagatacagatatgagatag

SEQ ID NO: 256388 - DNA, 1317 bp, Artificial Sequence
  derived and/or modified sequence
aatacaactgcagtggggctgcttgtggtttccaaacgtcggcagaggctggagacggctctctagtgctgggtgtggagtgaggcaccacccttgccctgaagcctggggcactcagtcaccatggctcatgccccagaaccggacccggccgcctgcgacctcggggatgagaggcccaagtgggacaacaaggcccagtacctcctgagctgcactgggtttgccgtgggactggggaacatttggcggttcccatacctgtgccagacctatggaggaggggccttcctcatcccctacgtcatcgcgctggtcttcgaggggatccccattttccacgtcgagctcgccatcggccagcggctgcggaagggcagcgtcggcgtgtggacggccatctccccgtacctcagtggagtagggctgggctgtgtcacgctgtccttcctgatcagcctgtactacaacaccatcgtggcgtgggtgctgtggtacctcctcaactccttccagcacccgctgccctggagctcctgcccaccggacctcaacagaacagggtttgtggaggagtgccagggcagcagcgccgtgagctacttctggtaccggcagacactgaacatcacagccgacatcaatgacagtggctccatccagtggtggctgctcatctgcttggcagcctcctgggcagtcgtgtacatgtgtgtcatcaggggcattgagactacagggaaggtgatttacttcacagctttgttcccttacctggtcctgaccatctttctcatcagagggctgaccctgccaggggcaacaaaaggactcatctacttgttcactcccaacaacccccgggtgtggctggacgcagccacccagatattcttctctctgtccctggccttcggaggacacatcgcttttgcaagttacaactcgcccaggaatgactgccagaaggatgcggtggtcatcgccctggtcaacaggatgacctccctgtacgcgtccatcgctgtcttctctgtcctgggtgcctcgggcccgggcctggccttcgtcgtcttcacggagaccgacctccacatgccgggggctcctgtgtgggccatgctcttcttcgggatgctgttcaccttggggctatcgaccatgttcgggaccgtggaggcggtcatcacacccctgctggactctgggaactactggctggagattttcgacaattttgccgcttccccgaacctgctcatgttggcctttctcgaggttgtgggtgtcgtttatgtttatggaatgaaacggtga

SEQ ID NO: 256389 - DNA, 2121 bp, Artificial Sequence
  derived and/or modified sequence
aatacaactgcagtggggctgcttgtggtttccaaacgtcggcagaggctggagacggctctctagtgctgggtgtggagtgaggcaccacccttgccctgaagcctggggcactcagtcaccatggctcatgccccagaaccggacccggccgcctgcgacctcggggatgagaggcccaagtgggacaacaaggcccagtacctcctgagctgcactgggtttgccgtgggactggggaacatttggcggttcccatacctgtgccagacctatggaggaggggccttcctcatcccctacgtcatcgcgctggtcttcgaggggatccccattttccacgtcgagctcgccatcggccagcggctgcggaagggcagcgtcggcgtgtggacggccatctccccgtacctcagtggagtagggctgggctgtgtcacgctgtccttcctgatcagcctgtactacaacaccatcgtggcgtgggtgctgtggtacctcctcaactccttccagcacccgctgccctggagctcctgcccaccggacctcaacagaacagggtttgtggaggagtgccagggcagcagcgccgtgagctacttctggtaccggcagacactgaacatcacagccgacatcaatgacagtggctccatccagtggtggctgctcatctgcttggcagcctcctgggcagtcgtgtacatgtgtgtcatcaggggcattgagactacagggaaggtgatttacttcacagctttgttcccttacctggtcctgaccatctttctcatcagagggctgaccctgccaggggcaacaaaaggactcatctacttgttcactcccaacatgcacattctccagaacccccgggtgtggctggacgcagccacccagatattcttctctctgtccctggccttcggaggacacatcgcttttgcaagttacaactcgcccaggaatgactgccagaaggatgcggtggtcatcgccctggtcaacaggatgacctccctgtacgcgtccatcgctgtcttctctgtcctggggttcaaagcaactaatgactacgagcactgcctggacagaaacatcctcagcctcatcaacgactttgacttcccagagcagagcatctccagggacgactacccagccgtcctcatgcacctgaacgccacctggcccaagagggtggcccagctccccctgaaggcctgcctcctggaagactttctggataagagtgcctcgggcccgggcctggccttcgtcgtcttcacggagaccgacctccacatgccgggggctcctgtgtgggccatgctcttcttcgggatgctgttcaccttggggctatcgaccatgttcgggaccgtggaggcggtcatcacacccctgctggacgtgggggtcctgcctagatgggtccccaaggaggccctgactgggctggtctgcctggtctgcttcctctccgccacctgcttcacgctgcagtctgggaactactggctggagattttcgacaattttgccgcttccccgaacctgctcatgttggcctttctcgaggttgtgggtgtcgtttatgtttatggaatgaaacggttctgcgatgacattgcgtggatgaccgggaggcggcccagcccctactggcggctgacctggagggtggtcagtcccctgctgctgaccatctttgtggcttacatcatcctcctgttctggaagccactgagatacaaggcctggaaccccaaatacgagctgttcccctcgcgtcaggagaagctctacccgggctgggcgcgcgccgcctgtgtgctgctgtccttgctgcccgtgctgtgggtcccggtggccgcgcttgctcagctgctcacccggcggaggcggacgtggagggacagggacgcgcgcccagacacggacatgcgcccggacacggacacgcgcccagacacggacatgcgcccggacacggacatgcgctgaagccggccggagcggggcctgcatgggcgggtctgtgggggggcttggcctgatggtgggcggggccccgcccacagggccgaccccaatacaccagcgactcaaccttga

SEQ ID NO: 256390 - protein, 324 aa, Artificial Sequence
  derived and/or modified sequence
MKCVLVATEGAEVLFYWTDQEFEESLRLKFGQSENEEEELPALEDQLSTLLAPVIISSMTMLEKLSDTYTCFSTENGNFLYVLHLFGECLFIAINGDHTESEGDLRRKLYVLKYLFEVHFGLVTVDGHLIRKELRPPDLAQRVQLWEHFQSLLWTYSRLREQEQCFAVEALERLIHPQLCELCIEALERHVIQAVNTSPERGGEEALHAFLLVHSKLLAFYSSHSASSLRPADLLALILLVQDLYPSESTAEDDIQPSPRRARSSQNIPVQQAWSPHSTGPTGGSSAETETDSFSLPEEYFTPAPSPGDQSSGEDRRKAGGNNS

SEQ ID NO: 256391 - protein, 159 aa, Artificial Sequence
  derived and/or modified sequence
  misc_feature (1)..(1): Xaa can be any naturally occurring amino acid
XLRPPDLAQRVQLWEHFQSLLWTYSRLREQEQCFAVEALERLIHPQLCELCIEALERHVIQAVNTSPERGGEEALHAFLLVHSKLLAFYSSHSASSLRPADLLALILLVQDLYPSESTAEDDIQETDSFSLPEEYFTPAPSPGDQSSGEDRRKAGGNNS

SEQ ID NO: 256392 - DNA, 975 bp, Artificial Sequence
  derived and/or modified sequence
atgaagtgcgtgcttgtggcaacagagggtgccgaggtactcttttactggactgatcaggaatttgaagagtctctgcgactgaagtttggacagtccgaaaacgaggaggaggaacttcccgccctggaggatcagctttcaaccttgctggcccctgtgatcatttcaagcatgacaatgctcgagaagctatcagacacttatacctgcttctccacggagaacgggaacttcttatacgtgcttcacctgtttggggagtgcctattcattgccatcaatggtgaccataccgagagtgagggcgatctgcggcgaaaattatacgtgctgaagtacctcttcgaggtccattttgggctggtgactgtggacggccacctgatcagaaaggaactgaggcccccagacctggcgcaacgggtgcagttgtgggaacactttcagtctttactatggacctatagccgcctgagggagcaggagcagtgttttgccgttgaggcactggaaaggctgatccacccacaactttgtgagctgtgtatagaggccctcgagagacacgtaatacaggccgtcaatacctccccagagaggggtggggaagaggctctgcacgcctttcttctggtccattcaaaactcttagccttctactcctctcatagcgcatcaagtctccggcccgccgaccttttagcactgatattgctggttcaggatttgtacccttctgagagcacagctgaagacgatatccagccatctccaagaagggccaggtcctcgcagaatatcccggtgcaacaggcatggtcacctcacagtaccggaccaaccggcggcagcagcgccgagaccgaaaccgacagcttcagtctgcctgaagagtattttaccccagctccttcacctggggatcagagctccggagaagatcgtagaaaggccggtgggaacaatagttag

SEQ ID NO: 256393 - DNA, 480 bp, Artificial Sequence
  derived and/or modified sequence
tgactgaggccgcccgatttagctcagagggtccagctgtgggagcactttcaatcgctgttgtggacctatagtagactccgtgagcaggagcagtgttttgccgtcgaggctctggagaggcttatacatccgcagctgtgcgaactgtgtatcgaggccctggagcgtcacgtgatccaggcagttaacaccagtcctgagcgtgggggggaagaggcgctgcatgcttttctactggtgcattcaaaactcttggctttctacagctcgcactctgcctcgtcactgcgacccgcagaccttttggccctcatactcctggtccaagacctgtatcccagcgaatcaacagctgaggatgatatccaggaaaccgacagttttagtctccccgaggaatatttcacaccagccccaagccctggggatcagtctagcggtgaggatcggcgtaaggctgggggaaacaattcatag

SEQ ID NO: 256394 - DNA, 1580 bp, Artificial Sequence
  derived and/or modified sequence
gcggggcgctgtgcgcgccgcgatccggtacgtgggcctccgggctgtcccctctgggggcggcgatcctccctccggagccccccttcaaccctcccggaagtgagcatttgcaggaccagggatgctgtgctgctctcccatgagccagtcaccgagtcggtctgctgcagccctttctgaacctctggccgtctggatgctccactgtgcttgccaagatgaagtgcgtcttggtggccactgagggcgcagaggtcctcttctactggacagatcaggagtttgaagagagtctccggctgaagttcgggcagtcagagaatgaggaagaagagctccctgccctggaggaccagctcagcaccctcctagccccggtcatcatctcctccatgacgatgctggagaagctctcggacacctacacctgcttctccacggaaaatggcaacttcctgtatgtccttcacctgtttggagaatgcctgttcattgccatcaatggtgaccacaccgagagcgagggggacctgcggcggaagctgtatgtgctcaagtacctgtttgaagtgcactttgggctggtgactgtggacggtcatcttatccgaaaggagctgcggcccccagacctggcgcagcgtgtccagctgtgggagcacttccagagcctgctgtggacctacagccgcctgcgggagcaggagcagtgcttcgccgtggaggccctggagcgactgattcacccccagctctgtgagctgtgcatagaggcgctggagcggcacgtcatccaggctgtcaacaccagccccgagcggggaggcgaggaggccctgcatgccttcctgctcgtgcactccaagctgctggcattctactctagccacagtgccagctccctgcgcccggccgacctgcttgccctcatcctcctggttcaggacctctaccccagcgagagcacagcagaggacgacattcagccttccccgcggagggcccggagcagccagaacatccccgtgcagcaggcctggagccctcactccacgggcccaactggggggagctctgcagagacggagacagacagcttctccctccctgaggagtacttcacaccagctccttcccctggcgatcagagctcaggtgaggaccggaggaaagcaggaggaaacaatagctagctgcgagcgacaggcagcccaggacatctgtcttaggctccagtggacccccgtgcctcctaaggcttgagtgcaggtacccgtgttcctagagcacaggacgctgtctgcggctccccatcttccctgccagctccagcctgaactcaaggattgttaagaccactccactgatccctaaagctgttgatgacaagttgattcatttaaaacttctgtacatgcattctcagactcatcttttttgtaattaaaattaaaaattaagttaaatttagtaataatcatctaatttctatacattctaaaatatattcagcatctgtagtttatactttgtttctccaaagtatgtgggtaaacaataaaaaaaaactataaata

SEQ ID NO: 256395 - DNA, 857 bp, Artificial Sequence
  derived and/or modified sequence
gctgcggcccccagacctggcgcagcgtgtccagctgtgggagcacttccagagcctgctgtggacctacagccgcctgcgggagcaggagcagtgcttcgccgtggaggccctggagcgactgattcacccccagctctgtgagctgtgcatagaggcgctggagcggcacgtcatccaggctgtcaacaccagccccgagcggggaggcgaggaggccctgcatgccttcctgctcgtgcactccaagctgctggcattctactctagccacagtgccagctccctgcgcccggccgacctgcttgccctcatcctcctggttcaggacctctaccccagcgagagcacagcagaggacgacattcaggagacagacagcttctccctccctgaggagtacttcacaccagctccttcccctggcgatcagagctcaggtgaggaccggaggaaagcaggaggaaacaatagctagctgcgagcgacaggcagcccaggacatctgtcttaggctccagtggacccccgtgcctcctaaggcttgagtgcaggtacccgtgttcctagagcacaggacgctgtctgcggctccccatcttccctgccagctccagcctgaactcaaggattgttaagaccactccactgatccctaaagctgttgatgacaagttgattcatttaaaacttctgtacatgcattctcagactcatcttttttgtaattaaaattaaaaattaagttaaatttagtaataatcatctaatttctatacattctaaaatatattcagcatctgtagtttatactttgtttctccaaagtatgtgggtaaacaataaaaaaaaactat

SEQ ID NO: 256396 - DNA, 975 bp, Artificial Sequence
  derived and/or modified sequence
atgaagtgtgtgctggtggccacagagggcgctgaggtgctcttctactggacagaccaggagtttgaggagagcctgcggctgaagtttggccagagtgaaaatgaggaggaggagctgcctgccctggaggaccagctgagcaccctgctggcccctgtgatcatcagctccatgaccatgctggagaagctgagtgacacctacacctgcttcagcacagaaaatggaaacttcctgtatgtgctgcacctgtttggagagtgcctcttcatcgccatcaatggagaccacacagaaagtgaaggagacctgcggaggaagctgtatgtgctgaagtacctgtttgaggtgcacttcggcctggtgacagtggatggccacctgatcaggaaggagctgcggcccccagacctggcccagagggtgcagctgtgggagcacttccagagcctgctgtggacctacagccggctgcgggagcaggagcagtgctttgctgtggaggccctggagcggctcatccacccccagctgtgtgagctgtgcatcgaggccctggagcggcacgtgatccaggccgtgaacaccagccctgagcggggcggggaggaggccctgcacgccttcctgctggtgcacagcaagctgctggccttctacagcagccacagcgccagcagcctgcggcctgctgacctgctggccctgatcctgctggtgcaggacctgtaccccagcgagagcacagcagaagatgacatccagcccagcccccggcgggcccggagcagccagaacatccctgtgcagcaggcctggagcccccacagcacaggccccaccggcggcagcagcgctgagacagaaacagacagcttcagcctgcctgaggagtacttcaccccagcccccagccctggggaccagagcagcggggaggacaggaggaaggccggcggcaacaacagctag

SEQ ID NO: 256397 - DNA, 480 bp, Artificial Sequence
  derived and/or modified sequence
tgactgcggcccccagacctggcccagagggtgcagctgtgggagcacttccagagcctgctgtggacctacagccggctgcgggagcaggagcagtgctttgctgtggaggccctggagcggctcatccacccccagctgtgtgagctgtgcatcgaggccctggagcggcacgtgatccaggccgtgaacaccagccctgagcggggcggggaggaggccctgcacgccttcctgctggtgcacagcaagctgctggccttctacagcagccacagcgccagcagcctgcggcctgctgacctgctggccctgatcctgctggtgcaggacctgtaccccagcgagagcacagcagaagatgacatccaggagacagacagcttcagcctgcctgaggagtacttcaccccagcccccagccctggggaccagagcagtggagaagatagaaggaaggccggcggcaacaacagctag

SEQ ID NO: 256398 - DNA, 975 bp, Artificial Sequence
  derived and/or modified sequence
atgaagtgcgtgctggtggccaccgagggcgccgaggtgctgttctactggaccgatcaggagttcgaagagagcctgcgcctgaaatttggtcagagcgaaaatgaggaggaagagcttccagcactcgaggatcagctgtccacccttcttgccccagtgatcatcagtagcatgacaatgcttgagaaactgtcagatacatatacttgcttctcaacggagaacggaaactttctgtacgttttgcatttgtttggtgagtgcctgttcattgccattaatggcgaccacaccgagagcgagggcgatttgagaagaaagttatacgtgctgaagtatctgttcgaagtccatttcggcctcgtcactgtggatggtcatctaatcagaaaagaactcagaccccccgacctggctcagcgagtgcagctgtgggagcatttccagagcctcctttggacctattcacggttgagagagcaagaacaatgtttcgccgtggaggccttagaacgcctcatccacccccagctatgtgagctctgtattgaggcactcgagcggcatgtcatccaggctgtgaatacaagtccagagcgcggtggtgaggaggctctgcatgccttcttactcgtccattctaagctgttggccttctactctagtcactctgcaagctccctccgccccgccgacctacttgcactgatactgctagtgcaggatctctatccatccgaatccactgcagaagatgatatccagccgagccctcgtcgggcccggagttcacaaaacatccccgtacagcaggcttggtccccccacagtaccggtcctacagggggctcaagtgcagagactgagactgattcgttcagcctccctgaggaatactttaccccagctccatcccctggcgatcagtcctccggagaggataggaggaaagccggtggtaataactcctag

SEQ ID NO: 256399 - DNA, 480 bp, Artificial Sequence
  derived and/or modified sequence
tgactgcggccccccgacctggcccagcgggtgcagctgtgggagcacttccagagtctcttgtggacttattcgcgattgcgcgaacaagaacagtgctttgctgtggaggctttagagcgtctgatccatccccagctttgtgagttatgcattgaagctctggagcgacatgtcattcaggcagttaacacttctccggagaggggcggtgaagaggcactgcatgccttcttattggtacattcaaagctgctcgctttctacagttcccactctgcctcatcgctacgaccagcagacctcctcgctctgattttactggtgcaggacctgtatccctcagaaagcacagctgaagatgatatccaggagacggacagcttctccctccccgaagaatactttacacccgccccttccccgggagaccagagctccggggaggataggcggaaagctggtggtaacaattcttag

SEQ ID NO: 256400 - DNA, 975 bp, Artificial Sequence
  derived and/or modified sequence
atgaaatgcgtccttgtggcgacagagggagctgaggtgctgttctattggacagaccaggagtttgaagagtcactgcgactcaagtttgggcagagcgaaaatgaagaagaagagctgccagctcttgaggatcagctgtcgactctcctcgcacccgtgatcatttctagcatgacaatgcttgagaaactatctgatacatacacgtgcttctctacagagaatggtaactttctctatgttctgcatctgttcggggaatgtctgttcatcgctattaatggcgaccacacggagtcagagggggatctccggcgtaagctttacgtgctaaagtacctgtttgaggtgcacttcggcctagtgaccgtggatggccatttgatccggaaggagctcaggcccccagaccttgctcaacgggtccagctgtgggaacattttcagtccttgctgtggacctactcccgactccgggaacaggagcagtgttttgcagtagaagcgctcgaaaggctcatccatccccagctttgcgaactctgtattgaagctctggaacggcacgtcatccaagcagttaatacatcacccgaaagaggaggagaggaagccctacacgcgtttctcttagtccacagcaaattgttggctttctatagctcccattctgcctcttcactgcgaccagctgatctgctagctctgatcttgctggtgcaagatctttaccccagcgagagcacagcggaggacgatatccagccatcacctcgacgggctcgtagtagccagaacattccagtacagcaggcatggtctccccactccacggggcctaccggcggatcctctgcagaaacagagactgacagcttctccctacctgaagaatactttacccccgcaccatctccaggtgaccaatcaagcggagaggatagaaggaaagcaggaggcaataactcttag

SEQ ID NO: 256401 - DNA, 480 bp, Artificial Sequence
  derived and/or modified sequence
taactccgccctccggacctcgcccagcgcgtccagctttgggaacactttcaatcgctcctatggacatactcccgactgcgagaacaggaacagtgtttcgctgtcgaggcactcgaacgcctgattcatccacagctgtgtgaactgtgtatagaggccctggagaggcacgttatccaggctgtcaatacatcccctgagaggggtggagaggaggcactccacgccttcttgttagtccattcgaagctgctggccttctattctagccactcagcctctagtctccgcccagcggacctactggcattgatactgctagtacaggacctgtaccccagcgaatccactgctgaagatgacatccaagagaccgattcgttctcacttcctgaggaatacttcactcccgcaccttcccctggcgatcaaagtagtggcgaagaccgtagaaaggccggtggaaataactcttag

SEQ ID NO: 256402 - DNA, 975 bp, Artificial Sequence
  derived and/or modified sequence
atgaagtgcgtgctggtggccaccgagggcgccgaggtgctgttctactggaccgaccaggagttcgaggagagcctgagactgaagttcggccagagcgagaacgaggaggaggagctgcccgccctggaggaccagctgagcaccctgctggcccccgtgatcatcagcagcatgaccatgctggagaagctgagcgacacctacacctgcttcagcaccgagaacggcaacttcctgtacgtgctgcacctgttcggcgagtgcctgttcatcgccatcaacggcgaccacaccgagagcgagggcgacctgagaagaaagctgtacgtgctgaagtacctgttcgaggtgcacttcggcctggtgaccgtggacggccacctgatcagaaaggagctgagaccccccgacctggcccagagagtgcagctgtgggagcacttccagagcctgctgtggacctacagcagactgagagagcaggagcagtgcttcgccgtggaggccctggagagactgatccacccccagctgtgcgagctgtgcatcgaggccctggagagacacgtgatccaggccgtgaacaccagccccgagagaggcggcgaggaggccctgcacgccttcctgctggtgcacagcaagctgctggccttctacagcagccacagcgccagcagcctgagacccgccgacctgctggccctgatcctgctggtgcaggacctgtaccccagcgagagcaccgccgaggacgacatccagcccagccccagaagagccagaagcagccagaacatccccgtgcagcaggcctggagcccccacagcaccggccccaccggcggcagcagcgccgagaccgagaccgacagcttcagcctgcccgaggagtacttcacccccgcccccagccccggcgaccagagcagcggcgaggacagaagaaaggccggcggcaacaacagctag

SEQ ID NO: 256403 - DNA, 480 bp, Artificial Sequence
  derived and/or modified sequence
tgactgagaccccccgacctggcccagagagtgcagctgtgggagcacttccagagcctgctgtggacctacagcagactgagagagcaggagcagtgcttcgccgtggaggccctggagagactgatccacccccagctgtgcgagctgtgcatcgaggccctggagagacacgtgatccaggccgtgaacaccagccccgagagaggcggcgaggaggccctgcacgccttcctgctggtgcacagcaagctgctggccttctacagcagccacagcgccagcagcctgagacccgccgacctgctggccctgatcctgctggtgcaggacctgtaccccagcgagagcaccgccgaggacgacatccaggagaccgacagcttcagcctgcccgaggagtacttcacccccgcccccagccccggcgaccagagcagcggcgaggacagaagaaaggccggcggcaacaacagctag

SEQ ID NO: 256404 - protein, 396 aa, Artificial Sequence
  derived and/or modified sequence
MAAPCVSYGGAVSYRLLLWGRGSLARKQGLWKTAAPELQTNVRSQILRLRHTAFVIPKKNVPTSKRETYTEDFIKKQIEEFNIGKRHLANMMGEDPETFTQEDIDRAIAYLFPSGLFEKRARPVMKHPEQIFPRQRAIQWGEDGRPFHYLFYTGKQSYYSLMHDVYGMLLNLEKHQSHLQAKSLLPEKTVTRDVIGSRWLIKEELEEMLVEKLSDLDYMQFIRLLEKLLTSQCGAAEEEFVQRFRRSVTLESKKQLIEPVQYDEQGMAFSKSEGKRKTAKAEAIVYKHGSGRIKVNGIDYQLYFPITQDREQLMFPFHFVDRLGKHDVTCTVSGGGRSAQAGAIRLAMAKALCSFVTEDEVEWMRQAGLLTTDPRVRERKKPGQEGARRKFTWKKR

SEQ ID NO: 256405 - DNA, 1191 bp, Artificial Sequence
  derived and/or modified sequence
atggccgcgccatgcgtgtcctatggtggcgctgtgagctatcgactgctgttgtggggaagaggcagtctggctcggaaacaggggctctggaagacagctgcgcccgagttgcagaccaacgtgcgttcacagatcctccggctccgccataccgccttcgtaattcctaagaaaaatgtgcctacgagcaagcgcgaaacctataccgaggatttcatcaaaaagcagatagaggagttcaatattggaaaacggcatctcgcaaatatgatgggagaggacccagagacctttactcaggaggacatcgaccgagccatagcatatctcttccctagcgggctgtttgaaaagagggccaggcccgtgatgaaacaccccgagcagatatttccccgtcagagagcaatccagtggggagaagacgggcgaccattccactatctgttttatactgggaagcagagttactatagtctgatgcacgatgtgtacggaatgctcctgaacctggaaaagcaccagagccatttgcaggcaaaaagcctgctgcccgaaaaaaccgtcacgcgtgacgtcatcgggtcccgttggctgattaaagaggaactggaggagatgctagttgagaagttatccgatctggattacatgcagttcatacgcctgctggagaaactcttaacctctcagtgtggagccgccgaggaggaatttgtgcagagatttcgaagatccgtgacgctagaatccaaaaagcagcttatcgagcccgttcagtacgatgagcagggtatggccttctcaaagagtgaagggaaacggaagaccgcgaaggccgaggccatagtgtataagcacggttccggtcgcatcaaagtgaacggtattgactaccagctgtactttccgatcacgcaagatagggagcagttgatgtttccttttcacttcgtagaccgactgggtaagcatgacgtgacttgtactgtgtcggggggcggtcggtcagcacaggctggcgcgatccggctagccatggcaaaggctctttgttcgttcgtcactgaggatgaggtcgaatggatgcgccaggccggcctgctgaccactgacccccgcgtccgggaaaggaaaaaaccggggcaggagggggccaggagaaagtttacttggaaaaaacggtag

SEQ ID NO: 256406 - DNA, 1191 bp, Artificial Sequence
  derived and/or modified sequence
atggccgccccctgtgtgtcctatggaggagctgtgtcctaccgcctgctgctgtggggccggggcagcctggccaggaagcagggcctgtggaagacagctgcccctgagctgcagaccaacgtgcgcagccagatcctgcggctgcggcacacagccttcgtcatccccaagaagaatgtgcccaccagcaagcgggagacctacacagaggacttcatcaagaagcagatcgaggagttcaacatcggcaagaggcacctggccaacatgatgggagaggaccctgagaccttcacccaggaggacatcgaccgggccatcgcctacctgttccccagcggcctgtttgagaagagggcccggcctgtgatgaagcaccctgagcagatcttcccccggcagagggccatccagtggggagaagatggccggcccttccactacctgttctacacaggcaagcagagctactacagcctgatgcatgatgtgtatggcatgctgctgaacctggagaagcaccagagccacctgcaggccaagagcctgctgcctgagaagacagtgaccagagatgtgattggcagccgctggctgatcaaggaggagctggaggagatgctggtggagaagctgagtgacctggactacatgcagttcatccggctgctggagaagctgctgaccagccagtgtggggctgctgaggaggagtttgtgcagcgcttcagaagatctgtgaccctggagagcaagaagcagctgattgagcctgtgcagtatgatgagcagggcatggccttcagcaagtctgagggcaagaggaagacagccaaggccgaggccatcgtgtacaagcacggcagcggccgcatcaaggtgaatggcatcgactaccagctgtacttccccatcacccaggaccgggagcagctgatgttccccttccactttgtggaccggctgggcaagcatgatgtgacctgcaccgtgtctgggggcggccgcagcgcccaggccggggccatccggctggccatggccaaggccctgtgcagctttgtgacagaagatgaggtggagtggatgaggcaggccggcctgctgaccacagacccccgggtgcgggagaggaagaagccaggccaggagggcgcccggaggaagttcacctggaagaagaggtag

SEQ ID NO: 256407 - DNA, 1500 bp, Artificial Sequence
  derived and/or modified sequence
ccgagaagctcttgcacaggacagcctctggaaccccgcgccattagcgcctgcgccgtctctaggccccgccccctcacccctccggtcctggagctcccacagctaacatggcggcgccctgtgtgtcctacggcggagcagtttcgtaccggcttcttctctggggtaggggtagcctcgcccggaagcaaggcctctggaaaaccgcggcccctgagttgcaaacaaatgtcagatcccagatattaaggctaagacatactgcatttgtaataccaaagaaaaacgttcctacctcaaaacgtgaaacttacacagaggattttattaaaaagcagattgaagagttcaacataggaaagagacatttagccaacatgatgggagaagatccagaaactttcactcaagaagatattgacagagctattgcttaccttttcccaagtggtttgtttgagaaacgagccaggccagtaatgaagcatcctgaacagatttttccaagacaaagagcaatccagtggggagaagatggccgtccatttcactatctcttctatactggcaaacagtcatactattcattaatgcatgatgtatatggaatgttactcaatttagaaaaacatcaaagtcacttgcaagccaaaagtctgctcccagaaaaaactgtaaccagagacgtgattggcagcagatggctgattaaggaggaactagaagaaatgttagtggaaaaactgtcagatctagattatatgcagttcattcggctgctagaaaagttattgacatcgcagtgtggtgctgctgaggaagaatttgtgcagaggtttcgaagaagtgtaactcttgaatcaaaaaaacagctgattgaacctgtacagtatgatgagcaaggaatggcctttagcaaaagtgaaggtaaaagaaagactgcaaaagcagaagcaattgtttataaacatggaagtggaagaataaaagtaaatggaattgattaccagctttacttcccgatcacacaggacagagaacagctgatgttccctttccactttgttgaccggctgggaaagcacgacgtgacctgcacagtctcagggggcgggaggtcagcgcaggctggagcaatacgactggcaatggcaaaagccttgtgcagctttgtcaccgaggacgaggtcgagtggatgagacaagctggactacttactactgatccacgtgtgagggaacggaagaagccaggccaagagggagcccgcagaaagtttacgtggaagaaacgctaagggtttgctcccaggaaaggagaggaagagctatatatatgtgccgacatgtggcagacacacagtaaataatggctgaccagcatgagggcagtactgtcagaaatttctttgagctgtgagatggatttatttttaaatgctactttgtaaaggtgacctttaaaaaataaaaggaaaataaagaatgttagtttca

SEQ ID NO: 256408 - DNA, 1191 bp, Artificial Sequence
  derived and/or modified sequence
atggccgccccctgcgtgagctacggcggcgccgtgagctaccggctgctcctgtggggccggggctctctggcccggaaacagggattgtggaaaactgctgcacctgaactgcagacaaatgttaggtcacagatcctacgcttaaggcatacggcctttgttataccaaaaaagaatgtgcccacttctaaacgcgagacctacacggaggacttcattaaaaaacagattgaggaattcaatatcggcaagaggcatttagcaaatatgatgggagaggatcctgagacgttcacacaagaggacatcgatcgggccatcgcttacctgttcccttccggcttgttcgaaaaacgcgccaggcccgtgatgaaacaccccgagcagatctttcctaggcagcgggcaatccagtggggagaggacgggaggcccttccattacttattctacaccggaaaacagtcctattacagcctcatgcacgatgtatatggaatgctgctcaacttggaaaaacatcagtctcatctgcaggccaagagcctgttaccagaaaaaactgtcactcgggatgtcattgggagcagatggttaattaaggaggaactcgaagaaatgcttgtggaaaagctgagtgacctggattatatgcagttcatcagactgttggagaagctcctcacatcacagtgtggggcagcagaggaagagtttgtgcagaggtttagacggagcgtcactctggagtccaaaaagcaactgatcgagccagtgcaatacgatgagcagggcatggcgttctctaaaagtgaggggaagaggaagacggccaaggctgaggccattgtttacaagcatggatctggacggattaaggtgaacgggatcgattaccaactgtatttccctattactcaggatcgggaacagctgatgtttccatttcactttgttgatcgccttggtaaacacgatgtcacctgtacagtgagcggggggggaaggtctgctcaagcaggcgccattagactcgccatggcgaaggctctttgcagcttcgtgactgaagacgaagtggagtggatgcgccaggccggattgctgactaccgacccgagggttcgtgaacgtaaaaaacccggccaagaaggggcacggagaaagttcacctggaaaaaaagatag

SEQ ID NO: 256409 - DNA, 1191 bp, Artificial Sequence
  derived and/or modified sequence
atggctgccccttgcgtgtcatacggcggagccgtgagctatcgtctgcttctctggggtcgcggaagcctcgcacggaagcaaggcctgtggaagacggcggctcctgaactgcagactaacgtgagatcgcaaatactgagactgaggcacactgcctttgttataccaaagaagaacgtgcccacctccaagcgggaaacctacacagaggattttatcaagaagcagattgaagaattcaatatcggaaaacggcacttagcaaacatgatgggagaagaccctgaaacattcacccaggaggacatagaccgcgcaatcgcctatttgtttcctagcggtctttttgaaaagcgcgctaggcctgtgatgaaacaccctgagcagatttttccccgacaacgcgcaatacagtggggcgaagatggtaggcccttccattatcttttttacacgggaaagcaaagctattacagccttatgcatgacgtatatgggatgctattaaacctcgaaaaacatcagtctcacctgcaggcaaaaagcctgctccctgagaagacggtgactagagacgttattggaagtagatggctgatcaaagaggagctggaggagatgcttgtggaaaaactgtccgacctggactacatgcaatttatacgcctcctcgaaaagcttctcacttctcagtgtggagctgctgaggaagagttcgtgcagaggttccggaggtcagttaccctggagtctaagaagcagctcattgagcccgtgcaatatgacgagcagggcatggcattcagcaaaagtgaagggaagcgtaaaaccgcaaaggcggaggcaatagtgtacaagcatggcagcgggaggattaaagtaaacggaatcgattatcagttgtactttccgataacacaggatcgagagcaactgatgtttcccttccacttcgtcgatcgcttaggaaagcacgacgtgacttgtacggtgtcagggggaggccgatccgcgcaggcaggcgctattcgactcgcaatggccaaggccctatgcagcttcgttactgaagacgaggtggaatggatgcgacaggcagggctccttacaacagaccctagggttagggagaggaagaaaccagggcaagagggcgctcgtcgcaagttcacatggaaaaaaaggtag

SEQ ID NO: 256410 - DNA, 1191 bp, Artificial Sequence
  derived and/or modified sequence
atggccgccccctgcgtgagctacggcggcgccgtgagctacagactgctgctgtggggcagaggcagcctggccagaaagcagggcctgtggaagaccgccgcccccgagctgcagaccaacgtgagaagccagatcctgagactgagacacaccgccttcgtgatccccaagaagaacgtgcccaccagcaagagagagacctacaccgaggacttcatcaagaagcagatcgaggagttcaacatcggcaagagacacctggccaacatgatgggcgaggaccccgagaccttcacccaggaggacatcgacagagccatcgcctacctgttccccagcggcctgttcgagaagagagccagacccgtgatgaagcaccccgagcagatcttccccagacagagagccatccagtggggcgaggacggcagacccttccactacctgttctacaccggcaagcagagctactacagcctgatgcacgacgtgtacggcatgctgctgaacctggagaagcaccagagccacctgcaggccaagagcctgctgcccgagaagaccgtgaccagagacgtgatcggcagcagatggctgatcaaggaggagctggaggagatgctggtggagaagctgagcgacctggactacatgcagttcatcagactgctggagaagctgctgaccagccagtgcggcgccgccgaggaggagttcgtgcagagattcagaagaagcgtgaccctggagagcaagaagcagctgatcgagcccgtgcagtacgacgagcagggcatggccttcagcaagagcgagggcaagagaaagaccgccaaggccgaggccatcgtgtacaagcacggcagcggcagaatcaaggtgaacggcatcgactaccagctgtacttccccatcacccaggacagagagcagctgatgttccccttccacttcgtggacagactgggcaagcacgacgtgacctgcaccgtgagcggcggcggcagaagcgcccaggccggcgccatcagactggccatggccaaggccctgtgcagcttcgtgaccgaggacgaggtggagtggatgagacaggccggcctgctgaccaccgaccccagagtgagagagagaaagaagcccggccaggagggcgccagaagaaagttcacctggaagaagagatag

SEQ ID NO: 256411 - protein, 2920 aa, Artificial Sequence
  derived and/or modified sequence
MRGRRGRPPKQPAAPAAERCAPAPPPPPPPPTSGPIGGLRSRHRGSSRGRWAAAQAEVAPKTRLSSPRGGSSSRRKPPPPPPAPPSTSAPGRGGRGGGGGRTGGGGGGGHLARTTAARRAVNKVVYDDHESEEEEEEEDMVSEEEEEEDGDAEETQDSEDDEEDEMEEDDDDSDYPEEMEDDDDDASYCTESSFRSHSTYSSTPGRRKPRVHRPRSPILEEKDIPPLEFPKSSEDLMVPNEHIMNVIAIYEVLRNFGTVLRLSPFRFEDFCAALVSQEQCTLMAEMHVVLLKAVLREEDTSNTTFGPADLKDSVNSTLYFIDGMTWPEVLRVYCESDKEYHHVLPYQEAEDYPYGPVENKIKVLQFLVDQFLTTNIAREELMSEGVIQYDDHCRVCHKLGDLLCCETCSAVYHLECVKPPLEEVPEDEWQCEVCVAHKVPGVTDCVAEIQKNKPYIRHEPIGYDRSRRKYWFLNRRLIIEEDTENENEKKIWYYSTKVQLAELIDCLDKDYWEAELCKILEEMREEIHRHMDITEDLTNKARGSNKSFLAAANEEILESIRAKKGDIDNVKSPEETEKDKNETENDSKDAEKNREEFEDQSLEKDSDDKTPDDDPEQGKSEVGDFKSEKSNGELSESPGAGKGASGSTRIITRLRNPDSKLSQLKSQQVAAAAHEANKLFKEGKEVLVVNSQGEISRLSTKKEVIMKGNINNYFKLGQEGKYRVYHNQYSTNSFALNKHQHREDHDKRRHLAHKFCLTPAGEFKWNGSVHGSKVLTISTLRLTITQLENNIPSSFLHPNWASHRANWIKAVQMCSKPREFALALAILECAVKPVVMLPIWRESLGHTRLHRMTSIEREEKEKVKKKEKKQEEEETMQQATWVKYTFPVKHQVWKQKGEEYRVTGYGGWSWISKTHVYRFVPKLPGNTNVNYRKSLEGTKNNMDENMDESDKRKCSRSPKKIKIEPDSEKDEVKGSDAAKGADQNEMDISKITEKKDQDVKELLDSDSDKPCKEEPMEVDDDMKTESHVNCQESSQVDVVNVSEGFHLRTSYKKKTKSSKLDGLLERRIKQFTLEEKQRLEKIKLEGGIKGIGKTSTNSSKNLSESPVITKAKEGCQSDSMRQEQSPNANNDQPEDLIQGCSESDSSVLRMSDPSHTTNKLYPKDRVLDDVSIRSPETKCPKQNSIENDIEEKVSDLASRGQEPSKSKTKGNDFFIDDSKLASADDIGTLICKNKKPLIQEESDTIVSSSKSALHSSVPKSTNDRDATPLSRAMDFEGKLGCDSESNSTLENSSDTVSIQDSSEEDMIVQNSNESISEQFRTREQDVEVLEPLKCELVSGESTGNCEDRLPVKGTEANGKKPSQQKKLEERPVNKCSDQIKLKNTTDKKNNENRESEKKGQRTSTFQINGKDNKPKIYLKGECLKEISESRVVSGNVEPKVNNINKIIPENDIKSLTVKESAIRPFINGDVIMEDFNERNSSETKSHLLSSSDAEGNYRDSLETLPSTKESDSTQTTTPSASCPESNSVNQVEDMEIETSEVKKVTSSPITSEEESNLSNDFIDENGLPINKNENVNGESKRKTVITEVTTMTSTVATESKTVIKVEKGDKQTVVSSTENCAKSTVTTTTTTVTKLSTPSTGGSVDIISVKEQSKTVVTTTVTDSLTTTGGTLVTSMTVSKEYSTRDKVKLMKFSRPKKTRSGTALPSYRKFVTKSSKKSIFVLPNDDLKKLARKGGIREVPYFNYNAKPALDIWPYPSPRPTFGITWRYRLQTVKSLAGVSLMLRLLWASLRWDDMAAKAPPGGGTTRTETSETEITTTEIIKRRDVGPYGIRSEYCIRKIICPIGVPETPKETPTPQRKGLRSSALRPKRPETPKQTGPVIIETWVAEEELELWEIRAFAERVEKEKAQAVEQQAKKRLEQQKPTVIATSTTSPTSSTTSTISPAQKVMVAPISGSVTTGTKMVLTTKVGSPATVTFQQNKNFHQTFATWVKQGQSNSGVVQVQQKVLGIIPSSTGTSQQTFTSFQPRTATVTIRPNTSGSGGTTSNSQVITGPQIRPGMTVIRTPLQQSTLGKAIIRTPVMVQPGAPQQVMTQIIRGQPVSTAVSAPNTVSSTPGQKSLTSATSTSNIQSSASQPPRPQQGQVKLTMAQLTQLTQGHGGNQGLTVVIQGQGQTTGQLQLIPQGVTVLPGPGQQLMQAAMPNGTVQRFLFTPLATTATTASTTTTTVSTTAAGTGEQRQSKLSPQMQVHQDKTLPPAQSSSVGPAEAQPQTAQPSAQPQPQTQPQSPAQPEVQTQPEVQTQTTVSSHVPSEAQPTHAQSSKPQVAAQSQPQSNVQGQSPVRVQSPSQTRIRPSTPSQLSPGQQSQVQTTTSQPIPIQPHTSLQIPSQGQPQSQPQVQSSTQTLSSGQTLNQVTVSSPSRPQLQIQQPQPQVIAVPQLQQQVQVLSQIQSQVVAQIQAQQSGVPQQIKLQLPIQIQQSSAVQTHQIQNVVTVQAASVQEQLQRVQQLRDQQQKKKQQQIEIKREHTLQASNQSEIIQKQVVMKHNAVIEHLKQKKSMTPAEREENQRMIVCNQVMKYILDKIDKEEKQAAKKRKREESVEQKRSKQNATKLSALLFKHKEQLRAEILKKRALLDKDLQIEVQEELKRDLKIKKEKDLMQLAQATAVAAPCPPVTPAPPAPPAPPPSPPPPPAVQHTGLLSTPTLPAASQKRKREEEKDSSSKSKKKKMISTTSKETKKDTKLYCICKTPYDESKFYIGCDRCQNWYHGRCVGILQSEAELIDEYVCPQCQSTEDAMTVLTPLTEKDYEGLKRVLRSLQAHKMAWPFLEPVDPNDAPDYYGVIKEPMDLATMEERVQRRYYEKLTEFVADMTKIFDNCRYYNPSDSPFYQCAEVLESFFVQKLKGFKASRSHNNKLQSTAS

SEQ ID NO: 256412 - DNA, 8763 bp, Artificial Sequence
  derived and/or modified sequence
atgcgtggcaggcgaggacggcctcctaaacagccagcggcaccggctgccgagcgatgtgctcccgcccctccccccccccctccacccccaactagcggaccaattggaggactgcggagcagacatcgtggaagttcaaggggaagatgggcagccgcacaagccgaggtcgcccctaaaacccgccttagcagtccccgtggagggagcagttcccgtcgcaaacctcctccaccccctcccgccccaccttctaccagtgctccaggtcgcggtggccggggcggtgggggagggcgcacggggggaggaggggggggcggccacctggcacgcacaaccgcagctcgtcgggccgtgaataaagtcgtgtatgatgatcatgaaagcgaggaagaagaagaggaagaggacatggtgtctgaggaggaggaagaagaggatggggacgcagaggagacacaggattccgaggatgatgaagaagacgaaatggaggaagacgatgatgattctgattatcctgaggagatggaggacgacgatgacgatgcctcttactgtactgaatcctcctttaggtcccactctacatactcgtccaccccaggacgcagaaagcctcgtgtccatcgtccaagaagccctattctagaggagaaggatatccctccactcgagttcccgaagtctagcgaagatctgatggttcctaacgagcacattatgaacgtgatcgccatttacgaagtgctcaggaattttgggactgtcctgaggctttcccccttccggtttgaggacttctgcgcagccctcgtatcacaagagcagtgtacactgatggctgagatgcatgtggtcttactgaaagccgtattgagagaggaagacactagcaacaccacatttggcccagccgatttaaaggacagcgtgaattcaacgctgtacttcatcgatggaatgacttggcctgaagtgctgcgcgtgtattgtgaaagtgataaggagtaccaccacgttctgccatatcaggaggctgaggactacccatacggtcccgtggagaataagatcaaagtcctgcagtttctcgtagatcagttcctgacaacaaacattgctcgggaggagcttatgagcgaaggggtgatccagtacgacgatcactgccgggtctgtcacaagctgggcgatctactatgctgcgagacctgttccgccgtataccatctggaatgcgtaaagcctcctctggaagaggttcccgaagatgaatggcagtgcgaggtgtgcgtggctcataaagtgccaggtgtcactgactgtgtagctgagatccagaaaaacaagccatacatacgccacgaacctattggctatgatcgctctagacggaaatattggtttctcaatagaaggctgatcatagaagaggatactgagaacgagaacgagaagaaaatctggtactatagtactaaggttcagcttgcggagctcattgactgcctggataaggactattgggaggccgaactgtgcaaaattcttgaggaaatgagagaggagattcataggcacatggatatcaccgaagaccttacgaacaaagcccgggggtcaaataagtcttttcttgccgccgctaacgaggaaatcctggagagcatcagggccaaaaagggggacattgacaacgttaaatctcccgaagagaccgagaaggataagaatgaaacagagaatgattcgaaagatgcagaaaagaatcgcgaagaattcgaagaccagagtctcgaaaaggactccgatgataagactccggacgacgatcccgaacagggcaaaagtgaggtcggcgactttaaatcagaaaagagcaatggggagttgtctgaaagccccggagctgggaaaggagctagtggcagcacccggattataacaagactccgcaaccccgattctaagctcagtcagttgaaatctcagcaagtggctgcggcagctcacgaagcgaataaactgtttaaggaaggaaaagaggttctggtggtaaatagtcagggcgaaattagtcgtctatccaccaagaaagaagtgataatgaaaggtaacattaacaactactttaaactagggcaggagggaaaatacagagtataccataaccaatatagcactaattcttttgcactgaataagcatcagcacagagaggatcacgacaaacgacgtcacctggctcataagttctgccttacgcccgctggcgaattcaagtggaatggctccgtgcacggttccaaagtactgactataagtacgctaaggctgacaatcacccagctcgaaaacaacatcccttcctccttcctccatcctaattgggctagtcatcgggcaaactggataaaggccgtgcagatgtgtagcaagcctcgggagtttgcactggcacttgccatactcgagtgcgcagtaaagcctgtagttatgttgcctatttggagggagagcctaggccacaccagactgcataggatgacttcaattgagcgggaggagaaggagaaagtgaagaaaaaagaaaagaagcaagaagaggaagaaaccatgcagcaggctacctgggtgaaatacacatttcccgtgaaacaccaggtgtggaagcagaagggtgaggaatatcgcgtcacggggtacggtgggtggagttggatctcaaagacgcatgtttatcgcttcgtgcctaaattgcccggtaataccaacgtgaattaccgtaagtcactggaaggtacaaaaaataacatggacgaaaacatggacgagagtgataagaggaaatgttcgcgatcccccaagaaaatcaagatcgagccagattccgagaaagatgaggtgaaggggtccgatgcggcaaagggcgctgatcagaatgagatggacatctcaaagataaccgagaaaaaggaccaggatgtgaaggagctgctggacagcgattctgacaagccttgtaaggaggagccaatggaagtagacgacgacatgaagactgaatcacacgtcaattgtcaggagagcagtcaggtggatgtggtgaatgtgagcgaaggttttcatctgaggacctcatataaaaagaagactaaatccagcaaattagatgggctgctcgagagacgcatcaagcaattcacacttgaagagaagcaacggctggagaaaattaagctggagggaggtattaaaggaataggaaagactagcactaattcatcaaaaaacctgtccgagtcccccgtgattactaaagcaaaagagggctgtcagagtgactcaatgcgccaggaacagtcccccaacgccaacaacgaccagccagaggatctcatccaaggatgttctgaaagcgactcgtccgtcctccgcatgagcgacccttcccacaccactaataaattatatccaaaggacagagtgctcgatgacgtgtccattaggagccccgaaaccaagtgtcccaagcagaattccatcgagaacgatatcgaggagaaagtgtccgacctggcctcaagagggcaggagccaagcaagtccaaaaccaagggcaatgacttctttatagatgacagtaagttagcgtcagctgatgatatcggcacattgatctgcaagaataaaaagcccttgattcaagaggaatcggacacaattgtgagttcatcaaagtcggccctgcactcctccgtgcccaaatctaccaacgatcgcgacgccacaccgctcagtcgcgctatggatttcgaaggaaaattgggctgcgatagcgagtccaatagcacacttgaaaatagtagtgatactgtgtccatacaagatagcagtgaggaagatatgatcgtgcagaacagcaatgagtcaatcagtgagcagtttcggaccagagagcaagatgttgaggttttggagccccttaagtgcgagctagtgagcggcgagtcaacaggaaattgtgaagaccgacttcccgtgaaaggcaccgaggccaatggcaagaagccctcgcagcaaaagaaactggaggagaggcccgtgaataaatgttctgatcagattaaactcaagaacaccacagacaagaagaacaacgagaacagggaaagcgaaaagaaggggcaacgcacgagcactttccagattaacggaaaggacaacaaaccaaaaatctacctgaagggtgagtgcctgaaggaaatttctgagtcacgggtcgtatcagggaacgttgagcctaaggtcaataacataaacaaaattatccccgaaaatgacataaaatcgctgactgtgaaggaatcggctatccgccccttcattaacggagatgtgatcatggaagacttcaacgagagaaatagttcagagaccaaaagccaccttctgagcagctccgacgcggagggaaactaccgcgattccttggagactctgccgtcgacaaaggagagcgactcaacacagactactaccccttcggccagctgcccagaatctaactccgtcaatcaggtagaagatatggagattgagacaagcgaggtgaaaaaagtgacatcctctcctattaccagcgaagaggagagcaacttaagcaatgacttcatagatgagaacggactgccaataaacaagaacgagaatgttaacggcgaaagtaagcgtaaaacagtcattaccgaagtgacgactatgacctctaccgtggccacagagtcaaagacagtgatcaaggtggaaaagggggacaagcagaccgtcgtgtcctcaactgagaactgcgccaaatctaccgtgaccaccaccaccaccaccgttaccaaactgagtactccaagcactggaggctctgtggatattatatccgttaaggagcagagcaaaactgtggtgaccactactgttaccgacagcttgactactaccggtggcaccctggtgacaagcatgaccgttagtaaagagtacagcacaagggataaggttaaattaatgaaattcagccggccaaaaaagaccagaagtggcacagccctgccttcctaccggaagttcgtaactaagagtagtaagaagagcatcttcgtgctgcccaacgatgatctcaagaagctcgccagaaagggtggtattcgggaagttccctactttaactataatgcgaagccagctttggacatctggccctatccaagccccaggcctacgttcggcataacctggagatacagactgcaaactgtgaaaagcctggctggcgtttctcttatgcttcgcttgctttgggcctccctgaggtgggatgacatggccgctaaggctccacctgggggaggtactactagaacagagaccagcgagaccgagatcaccactaccgaaatcatcaagaggcgagacgtcggtccttacggcatcaggtcagaatattgcatacgcaaaatcatttgtcccatcggggttccagaaaccccgaaggagacacctaccccacagcgcaagggattgaggagttcggctctgagaccaaagagacccgagacccctaagcagaccgggcctgtgattatcgaaacatgggtggcggaggaggagcttgaattatgggaaatcagagcattcgctgagagagtggaaaaagaaaaagcccaggctgtggagcagcaggctaagaaacggctggagcaacagaaacccacagtaatcgctaccagtacgacctctcccacatcaagcaccacctcgacaatttccccggcccagaaggtcatggtcgcccctattagtggcagtgtcaccacaggaaccaagatggtattaaccaccaaggtgggtagcccagccacagtgacattccaacagaacaagaatttccatcagacctttgccacctgggtaaagcaggggcagtccaacagcggtgtggtgcaggtgcagcagaaagtgctcggtatcatacccagctctaccggcacttctcagcagacatttacctcctttcagcccagaactgcaaccgtgaccatacgtccaaacacatcaggttccggcgggaccactagtaactcacaggtgatcaccggaccccagatccgcccgggtatgacagtgatccgcactccacttcagcagtcaactctaggaaaagcaataatcaggacccctgtcatggtgcagcccggagcaccacagcaagttatgacccagattatcagagggcagcctgtgtccactgcggtgagcgcccccaacacagtctcctcaacgcctggccaaaaaagcctgacctctgctaccagcacatctaatatccagtcttccgcctcccaaccacctcggcctcagcaaggccaggtgaagctgaccatggcccagctgacccagttgactcaaggacacggaggaaatcaaggcttgacggtagtcatccaggggcagggccaaacgactggtcagcttcagctgattccccaaggagtgaccgttctgccaggccccggacagcagctcatgcaggctgctatgccaaacggcacggtgcagaggtttctgtttacacctctggccacgaccgctactacagcctccacaacaaccactactgtgagtactacggccgcagggaccggcgagcaacggcaaagtaagctaagcccacaaatgcaggtccaccaagacaagacgctgcctcctgctcaaagtagttcggtgggaccagctgaggcacagcctcagaccgctcagccatctgcccagccacagccccagacccagccgcagtcccctgcccagcctgaggtccagacacagccagaggttcagacccaaacgaccgtgagctctcacgtgcctagtgaggcacagcctacccatgctcaaagcagcaagccgcaggtcgctgcacagagtcaacctcagagcaacgttcagggccaaagccctgtgagagtccagtctccatcacagacccgaatacgccccagcactccctcgcaattatctccaggccagcagtctcaggtccaaactacaacatcccagcccattccaatccaaccacacacttcactgcagatcccttcccagggacagccccaaagtcagccccaggtgcagtcttcaacacagacactttcttccgggcaaacgctaaatcaggtgaccgtgagcagcccgtcgcggccacagctgcagatccagcagccccagcctcaggtaatcgctgtgccccagcttcagcaacaggttcaggtgctgagccagattcaatctcaggtggtcgctcagatccaggcacagcagtcaggcgtgcctcagcagattaagctgcagctgcctattcaaatccagcagtcttccgctgtgcagactcatcagatacagaacgtggtcacagttcaggctgcctccgttcaggagcagctgcagcgggtgcagcaactgagggatcagcagcaaaagaagaagcaacagcagatcgaaattaagcgtgagcatacactccaagcgtcaaatcaatctgaaatcatccagaaacaggtagtgatgaaacacaatgcggtgatcgaacacctgaagcagaaaaagtcaatgactccagccgagcgcgaggagaatcaaagaatgatcgtgtgtaatcaagtgatgaagtatattttggataaaatcgataaggaagagaagcaggccgcgaaaaagagaaagcgcgaggaaagcgttgagcaaaagagaagcaaacaaaatgccaccaagctgtccgccctgttatttaagcataaggaacagcttcgagctgagattcttaagaaacgcgcactactggacaaagatctccaaatcgaggtccaggaggagctgaaaagggacctaaaaataaagaaagagaaggatcttatgcagctcgcccaggctaccgctgtggcggcaccatgtcctccagtcacacccgcgcctcctgctccccccgcccctccgcctagcccaccaccccctcccgctgtgcaacacacagggttgctgtcaacccctaccttgcccgcagcatcccaaaagcggaagagggaagaggaaaaggactcttcctcaaagtccaagaagaagaagatgattagcaccacctccaaagagacaaagaaagacacaaaactctactgcatctgtaaaaccccctatgatgagtcaaagttttacatcgggtgcgatcgctgccagaactggtatcacggacgctgcgtcggaattctgcagtccgaggccgagctgatcgatgaatatgtgtgcccacagtgtcaaagcacagaggatgcaatgactgtactgactccactgactgaaaaggattacgagggactgaagcgggtcctgcgtagtttacaggcacacaaaatggcctggccctttctcgagccagttgatcctaacgacgcacctgattactacggcgttatcaaagagccgatggacctggccacaatggaggagcgggtgcagcgacggtattacgagaagttgacagagttcgtcgcagacatgaccaaaatattcgacaattgcaggtactacaacccaagcgatagccctttctatcagtgtgccgaagtcctagaaagtttcttcgtgcagaagttgaaggggttcaaggcttctcggagtcataacaataaactccagtctaccgcctcttag

SEQ ID NO: 256413 - DNA, 8763 bp, Artificial Sequence
  derived and/or modified sequence
atgaggggccggcggggccggccccccaagcagcctgctgccccagctgctgagcgctgtgccccagcccctcctcctcctcctcctccacccaccagcggccccatcggcggcctgcggagccgccaccggggcagcagccggggccgctgggccgccgcccaggccgaggtggcccccaagacccggctgagcagcccccggggcggcagcagcagcaggaggaagcccccacctcctcctccagccccacccagcaccagcgcccctggccggggcggccggggcggcggcggcggccgcactggaggcggcggcggcggcggccacctggcccggaccacagctgcccggcgggctgtgaacaaggtggtgtatgatgaccatgaaagtgaggaggaggaggaggaggaggacatggtgtctgaggaggaggaggaggaggatggagatgctgaggagacccaggacagtgaagatgatgaagaagatgagatggaggaggatgatgatgacagcgactacccagaggagatggaggatgatgatgatgatgccagctactgcacagagagcagcttccgcagccacagcacctacagcagcaccccaggccgcaggaagccccgggtgcaccggcccaggagccccatcctggaggagaaggacatcccccccctggagttccccaagagcagcgaggacctgatggtgcccaatgagcacatcatgaatgtgattgccatctatgaggtgctgaggaactttggcaccgtgctgcggctgagccccttccgctttgaggacttctgtgccgccctggtgtcccaggagcagtgcaccctgatggccgagatgcacgtggtgctgctgaaggctgtgctgcgggaggaggacaccagcaacaccacctttggacctgctgacctgaaggacagcgtgaacagcaccctgtacttcattgatggcatgacctggccagaggtgctgcgggtgtactgtgagagtgacaaggagtaccaccacgtgctgccctaccaggaggccgaggactacccctacggccctgtggagaacaagatcaaggtgctgcagttcctggtggaccagttcctgaccaccaacatcgcccgggaggagctgatgtctgaaggagtcatccagtatgatgaccactgccgggtgtgccacaagctgggggacctgctgtgctgtgagacctgcagcgctgtgtaccacctggagtgtgtgaagccacccctggaggaggtgcctgaagatgagtggcagtgtgaggtgtgtgtggcccacaaggtgcctggggtgacagactgtgtggccgagatccagaagaacaagccctacatcagacatgagcccatcggctatgacaggagcaggaggaagtactggttcctgaacagaagactcatcatcgaggaggacacagaaaatgaaaatgagaagaagatctggtactacagcaccaaggtgcagctggccgagctgattgactgcctggacaaggactactgggaggccgagctgtgcaagatcctggaggagatgagggaggagatccaccgccacatggacatcacagaggacctgaccaacaaggcccggggcagcaacaagagcttcctggccgccgccaatgaggagatcctggagagcatccgggccaagaagggggacatcgacaacgtgaagagccctgaggagacagagaaggacaagaatgaaacagaaaatgacagcaaggatgctgagaagaaccgggaggagtttgaggaccagagcctggagaaggacagtgatgacaagaccccagatgatgatcctgagcagggcaagtctgaggtgggggacttcaagtctgagaagagcaatggagagctgtctgagagccctggggccggcaagggggccagcggcagcacccgcatcatcacccggctgagaaatccagacagcaagctgagccagctgaagagccagcaggtggccgccgccgcccacgaggccaacaagctgttcaaggagggcaaggaggtgctggtggtgaacagccagggcgagatcagccggctgagcaccaagaaggaggtgatcatgaagggcaacatcaacaactacttcaagctgggccaggagggcaagtacagagtgtaccacaaccagtacagcaccaacagctttgccctgaacaagcaccagcacagagaagatcatgacaagaggaggcacctggcccacaagttctgcctgaccccagctggggagttcaagtggaatggatctgtgcacggcagcaaggtgctgaccatcagcaccctgcggctgaccatcacccagctggagaacaacatccccagcagcttcctgcaccccaactgggccagccaccgggccaactggatcaaggctgtgcagatgtgcagcaagccccgggagtttgccctggccctggccatcctggagtgtgctgtgaagcctgtggtgatgctgcccatctggagggagagcctgggccacacccggctgcacaggatgaccagcattgagcgggaggagaaggagaaggtgaagaagaaggagaagaagcaggaggaggaggagaccatgcagcaggccacctgggtgaagtacaccttccctgtgaagcaccaggtgtggaagcagaagggggaggagtacagagtgacaggctatggaggctggagctggatcagcaagacccacgtgtacagatttgtgcccaagctgcccggcaacaccaacgtgaactacaggaagagcctggagggcaccaagaacaacatggatgagaacatggatgaaagtgacaagaggaagtgcagccgcagccccaagaagatcaagattgaaccagattctgagaaggatgaggtgaagggcagtgatgctgccaagggagctgaccagaatgagatggacatcagcaagatcacagagaagaaggaccaggatgtgaaggagctgctggacagcgacagcgacaagccctgcaaggaggagcccatggaggtggatgatgacatgaagacagagagccacgtgaactgccaggagagcagccaggtggatgtggtgaatgtgtctgagggcttccacctgcggaccagctacaagaagaagaccaagagcagcaagctggatggcctgctggagcggcgcatcaagcagttcaccctggaggagaagcagaggctggagaagatcaagctggagggcggcatcaagggcatcggcaagaccagcaccaacagcagcaagaacctgtctgagagccctgtgatcaccaaggccaaggagggctgccagagcgacagcatgaggcaggagcagagccccaatgccaacaatgaccagcctgaggacctgatccagggctgcagcgagagtgacagctctgtgctgaggatgtctgaccccagccacaccaccaacaagctgtaccccaaggacagagtgctggatgatgtgtccatccgcagccctgagaccaagtgccccaagcagaacagcattgaaaatgacatcgaggagaaggtgtctgacctggccagccggggccaggagcccagcaagagcaagaccaagggaaatgacttcttcattgatgacagcaagctggccagcgcagatgacatcggcaccctcatctgcaagaacaagaagcccctcatccaggaggagagtgacaccatcgtgagcagcagcaagagcgccctgcacagctctgtgcccaagagcaccaatgacagagatgccacccccctgagccgggccatggactttgagggcaagctgggctgtgacagcgagagcaacagcaccctggagaacagcagtgacacagtgtccatccaggacagcagcgaggaggacatgattgtgcagaacagcaatgaaagcatcagcgagcagttccgcacccgggagcaggatgtggaggtgctggagcccctgaagtgtgagctggtgtctggagagagcacaggcaactgtgaggaccggctgcctgtgaagggcacagaggccaacgggaagaagcccagccagcagaagaagctggaggagaggcctgtgaacaagtgcagcgaccagatcaagctgaagaacaccacagacaagaagaacaatgaaaatcgggagagcgagaagaagggccagaggaccagcaccttccagatcaacgggaaggacaacaagcccaagatctacctgaagggagaatgtctgaaggagatcagcgagagccgggtggtgtctggaaatgtggagcccaaggtgaacaacatcaacaagatcatcccagaaaatgacatcaagagcctgactgtgaaggagagcgccatccggcccttcatcaatggagatgtgatcatggaggacttcaatgaaagaaacagcagcgagaccaagagccacctgctgagcagcagtgatgctgagggcaactacagagacagcctggagaccctgcccagcaccaaggagagtgacagcacccagaccaccaccccatctgccagctgcccagagagcaacagcgtgaaccaggtggaggacatggagattgagaccagcgaggtgaagaaggtgaccagcagccccatcaccagcgaggaggagagcaacctgagcaatgacttcattgatgaaaatggcctgcccatcaacaagaatgaaaatgtgaatggagagagcaagaggaagacagtcatcacagaggtgaccaccatgaccagcacagtggccacagagagcaagacagtcatcaaggtggagaagggggacaagcagacagtggtgagcagcacagagaactgtgccaagagcacagtgaccaccaccaccaccaccgtgaccaagctgagcacccccagcactggaggctctgtggacatcatctctgtgaaggagcagagcaagacagtggtgaccaccaccgtgacagacagcctgaccaccaccggcggcaccctggtgacctccatgacagtgtccaaggagtacagcacccgggacaaggtgaagctgatgaagttcagccggcccaagaagaccaggtctggaacagccctgcccagctacaggaagtttgtgaccaagagcagcaagaagagcatctttgtgctgcccaatgatgacctgaagaagctggccaggaagggcggcatccgggaggtgccctacttcaactacaatgccaagccagccctggacatctggccctaccccagcccccggcccaccttcggcatcacctggagataccgcctgcagacagtgaagagcctggccggcgtgtccctgatgctgcggctgctgtgggccagcctgcgctgggatgacatggccgccaaggcccctcctgggggcggcaccaccaggacagagaccagcgagacagagatcaccaccacagagatcatcaagagaagagatgtgggcccctacggcatccgctctgagtactgcatcaggaagatcatctgccccatcggcgtgcctgagacccccaaggagacccccaccccccagaggaagggcctgcggagcagcgccctgcggcccaagaggcctgagacccccaagcagacaggccctgtgatcatcgagacctgggtggccgaggaggagctggagctgtgggagatccgggcctttgctgagcgggtggagaaggagaaggcccaggccgtggagcagcaggccaagaagaggctggagcagcagaagcccaccgtcatcgccaccagcaccaccagccccaccagcagcaccaccagcaccatcagccctgcccagaaggtgatggtggcccccatcagcggctctgtgaccaccggcaccaagatggtgctgaccaccaaggtgggcagccctgccaccgtgaccttccagcagaacaagaacttccaccagacctttgccacctgggtgaagcagggccagagcaacagcggcgtggtgcaggtgcagcagaaggtgctgggcatcatccccagcagcacaggcaccagccagcagaccttcaccagcttccagcccaggacagccaccgtgaccatccggcccaacaccagcggcagcggcggcaccaccagcaacagccaggtgatcaccggcccccagatccggcccggcatgaccgtcatccgcacccccctgcagcagagcaccctgggcaaggccatcatccgcacccctgtgatggtgcagcccggggccccccagcaggtgatgacccagatcatccggggccagcctgtgtccacagctgtgtctgcccccaacacagtgagcagcaccccaggccagaagagcctgaccagcgccaccagcaccagcaacatccagagcagcgccagccagcccccccggccccagcagggccaggtgaagctgaccatggcccagctgacccagctgacccagggccatggaggcaaccagggcctgactgtggtgatccagggccagggccagaccaccggccagctgcagctgatcccccagggcgtgacagtgctgcccggccctggccagcagctgatgcaggccgccatgcccaatggaacagtgcagcgcttcctgttcacccccctggccaccacagccaccacagccagcaccaccaccaccaccgtgtccaccacagctgctggcactggagagcagaggcagagcaagctgagcccccagatgcaggtgcaccaggacaagaccctgcccccagcccagagcagctctgtgggccctgctgaggcccagccccagacagcccagcccagcgcccagccccagccccagacccagccccagagccctgcccagcctgaggtgcagacccagcctgaggtgcagacccagaccaccgtgagcagccacgtgcccagcgaggcccagcccacccacgcccagagcagcaagccccaggtggccgcccagagccagccccagagcaatgtgcagggccagagccctgtgcgggtgcagagccccagccagacccgcatccggcccagcacccccagccagctgagccctggccagcagagccaggtgcagaccaccaccagccagcccatccccatccagccccacaccagcctgcagatccccagccagggccagccccagagccagccccaggtgcagagcagcacccagaccctgagcagcggccagaccctgaaccaggtgacagtgagcagccccagccggccccagctgcagatccagcagccccagccccaggtgattgctgtgccccagctgcagcagcaggtgcaggtgctgagccagatccagagccaggtggtggcccagatccaggcccagcagagcggcgtgccccagcagatcaagctgcagctgcccatccagatccagcagagcagcgctgtgcagacccaccagatccagaatgtggtgacagtgcaggccgcctctgtgcaggagcagctgcagagggtgcagcagctgcgggaccagcagcagaagaagaagcagcagcagatcgagatcaagcgggagcacaccctgcaggccagcaaccagagcgagatcatccagaagcaggtggtgatgaagcacaatgctgtgattgagcacctgaagcagaagaagtccatgaccccagctgagcgggaggagaaccagaggatgattgtgtgcaaccaggtgatgaagtacatcctggacaagattgacaaggaggagaagcaggccgccaagaagaggaagcgggaggagagcgtggagcagaagaggagcaagcagaatgccaccaagctgagcgccctgctcttcaagcacaaggagcagctgcgggcagagatcctgaagaagagggccctgctggacaaggacctgcagatcgaggtgcaggaggagctgaagagggacctgaagatcaagaaggagaaggacctgatgcagctggcccaggccacagctgtggccgccccctgcccccctgtgaccccagcccccccagcccccccagcccccccacccagccccccacctcctcctgctgtgcagcacacaggcctgctgagcacccccaccctgcctgctgccagccagaagaggaagcgggaggaggagaaggacagcagcagcaagagcaagaagaagaagatgatcagcaccaccagcaaggagaccaagaaggacaccaagctgtactgcatctgcaagaccccctatgatgagagcaagttctacatcggctgtgaccgctgccagaactggtaccacggccgctgtgtgggcatcctgcagagcgaggccgagctgattgatgaatatgtgtgcccccagtgccagagcacagaagatgccatgacagtgctgacccccctgacagagaaggactatgagggcctgaagagggtgctgcggagcctgcaggcccacaagatggcctggcccttcctggagcctgtggaccccaatgatgccccagactactatggagtcatcaaggagcccatggacctggccaccatggaggagcgggtgcagaggcgctactatgagaagctgacagaatttgtggccgacatgaccaagatctttgacaactgccgctactacaaccccagcgacagccccttctaccagtgtgccgaggtgctggagagcttctttgtgcagaagctgaagggcttcaaggccagccgcagccacaacaacaagctgcagagcacagccagctag

SEQ ID NO: 256414 - DNA, 8763 bp, Artificial Sequence
  derived and/or modified sequence
atgcggggccggcggggccggccccccaagcagcccgccgcccccgccgctgagagatgcgcgcctgccccaccaccacctccacccccgcctaccagtggacctattggtggcctaagatctcgacatcgcggttcaagtaggggcagatgggctgcggcccaggccgaagtggcccctaagacccgcctctcctcccctcggggcggaagttcaagccggcggaaaccccctccccctccacctgccccccccagcaccagcgccccaggcagagggggacgcgggggcggaggcgggcggacagggggcggcgggggcggggggcacctcgctagaactactgctgcacggcgagcagtgaataaggtggtttatgacgaccacgaaagcgaagaggaggaagaagaggaagatatggtcagcgaagaagaagaggaagaagacggtgacgcagaggaaacacaggacagcgaagatgacgaggaggatgagatggaagaagatgatgacgattcagattatcccgaggaaatggaagacgatgacgacgatgcttcctattgcaccgagagttcatttaggagccattcaacttactccagcacaccaggcagaaggaagccacgcgtccatcgaccacgctcacctatcctggaggagaaggatatccctcctctggaattccccaaaagtagcgaagatttgatggtgccgaatgagcatattatgaacgtaattgccatttacgaggtcctgcggaactttggaacggttctcaggctatcgccattcagatttgaagatttttgtgcagctctcgtatcccaggagcagtgcaccctcatggccgaaatgcacgttgtgcttttgaaagcagtcttgcgggaggaagatacatctaacaccacattcggaccagctgatctgaaggacagcgtgaactctaccctgtacttcatcgacggcatgacttggccagaggtcctgcgggtctattgcgagtccgataaggaatatcaccacgtcctgccctaccaggaagctgaggactacccgtacggaccagtcgaaaataagatcaaagtgctgcagtttctggtcgatcagttcttgaccaccaacatagcccgcgaagagctaatgagtgaaggcgtgatccaatatgacgaccattgcagagtatgccataagttaggagacctgctctgttgtgagacttgctccgccgtctaccacctggagtgcgtgaagccgccactggaagaggtgccagaagacgaatggcagtgcgaggtctgtgtcgctcataaggtgcctggcgtcactgattgcgtggctgagattcagaagaataaaccttatatacgacacgaaccaatcggctacgacagatcaaggcggaaatattggttcctgaatcgtcggctgattattgaggaagacacagagaatgagaatgagaagaaaatttggtactacagcactaaggtacaactcgcggaactgatcgattgcctagataaggattactgggaagcggagctgtgcaaaattctagaggaaatgcgtgaagaaatccaccgtcacatggatattactgaggatctgacaaataaagcccgcggcagtaacaagtctttccttgccgccgctaacgaggagatacttgagagcattagagcaaagaagggcgacattgataatgtaaagagtcctgaggagaccgagaaagacaaaaacgagacagagaacgacagtaaggacgccgaaaaaaatcgtgaggagttcgaggatcaatcactggagaaggactctgacgacaaaaccccagatgatgatccggagcaggggaagtcagaggtgggagatttcaaaagtgagaaaagcaatggtgagttaagcgagtctcccggtgccgggaagggcgcaagtgggtcaacccgaattatcactagactgcgaaaccctgatagtaaactaagccagctgaaatcccagcaggtcgcggctgctgctcacgaagccaataagctgttcaaggaaggcaaggaggttctggttgtcaacagccagggagagatcagccgactcagcaccaaaaaagaggtcatcatgaaaggcaacatcaataattatttcaaactcggacaggagggcaagtatcgcgtgtaccataaccagtacagtactaattcttttgccctgaataaacatcagcatagggaggaccacgataaacgtagacatttggcccacaagttttgcctgacccccgcaggcgagtttaaatggaatggaagtgtacacggctcaaaggttctcaccatatctacccttaggttgacaatcacccagctagagaacaatatccctagctcttttttgcatcctaactgggctagccaccgcgccaactggataaaggcagtccagatgtgtagcaaacccagagagttcgccctggcccttgcgattttagagtgtgcagtgaaacccgtcgtgatgttaccaatttggcgtgagtccttggggcacacgcgattacacaggatgacttctatcgagcgcgaggagaaagaaaaagtcaaaaaaaaggaaaaaaagcaggaggaagaggaaaccatgcagcaagccacttgggtcaagtacacctttccggtgaagcaccaggtgtggaaacagaagggcgaagaatatcgggtgacaggttacggtggatggtcatggatctcaaaaactcatgtgtatcgattcgtccctaaactgccgggtaacaccaacgtcaactacagaaagagtctcgagggaactaaaaacaatatggacgagaatatggatgaatccgacaagcgcaagtgctcacgatccccgaagaaaatcaagattgagcctgactctgaaaaagatgaagtcaaaggatctgacgccgccaaaggtgcagatcaaaatgagatggatatttccaagatcactgaaaagaaggaccaggatgtgaaggagctgctggattccgatagcgataagccctgcaaggaagagccaatggaagtagatgacgatatgaagacggagagtcatgtcaattgtcaggagtccagccaggtcgacgtggttaatgttagtgaagggtttcatctgcgcacgagctacaaaaaaaaaacaaagtcctctaaactggatggactgctcgaaagaaggatcaagcaattcaccctggaagagaagcagaggctggagaaaatcaagctggaggggggcattaaaggtatcgggaagacatcgaccaacagctccaagaatctgtccgaaagtcccgtaataactaaggctaaggaggggtgtcagtcagactccatgaggcaggagcaaagcccaaacgccaataacgatcagcccgaagaccttatccaaggctgcagcgaatccgattcctctgtgctgcgaatgagtgatccgagccatactaccaacaagctgtatccgaaagaccgtgtgctcgacgacgtgtcgatccgtagcccagaaacgaagtgcccgaagcaaaactccatcgaaaacgatattgaggaaaaagtgtcagatctggcctcgcgcggacaggaaccatctaagtctaaaaccaaggggaacgacttcttcattgacgattccaagctggctagcgccgatgatatcggaaccctcatctgtaaaaacaagaaacccctaattcaggaggaaagtgacaccatcgttagtagcagtaagagtgccctccacagttccgtgcccaaatctacaaacgaccgggacgctacacccctatcccgagccatggacttcgagggtaaactcggatgcgatagcgagagtaactccacgttagagaactcctccgataccgtttccatccaggatagcagtgaggaggacatgattgtccagaattctaatgaatcaatctcagagcagttccggaccagagaacaggacgtcgaggttctcgagccacttaagtgtgaattggtgagcggggagtctaccgggaattgcgaagatcgccttcccgtaaaaggaactgaggccaatggcaaaaagcctagccagcaaaagaaactggaggagcggccagtaaacaagtgtagcgaccagattaaattgaagaatactaccgataagaagaacaacgaaaaccgcgagtccgagaaaaagggacagagaaccagcacattccaaataaacgggaaggataacaagcccaaaatctaccttaagggagaatgcctgaaggagattagtgagtcccgtgtggtgtccggtaacgttgagcccaaagtgaataatatcaataaaataatcccggagaacgacatcaaatctttgacagttaaggagagtgctatccggccattcattaatggagatgtgatcatggaagactttaacgaaagaaacagttctgaaacaaaatcccaccttctgagtagcagcgatgctgaaggaaattacagagatagtctggagacccttccttctactaaagagtcagactctactcagaccactaccccttctgcaagctgtccagagagtaatagtgtgaatcaggtagaggacatggaaatcgaaacttcagaggtaaagaaagtaacttcttcccctataaccagcgaggaggagtcaaaccttagtaatgacttcatcgatgaaaatggacttccaattaacaagaacgagaacgtcaacggagagagtaagcgcaaaactgtaattactgaagttaccacgatgactagtaccgtcgcaacggagtctaaaacggtgatcaaggtggagaagggggataagcagacagtggtaagcagtacagagaattgtgccaagagtactgttaccacgacgaccactaccgttacaaaacttagcaccccctccaccggcggcagtgttgacattatcagcgtgaaggagcagagtaagacagtggtgacgacgactgtgacagatagtctgaccaccaccggaggaaccttagtgacctcaatgactgtgagtaaagaatactctaccagagacaaggtgaagctgatgaagttcagcagacctaaaaaaactagaagcggcaccgctcttccaagttatcggaaatttgtgacaaaatccagcaagaagtccatttttgtcctgcctaatgatgatctaaagaagttagcgcgcaagggaggcatccgggaagtgccttatttcaattacaacgctaagccggctctggatatctggccttaccctagcccgcggcccacatttggtatcacatggaggtatcgcctgcagacggtgaagtccctcgctggagtcagtttgatgttaagactcctgtgggcttcccttcgctgggatgatatggcagccaaagccccgccgggtggaggcacgacacgcactgaaacatcggaaaccgaaatcaccactacggaaatcattaaacgccgcgatgtaggcccctacggcatacgttcagagtactgcattcggaagattatctgccccatcggagtaccagaaacccccaaggagacaccaacaccgcaacgcaagggcctgaggtcttcagccctgcgaccaaaacgacccgagacacctaaacagacaggacccgtgatcatagagacttgggtggccgaggaggagttggaactgtgggaaatcagagcattcgctgagcgagttgaaaaggagaaagcacaggccgtggaacagcaggccaaaaaacggctcgagcaacaaaagcccaccgtgattgctacttcaaccaccagtcccacctcaagcacgacttccactatcagtccagcccagaaggtgatggtggcccccatttccggatctgtgacaaccggcaccaagatggtgcttacaaccaaggtgggtagccccgctacggttacctttcaacagaacaagaacttccatcagaccttcgccacctgggtcaaacagggacagtccaattcaggcgtagtacaggtccagcagaaagtactggggatcatcccgtccagcaccggcactagtcagcagactttcacatcattccagcctaggaccgctacagtcacaatcaggccaaacacatctggctctggcgggaccacaagcaacagtcaggtgatcactggaccgcaaatccgccctgggatgaccgtaattagaacccccctgcagcaatccaccttggggaaagcgataatacgtaccccagtgatggtccaaccgggtgccccacaacaggtgatgacacagatcatacgcgggcaaccagtgtcaacggccgtctccgcccccaacacagtctcctcaacccccggccagaagtcattaactagtgccacatctacatccaatatccaatcatctgctagtcagcccccgcgccctcaacagggccaagtgaagctgactatggcacagctgacccagttaacccaggggcatggaggcaaccagggcctaacagttgtgattcaaggtcagggacagacgactggacagctgcaacttattccccaaggagtaactgtgttgccaggccccggccagcagctaatgcaggctgctatgcctaacggaacagtgcagcgctttctgtttacaccactcgctactacggccaccacagctagtacaaccactacaaccgtttctactactgcagccgggaccggcgaacagcggcaaagtaagctctcaccccagatgcaggtgcaccaagacaaaactcttcccccggcgcaaagttcctctgttggccccgccgaagcccagccacaaacagcccagccttccgctcagccacagcctcagacccaaccgcagtctccagcccagcccgaggtccagacccagcctgaggtgcagacacagaccaccgtgagctcacatgtaccaagcgaagcccaacccacccatgcccagtcctccaaaccccaagtggcagcccagtctcagcctcagtctaatgtacagggccagtcaccggtcagagtacaatccccctctcagacacgtattagaccaagcacccccagtcagctatctcccgggcagcaaagtcaggtccagactactacatcccaacccattccgatccaaccacacacctcgttgcaaatccctagtcagggacagccccagtcccagccccaagttcaatcatcaacacagactctgagcagcggacagacccttaaccaggtaactgtgagcagccccagtcggccgcagctgcagatccagcaaccccagcctcaagtcatcgcagtaccacagctccagcagcaggtccaggtgctctcccagatccagagtcaggttgtggctcaaattcaggctcagcaatccggcgttccgcagcagattaaactgcagctgcccatccagattcagcaatcctctgccgtacagactcatcagattcagaatgtagtgaccgttcaggcagcaagcgtccaggaacagcttcagcgcgtccagcagttgcgagatcagcagcagaagaagaagcaacagcaaattgagatcaagagggaacacacactgcaggcaagcaaccagtctgagataatacagaagcaggttgtcatgaaacataatgcagtcattgagcatctcaagcagaagaagtccatgacgccagctgagcgagaggagaaccagagaatgattgtctgtaatcaagtgatgaagtatattctggataagatcgacaaggaggagaagcaagccgctaaaaagaggaaacgagaagaatctgttgagcagaaacgttccaagcagaacgcaaccaagctctcagctctccttttcaagcataaagaacagctgcgcgccgagattctcaaaaaaagagcgcttcttgacaaagacctccagatcgaagttcaggaagaattgaagcgcgatttgaaaatcaaaaaggaaaaggacctcatgcagttagcccaggctacggccgtcgctgccccctgtcctcctgtcaccccagctccaccggcgcccccggcccctccaccttccccacccccaccccccgcagtgcagcatactggactgctgagcactcccacgcttccagctgcatctcaaaagcggaaaagagaggaagagaaagacagctctagtaagagcaaaaaaaagaagatgatctctacaacttccaaagagactaagaaggatacaaaactgtattgcatctgtaagaccccgtatgacgagtccaagttctatatcggttgtgaccgttgccaaaactggtaccatggccggtgtgttggaatcctgcaatccgaggccgagctcatagatgagtacgtttgtccacaatgtcagagcaccgaagacgctatgaccgtccttacacctcttactgaaaaggactatgaaggccttaaaagagtgctgagaagtttgcaggctcataagatggcctggccattcctggaacccgtcgacccgaacgacgctccggattactatggggttatcaaagagcctatggatctggcaaccatggaagagcgagtccagcgtcgatactacgaaaagcttacagaattcgttgcggatatgacgaagatctttgataactgccgctattataacccaagcgattcccctttttatcagtgcgccgaagttttagagtccttcttcgtgcagaaacttaaaggctttaaggctagtcggtctcataacaataagttacagagtaccgctagttag

SEQ ID NO: 256415 - DNA, 8763 bp, Artificial Sequence
  derived and/or modified sequence
atgagaggcaggaggggtcggccacccaaacagccggcagcgccagctgccgagagatgtgccccagctccaccaccccctcccccacctcccacaagcggcccaataggcggtctacgatctcgacaccgaggcagttctcggggacgatgggccgcagcccaagccgaagttgcccctaagacaagactatcctctccacgcggaggcagctctagtagaagaaaacccccacctccgccacctgcccctccgtctacttcagcaccaggacggggaggcagaggtggagggggtgggaggactggtggaggagggggaggtggtcacctggcaaggacaacggctgcgcgtagagctgttaataaagtcgtctacgatgatcacgaatcagaggaagaagaagaagaggaagacatggtgagtgaggaggaggaagaagaggacggtgacgcggaggagactcaggattccgaggatgacgaagaggatgaaatggaagaggacgacgacgactcagactacccagaagaaatggaggatgatgacgacgacgccagttactgtacagagtcttcttttaggtcccattctacttactcttcaacacccggacggaggaaaccccgtgtgcatcgacctcgttctccaattctggaggagaaggatatccccccactggaattcccaaagtcatctgaggacctcatggtccctaacgaacatatcatgaatgtcattgctatctacgaagtcttacggaattttggaacagtgctcagacttagcccgttccggttcgaggatttttgcgccgcactcgtgtcccaggagcagtgtaccctgatggcagagatgcacgtggtgcttctgaaagctgtgctacgggaggaagatacatctaacacaactttcgggccagccgaccttaaggactccgtcaattccacattgtacttcatcgatggaatgacttggcctgaagtgctccgggtatattgtgagagtgacaaagaatatcaccatgtcctgccataccaggaggccgaagactatccttacggtcctgtggagaataagattaaggttctgcaattcctggtcgatcagttccttaccactaatatcgcgagggaggaattaatgagtgagggcgtgatccagtatgatgatcactgccgagtctgccataagcttggggatctgctgtgttgtgagacctgcagtgcagtctatcacttggagtgcgtgaagccccctttggaagaagtcccggaggatgagtggcagtgtgaggtatgcgtcgcccacaaagtcccaggcgtcacagactgtgtagccgagatccaaaagaataaaccctacattcgccatgagccaattggttacgatcgctctaggagaaagtactggtttctgaaccggcgtctgataatagaggaggacacggaaaacgagaacgagaagaaaatttggtactactctaccaaggtccaactagcggagcttattgactgcctcgataaggattattgggaggccgaactttgcaagattctggaagagatgcgtgaggaaattcaccgtcatatggacataacggaagatctgactaacaaggccagaggttccaataaatcattcctggcagccgctaacgaagaaatactggagtccatccgcgcaaagaaaggcgacatcgacaacgtaaagtcaccggaagaaaccgagaaggacaaaaacgagactgaaaatgactctaaagacgccgaaaagaacagggaggagttcgaggaccagtcactcgagaaagactccgatgacaaaacccctgatgacgaccccgagcaaggaaaatccgaagtgggcgatttcaagtccgagaaatccaacggggagctttccgaaagcccgggagcgggtaagggcgcatccggttcaacccgcattatcactcgcctgcggaatccagatagcaagctttcacagcttaagagccagcaggtggccgcagcagcgcacgaagctaataaactgttcaaggaagggaaggaagtattggtggtcaactcccaaggtgagatctcgaggctgtcaactaaaaaggaggtgatcatgaagggtaacattaataattacttcaagctgggccaggaggggaaataccgcgtttaccacaatcagtattctactaattctttcgcattgaataaacatcagcacagggaagatcatgacaaacggcgacatttggctcacaagttttgcctgacacccgcaggtgagtttaaatggaatggctctgtccatggctctaaagttctaactatcagtactctgagactcacaattacccagctggaaaacaacatacccagctcattccttcacccaaactgggcatcacaccgcgctaattggattaaggcagtgcaaatgtgctccaagccacgcgaatttgctctagctctggccattctcgagtgcgccgtgaaaccagtggtgatgctccctatctggcgagagagcttggggcacacccggctacatcggatgacgtcaatcgaaagggaagaaaaggagaaggtgaagaagaaggaaaaaaaacaggaggaagaagaaactatgcagcaggcaacctgggtgaaatatacgttcccggttaaacaccaagtttggaagcaaaaaggggaagaatatcgggtgacggggtacggcggatggtcatggatcagcaagacccatgtgtatcggtttgttcctaaactccccggtaacacaaatgtgaattacaggaagagcctggaaggaacgaaaaacaatatggacgaaaatatggacgaaagcgacaaaagaaagtgttcccggagtcctaagaagatcaaaatcgagcctgatagtgaaaaagatgaagtcaaaggctccgacgccgcaaaaggggcagaccagaatgaaatggatatatctaaaattactgagaagaaggaccaggatgtaaaggagcttttggactctgatagcgataagccgtgtaaggaggaacctatggaagttgatgacgacatgaaaacagaatcccatgttaactgccaagagagctcccaggtagacgtcgtgaatgtctctgagggcttccacttaagaacatcctacaagaaaaagaccaaatctagtaagctggacggcctgctagagcgtagaataaaacagtttacactggaggagaagcagcggttagagaagatcaaacttgagggtggaatcaagggaatcggcaaaacaagcacaaactcatctaagaatttaagcgagagtccggttataaccaaggcaaaggaaggctgtcagagtgacagtatgcggcaggaacagtcacccaacgcgaacaacgaccagccagaggatcttatacagggttgctccgaaagcgattcctcagtactcagaatgtcagatccaagtcacaccactaacaaactgtacccaaaggacagagtgctggacgatgtctctattagatcccctgagactaagtgccctaaacaaaattcgatcgagaacgacattgaggagaaagtgtccgatctggcatccagaggccaggaacccagcaaaagcaaaacaaaggggaacgatttctttatcgacgattcaaaactggcgtctgctgacgatatcggtactctgatttgcaagaacaaaaagcccctgatccaggaagagtctgacactatcgtgtcctccagcaaatccgccctccattcctcggtgcctaagagtaccaacgatagagatgccacccctctgagtcgcgcaatggatttcgaggggaagctggggtgcgatagcgagagtaactcgaccctcgagaactctagtgacacggtatccattcaggacagcagtgaagaagatatgatagtacagaattcaaacgaaagcatcagtgagcaattccgtacccgggagcaggacgttgaggttctggagcctttaaaatgcgagctggtgtccggcgagtccaccggaaactgcgaggaccggctgccggtgaagggcacagaggctaacgggaagaaacctagtcagcaaaagaagttggaggagcggccagtcaacaagtgttctgaccagatcaaacttaagaacactactgacaagaagaataacgaaaacagggaatccgaaaaaaaaggccagagaacttccactttccaaatcaacggtaaagataacaaaccaaaaatttacctgaaaggtgaatgccttaaagaaatttccgagagccgagtagtttccggtaatgtcgagccaaaagtaaacaacatcaataaaattattcctgagaacgacatcaagtccctgacagttaaagaaagtgcaattaggccctttataaacggcgacgtgatcatggaagactttaatgagcgaaatagttcggaaactaagtcgcacctcttatcatcctccgacgccgagggtaactaccgcgatagcctagagacactgccttcaactaaggaatcagattctacccaaacaaccactccaagtgcatcatgcccagagagtaatagtgtaaatcaggtcgaagacatggagatcgagaccagcgaagtaaagaaggtgacaagttctcccattacttctgaagaggaatccaatctctctaacgacttcatcgacgaaaacggactacccattaataaaaacgagaatgtcaacggtgagtcaaaaaggaaaactgtcatcaccgaagtgaccacaatgactagcactgtggccacagagtcaaagactgtcataaaagtagagaagggcgataaacagacggtggtgagtagcactgaaaattgcgcaaaatctacagtgacaaccactaccaccactgtgacgaaactcagtacgccttcaaccggaggcagcgttgatattataagtgtgaaggaacagagtaagaccgtggtgaccactaccgtcacagatagtctcaccacaactgggggaaccctggttacctccatgactgtgtccaaggaatattccacccgggacaaggtcaaactgatgaaattctcgagaccaaagaagacccggtccggtactgcactgcctagctaccgcaaatttgtaactaaaagttctaagaaaagcatttttgtactgcccaatgatgacctgaagaaactcgccagaaaggggggaatccgggaggtgccctatttcaattacaacgctaagcccgctctggacatctggccctatccatccccgagacccactttcggaatcacatggagatatcggttacagacggtgaagtccctggctggtgtgtcactgatgctacggctgttgtgggcttctctgcggtgggacgacatggcagctaaagcaccaccaggcggtggcaccacgcggaccgagacatccgaaaccgagatcaccactacagaaataatcaaacggagagacgtgggcccatacggtataagatctgagtattgtatccggaaaatcatttgccccatcggggtgccagagacccccaaagaaacaccaaccccgcagcgaaaagggctgcgatcatccgcgctgcgcccaaaaaggccagaaacccccaagcagacagggcctgtcattattgagacatgggtagcagaagaggagctggagttgtgggagatacgggctttcgctgaaagggtggaaaaagagaaggcgcaggcagtagagcagcaggccaaaaagaggctggagcagcagaaacccactgtcatcgccacctctaccacttccccgacatcctcaactacctcaacaatatcccccgcacagaaagtcatggtggctcctatttctggctctgtcacaactgggaccaaaatggtccttactactaaggtcggctcacccgctacagtgactttccagcagaataaaaacttccaccagacgttcgccacttgggtcaaacagggtcagtcaaactctggagtggtgcaggtgcagcaaaaagtactggggattatcccctcctcaaccgggaccagccaacaaaccttcacctctttccagccgcgaacggccaccgtgacaatccgcccaaatacctctggcagtgggggaactactagcaatagtcaggtcattacaggccctcagattaggcctggaatgacagtcatcaggactccactacagcaaagtacactggggaaggcaatcattaggaccccagtgatggtgcagccaggagcgccacagcaggttatgactcaaattatccgcggacaaccagtgtccaccgctgtttctgcacctaacacagtatcttctaccccagggcagaaatctctcactagcgccaccagcacttccaacattcagtcttcagccagtcagcctcccagacctcagcagggacaggtaaaacttactatggcccagctgacacagctgacacagggccacggcggtaatcaaggcttaactgtcgttattcaaggacagggacagacgaccggacagcttcagctcatccctcagggcgtaacagttctgccgggtcctggccagcaactgatgcaggccgctatgcccaatggcactgtgcagcgcttcctatttacgccactggcgactacagcaacaacagcatcaacgaccacgactacagtaagcaccactgctgccggtaccggggagcaaaggcaaagcaagctatccccacagatgcaagtccaccaggacaagactttacccccagctcaatcatctagcgttgggcctgcggaagctcagccacagaccgcacaacccagtgcccagccacaacctcagacccagccccagagcccggcacaacccgaagtgcaaactcagcccgaggtgcaaacacagacaacggtaagcagtcacgttccgagcgaagcccagcctacacatgcacagtcttccaaaccccaggtagccgcacaatcacagccacagagcaacgtccaaggccagtcaccagtgagagtgcaatccccctcccaaacgcgaatcaggccgagcacccccagtcaactgagccctggacagcagagccaggtgcagaccacaacaagtcagcccatcccaattcagcctcatacctccctccagatccctagtcaggggcagcctcagagccagccccaggtgcagagttctacacaaactctgtccagcgggcaaaccctgaaccaagtgaccgtttctagtccgtctcgaccccaactgcaaattcagcagccccaacctcaagtgatcgctgtgccccagctacagcagcaggtgcaggtactgtctcagattcagagccaggttgtggcccagattcaggctcagcaatctggcgtccctcagcaaataaagctgcagcttcccatccaaatccagcagtctagcgccgtacagactcaccagatccagaacgtggtaaccgttcaagccgcatcagttcaggagcagctccagcgggtccaacaactgagggaccagcagcaaaaaaagaaacagcagcagattgagattaaacgagaacacaccctgcaggctagtaatcaaagtgaaattatccagaagcaggtagttatgaaacacaacgccgtaattgagcacttgaaacagaaaaaaagcatgactcccgcagagcgggaagagaatcaaagaatgatcgtgtgcaatcaggtgatgaagtacatcttggacaagatcgacaaggaggagaaacaggcagccaagaaacgtaaaagggaggagtctgtggagcagaaacgctccaagcagaacgccaccaagctgagcgccctcctcttcaagcacaaggagcagctcagagcagaaatactcaagaagcgggctttgctggacaaggacctgcagattgaggttcaggaggaactcaagagggatcttaaaatcaagaaggagaaagatctcatgcagctggctcaagctactgctgtcgccgcaccatgtcccccagtgacccctgcaccgccagccccaccggctccccctccaagtccacctcccccacccgcagtgcagcatactggcttgctcagcactcccactcttcccgctgcaagccaaaaaaggaaaagagaggaggagaaggattcgtcgtcgaagagtaaaaagaagaagatgattagcacaacaagtaaagaaactaagaaggacaccaaactttactgcatctgcaaaaccccttacgacgaaagcaagttttatatcggttgcgaccgatgtcagaattggtatcacggccgttgcgttggtatcctgcagagcgaagcggagctaatagatgagtatgtttgtcctcagtgccaaagcacagaggacgccatgacagttttgactcccttaacagaaaaagactatgaaggacttaagcgtgttctccgcagcctccaggcacacaagatggcctggccctttctcgagcctgttgacccaaatgatgcaccagattactacggggtgattaaagagccgatggaccttgccactatggaggagagggtgcagcgccgttattatgagaagctcactgagttcgtggcagacatgacaaagatattcgataattgtcgatactacaatcccagcgatagtcctttctaccagtgcgcagaggtactggaatcattttttgtccagaaactgaagggcttcaaggcatctagatcacacaacaacaaattgcagtctactgcctcgtaa

SEQ ID NO: 256416 - DNA, 9829 bp, Artificial Sequence
  derived and/or modified sequence
aaacaagatggcggctgaaggcgatccggagtggggccccagcaattcggattgagccttctccctccacccgcttccgtcggccgggcccctcccgcccggccccgcgggcctccccacccggccccggcgctccccaccgccccccctgcgcccgcccctcccccttcgctttccttctccccccgcctcggctccgacatgaggggccggcggggcaggccgcccaagcagcccgcggctcccgctgcggagcgctgcgccccggccccgccgccaccgccgccgccgcccacgtccggacccatcggggggctccgctcgcggcaccgcggcagcagccggggcaggtgggccgccgcccaggctgaggtggcgcccaagacgcggctgagctcgcccagggggggcagcagtagccggaggaagccgccgccgccgccgccggccccccccagcaccagcgccccgggccggggggggcgaggaggcgggggcggcaggacggggggcgggggcggcggcggccacctggcccggaccaccgcggcccggagggccgtcaacaaagtggtgtacgatgaccacgagagcgaggaggaggaggaagaggaggacatggtctccgaggaggaggaggaggaggacggcgacgccgaggagacccaggattctgaggacgacgaggaggatgagatggaagaggacgacgatgactccgattatccggaggagatggaagacgacgacgacgacgccagttactgcacggaaagcagcttcaggagccatagtacctacagcagcactccaggtaggcgaaaaccaagagtacatcggcctcgttctcctatattggaagaaaaagacatcccgccccttgaatttcccaagtcctctgaggatttaatggtgcctaatgagcatataatgaatgtcattgccatttacgaggtactgcggaactttggcactgttttgagattatctccttttcgctttgaggacttttgtgcagctctggtgagccaagagcagtgcacactcatggcagagatgcatgttgtgcttttgaaagcagttctgcgtgaagaagacacttccaatactacctttggacctgctgatctgaaagatagcgttaattccacactgtatttcatagatgggatgacgtggccagaggtgctgcgggtgtactgtgagagtgataaggagtaccatcacgttcttccttaccaagaggcagaggactacccatatggaccagtagagaacaagatcaaagttctacagtttctagtcgatcagtttcttacaacaaatattgctcgagaggaattgatgtctgaaggggtgatacagtatgatgaccattgtagggtttgtcacaaacttggggatttgctttgctgtgagacatgttcagcagtataccatttggaatgtgtgaagccacctcttgaggaggtgccagaggacgagtggcagtgtgaagtctgtgtagcacacaaggtgcctggtgtgactgactgtgttgctgaaatccaaaaaaataaaccatatattcgacatgaacctattggatatgatagaagtcggaggaaatactggttcttgaaccgaagactcataatagaagaagatacagaaaatgaaaatgaaaagaaaatttggtattacagcacaaaggtccaacttgcagaattaattgactgtctagacaaagattattgggaagcagaactctgcaaaattctagaagaaatgcgtgaagaaatccaccgacacatggacataactgaagacctgaccaataaggctcggggcagtaacaaatcctttctggcggcagctaatgaagaaattttggaatccataagagccaaaaagggagacattgataatgttaaaagcccagaagaaacagaaaaagacaagaatgagactgagaatgactctaaagatgctgagaaaaacagagaagaatttgaagaccagtcccttgaaaaagacagtgacgacaaaacaccagatgatgaccctgagcaaggaaaatctgaggtaggtgatttcaaatcggagaagtccaacggggagctaagtgaatctcctggagctggaaaaggagcatctggctcaactcgaatcatcaccagattgcggaatccagatagcaaacttagtcagctgaagagccagcaggtggcagccgctgcacatgaagcaaataaattatttaaggagggcaaagaggtactggtagttaactctcaaggagaaatttcacggttgagcaccaaaaaggaagtgatcatgaaaggaaatatcaacaattattttaaattgggtcaagaagggaagtatcgcgtctaccacaatcaatactccaccaattcatttgctttgaataagcaccagcacagagaagaccatgataagagaaggcatcttgcacataagttctgtctgactccagcaggagagttcaaatggaacggttctgtccatgggtccaaagttcttaccatatctactctgagactgactatcacccaattagaaaacaacatcccttcatcctttcttcatcccaactgggcatcacatagggcaaattggatcaaggcagttcagatgtgtagcaaacccagagaatttgcattggctttagccattttggagtgtgcagttaaaccagttgtgatgctaccaatatggcgagaatctttaggacataccaggttacaccggatgacatcaattgaaagagaagaaaaggagaaagtcaaaaaaaaagagaagaaacaggaagaagaagaaacgatgcagcaagcgacatgggtaaaatacacatttccagttaagcatcaggtttggaaacaaaaaggtgaagagtacagagtgacaggatatggtggttggagctggattagtaaaactcatgtttataggtttgttcctaaattgccaggcaatactaatgtgaattacagaaagtcgttagaaggaaccaaaaataatatggatgaaaatatggatgagtcagataaaagaaaatgttcacgaagtccaaaaaaaataaaaatagagcctgattctgaaaaagatgaggtaaaaggttcagatgctgcaaaaggagcagaccaaaatgaaatggatatctcaaagattactgagaagaaggaccaagatgtgaaggagctcttagattctgacagtgataaaccctgcaaggaagaaccaatggaagtagacgatgacatgaaaacagagtcacatgtaaattgtcaggagagttctcaagtagatgtggtcaatgttagtgagggttttcatctaaggactagttacaaaaagaaaacaaaatcatccaaactagatggacttcttgaaaggagaattaaacagtttacactggaagaaaaacagcgactcgaaaaaatcaagttggagggtggaattaagggtataggaaagacttctacaaattcttcaaaaaatctctctgaatcaccagtaataacgaaagcaaaagaagggtgtcagagtgactcgatgagacaagaacagagcccaaatgcaaataatgatcaacctgaggacttgattcagggatgttcagaaagtgattcctcagttcttagaatgagtgatcctagtcataccacaaacaaactttatccaaaagatcgagtgttagatgatgtctccattcggagcccagaaacaaaatgtccgaaacaaaattccattgaaaatgacatagaagaaaaagtctctgaccttgccagtagaggccaggaacccagtaagagtaaaacaaaaggaaatgattttttcatcgatgactctaaactagccagtgcagatgatattggtactttgatctgtaagaacaaaaaaccgctcatacaggaggaaagtgacaccattgtttcttcttccaagagtgctttacattcatcagtgcctaaaagtaccaatgacagagatgccacacctctgtcaagagcaatggactttgaaggaaaactgggatgtgactctgaatctaatagcactttggaaaatagttctgataccgtgtctattcaggatagcagtgaagaagatatgattgttcagaatagcaatgaaagcatttctgaacagttcagaactcgagaacaagatgttgaagtcttggagccgttaaagtgtgagttggtttctggtgagtccactggaaactgtgaggacaggctgccggtcaaggggactgaagcaaatggtaaaaaaccaagtcagcagaagaaattagaggagagaccagttaataaatgtagtgatcaaataaagctaaaaaataccactgacaaaaagaataatgaaaatcgagagtctgaaaagaaaggacagagaacaagtacatttcaaataaatggaaaagataataaacccaaaatatatttgaaaggtgaatgcttgaaagaaatttctgagagtagagtagtaagtggtaatgttgaaccaaaggttaataatataaataaaataatccctgagaatgatattaaatcattgactgttaaagaatctgctataaggccattcattaatggtgatgtcatcatggaagattttaatgaaagaaacagctccgaaacaaaatcgcatttgctgagttcttcagatgctgaaggtaactaccgagatagccttgagaccctgccatcaaccaaagagtctgacagtacacagacgaccacaccctcagcatcttgtccagaaagcaattcagttaatcaggtagaagatatggaaatagaaacctcagaagttaagaaagttacttcatcacctattacttctgaagaggaatctaatctcagtaatgactttattgatgaaaatggtctgcccatcaacaaaaatgaaaatgtcaatggagaatctaaaagaaaaaccgtcatcacagaagtcaccacgatgacctccacagtggccacagaatcaaaaactgtgatcaaggtagaaaaaggcgataagcaaactgtggtttcttccacagaaaattgtgcaaaatccactgtcacaaccaccactacaacagtgaccaagctttccacaccctccacaggcggcagtgtggacatcatctctgtaaaggagcagagcaaaaccgtggtcaccacgacagtgacagactccctgaccaccacgggaggcacactggttacatctatgactgtgagcaaagagtattccacacgagacaaagtgaaactgatgaaattttcaagaccaaagaagactcgttcaggtacagctctgccatcctatagaaaatttgttaccaagagcagcaagaagagcatttttgttttgcctaatgatgacttaaaaaagttggcccgaaaaggaggaatccgagaggtcccttattttaattacaatgcaaaacctgctttggatatatggccatatccttctcctagaccgacctttggcatcacttggaggtatagacttcagacagtaaagtccttagctggagtgagcctgatgttacggttactgtgggcaagtttgagatgggatgatatggcggccaaggctcctccaggaggagggactacacggacagaaacatccgaaactgaaatcacaacaacagaaataattaagaggagagatgttggtccttatggcattcgatctgaatattgtatcaggaaaatcatttgtcccattggagttccagaaacaccaaaagaaacgcctacacctcagaggaaaggccttcgatcaagtgcactgcggccaaagagaccagaaacgcccaagcaaactggccctgttattattgaaacctgggtagcagaagaagaactggaattgtgggagatcagggcatttgctgagagagtggagaaagaaaaggcacaagcagttgagcaacaggctaagaaacgactggagcagcagaagccgacagtgattgcaacttccactacttccccaacaagcagtacaaccagcaccatctctccagcacagaaggttatggtggcccccataagtggctcagttacaactggaaccaaaatggtactaactactaaagttggatctccagctacagtaacattccaacaaaacaagaactttcatcaaacctttgctacatgggttaagcaaggccagtcaaattcaggcgttgttcaagtacagcagaaagtcctgggtatcattccatcaagtacaggtaccagtcagcaaacctttacttcattccagcccaggacagcaacagtcacaattaggcccaatacctcaggctctggaggaaccacaagcaattcacaagtaatcacagggcctcagattcgccctggtatgaccgtgattagaacaccactccaacagtcaacactaggaaaggcaattattcgaacacctgtgatggtacagccaggtgctcctcagcaagtgatgactcaaatcatcagggggcagcctgtctccactgcagtctccgcccctaacacggtttcctcaacacctgggcagaaaagcttaacttcagcaacgtccacttcaaatatacagtcttcagcctcacaaccccctcgcccccaacaaggacaagtgaagctcaccatggctcaacttactcagttaacacagggccacggtggcaatcaaggtttgacagtagtaattcaaggacaaggtcaaactactggacagttgcagttgatacctcaaggggtgactgtactcccaggcccaggccagcagctaatgcaagctgcaatgccaaatggtactgttcagcgattcctctttaccccattggcaacaacagccaccacagccagcaccaccaccaccactgtttccacgacagcagcaggtacaggtgaacaaaggcagagtaaactgtcaccccagatgcaggtacatcaagacaaaaccctgccaccagctcagtcatcaagtgtgggtccagcagaagcccagccacagactgctcagccttcagctcagccccagccccaaacccagccccagtccccagctcagcctgaagttcagactcagcctgaagttcagacccaaacaactgtttcatcccatgtcccttctgaagcacaacccacccacgcacagtcatccaagccccaagttgcagcacagtctcagcctcaaagtaatgtccaaggacagtctcctgttcgtgtccaaagtccatcacagactcgaatacgtccatcaactccatcccaactgtctcctggacaacaatcccaggttcagactacaacctcacaaccgattccaattcaaccacatacatctcttcagataccttcccaaggccagccacagtcacaaccccaggtacagtcttcaactcaaactctttcatcaggacaaactttaaatcaagttactgtttcatccccatcccgtcctcagctacaaatacagcagccacagccccaagtcattgctgtgcctcagctgcaacaacaagtccaggttctctctcagatccagtcacaggttgtggctcagatacaggctcagcaaagtggtgtgccccagcaaatcaaactccagttacctatccaaattcagcaaagcagtgctgtgcagactcaccagattcagaatgtggttacagtgcaggcagccagtgtgcaagagcagttgcaaagggttcagcaactcagggatcagcagcaaaagaagaaacagcaacagatagaaattaagcgtgaacacaccctccaagcttctaatcaaagtgaaatcattcagaaacaggtggtgatgaagcataatgctgtaatagaacatttaaaacagaaaaagagcatgactccagctgaaagagaagagaatcaaagaatgattgtctgtaaccaggtgatgaagtatattttggataagatagataaagaagaaaaacaggcagcaaaaaaacggaagcgtgaagagagtgtggagcagaaacgtagcaagcagaatgccactaagctgtcagctctgctcttcaagcacaaagagcagctcagagccgagatcctgaagaagagagcactcctggacaaggatctgcaaattgaagtgcaggaagagctgaagagagacctgaaaattaagaaagaaaaagacctgatgcagttggctcaggccacagcagtagctgcaccctgccccccagtgacaccagctcctccagcccctccagcccctccaccttcacctccccctccacctgctgtgcaacacacaggccttctgtccacgcccaccttacctgctgcttcccagaagaggaagcgggaagaggaaaaagactccagctcaaagtccaagaaaaagaaaatgatctctactacctcaaaggaaactaagaaggacacaaagctttactgtatctgtaaaacgccttatgatgaatctaaattttatattggctgtgatcggtgtcagaattggtaccatgggcgctgcgttggcatcttgcaaagtgaggcagagctcattgatgagtatgtctgtccacagtgccagtcaacagaggatgccatgacagtgctcacgccactaacagagaaggattatgaggggttgaagagggtgctccgttccttacaggcccataagatggcctggcctttccttgaaccagtagaccctaatgatgcaccagattattatggtgttattaaggaacctatggaccttgccaccatggaagaaagagtacaaagacgatattatgaaaagctgacggaatttgtggcagatatgaccaaaatttttgataactgtcgttactacaatccaagtgactccccattttaccagtgtgcagaagttctcgaatcattctttgtacagaaattgaaaggcttcaaagctagcaggtctcataacaacaaactgcagtctacagcttcttaaagttcagcgtgttaacctaacataaaacacagcaagaatctggttgtctgaactattttaaattaaggagccagatgtttttagtcaggctatcctgacaagacttgacctaaacttcgtttttattggtcataacagtccaattatattcttggccaattttgtccaacggacaagaaaaaagcaaagtcaacgacaccattatcttgtcaagatcagatggttttactattgtggcagaagcgagaaaactttgtttattgaaaaaaaaagaaaaagaaagcaagaaaaaaagatactatggggtcaagtgtaactccatggaaatgccacgtctgctcttcagtgaagaagctggtttagagtctcacagaaaacttttgactgtatttatttattgttgcaaaaaagacgcttttttattgctgccctcatttgtcagctaattattttttcttataaaatccagccccggttacatataatcatctgtatcttatcatgattcctgtaggtaaaagtacaagacgacctctagatgtcttttctttctatgaaaggagctgctatgtacacatgtgcacacacacacaactgggaatcaacaatgagtttattgttcatggtagattaaaattaagcttgcataaaggttgggctaagtggtcctggactacagactctgttgccttgaatataacagtacaatttgtcaattactctgcaccaggctaaaatgagtaaaatctatttgaaggtatcttgtttgtaaacatttgtcagattctaatttttttcttttgtattaaaattcaactatggatgtatatgaaacaaaataaatggagataatttttctcccaca

SEQ ID NO: 256417 - DNA, 8763 bp, Artificial Sequence
  derived and/or modified sequence
atgagaggcagaagaggcagaccccccaagcagcccgccgcccccgccgccgagagatgcgcccccgccccccccccccccccccccccccccaccagcggccccatcggcggcctgagaagcagacacagaggcagcagcagaggcagatgggccgccgcccaggccgaggtggcccccaagaccagactgagcagccccagaggcggcagcagcagcagaagaaagccccccccccccccccccgccccccccagcaccagcgcccccggcagaggcggcagaggcggcggcggcggcagaaccggcggcggcggcggcggcggccacctggccagaaccaccgccgccagaagagccgtgaacaaggtggtgtacgacgaccacgagagcgaggaggaggaggaggaggaggacatggtgagcgaggaggaggaggaggaggacggcgacgccgaggagacccaggacagcgaggacgacgaggaggacgagatggaggaggacgacgacgacagcgactaccccgaggagatggaggacgacgacgacgacgccagctactgcaccgagagcagcttcagaagccacagcacctacagcagcacccccggcagaagaaagcccagagtgcacagacccagaagccccatcctggaggagaaggacatcccccccctggagttccccaagagcagcgaggacctgatggtgcccaacgagcacatcatgaacgtgatcgccatctacgaggtgctgagaaacttcggcaccgtgctgagactgagccccttcagattcgaggacttctgcgccgccctggtgagccaggagcagtgcaccctgatggccgagatgcacgtggtgctgctgaaggccgtgctgagagaggaggacaccagcaacaccaccttcggccccgccgacctgaaggacagcgtgaacagcaccctgtacttcatcgacggcatgacctggcccgaggtgctgagagtgtactgcgagagcgacaaggagtaccaccacgtgctgccctaccaggaggccgaggactacccctacggccccgtggagaacaagatcaaggtgctgcagttcctggtggaccagttcctgaccaccaacatcgccagagaggagctgatgagcgagggcgtgatccagtacgacgaccactgcagagtgtgccacaagctgggcgacctgctgtgctgcgagacctgcagcgccgtgtaccacctggagtgcgtgaagccccccctggaggaggtgcccgaggacgagtggcagtgcgaggtgtgcgtggcccacaaggtgcccggcgtgaccgactgcgtggccgagatccagaagaacaagccctacatcagacacgagcccatcggctacgacagaagcagaagaaagtactggttcctgaacagaagactgatcatcgaggaggacaccgagaacgagaacgagaagaagatctggtactacagcaccaaggtgcagctggccgagctgatcgactgcctggacaaggactactgggaggccgagctgtgcaagatcctggaggagatgagagaggagatccacagacacatggacatcaccgaggacctgaccaacaaggccagaggcagcaacaagagcttcctggccgccgccaacgaggagatcctggagagcatcagagccaagaagggcgacatcgacaacgtgaagagccccgaggagaccgagaaggacaagaacgagaccgagaacgacagcaaggacgccgagaagaacagagaggagttcgaggaccagagcctggagaaggacagcgacgacaagacccccgacgacgaccccgagcagggcaagagcgaggtgggcgacttcaagagcgagaagagcaacggcgagctgagcgagagccccggcgccggcaagggcgccagcggcagcaccagaatcatcaccagactgagaaaccccgacagcaagctgagccagctgaagagccagcaggtggccgccgccgcccacgaggccaacaagctgttcaaggagggcaaggaggtgctggtggtgaacagccagggcgagatcagcagactgagcaccaagaaggaggtgatcatgaagggcaacatcaacaactacttcaagctgggccaggagggcaagtacagagtgtaccacaaccagtacagcaccaacagcttcgccctgaacaagcaccagcacagagaggaccacgacaagagaagacacctggcccacaagttctgcctgacccccgccggcgagttcaagtggaacggcagcgtgcacggcagcaaggtgctgaccatcagcaccctgagactgaccatcacccagctggagaacaacatccccagcagcttcctgcaccccaactgggccagccacagagccaactggatcaaggccgtgcagatgtgcagcaagcccagagagttcgccctggccctggccatcctggagtgcgccgtgaagcccgtggtgatgctgcccatctggagagagagcctgggccacaccagactgcacagaatgaccagcatcgagagagaggagaaggagaaggtgaagaagaaggagaagaagcaggaggaggaggagaccatgcagcaggccacctgggtgaagtacaccttccccgtgaagcaccaggtgtggaagcagaagggcgaggagtacagagtgaccggctacggcggctggagctggatcagcaagacccacgtgtacagattcgtgcccaagctgcccggcaacaccaacgtgaactacagaaagagcctggagggcaccaagaacaacatggacgagaacatggacgagagcgacaagagaaagtgcagcagaagccccaagaagatcaagatcgagcccgacagcgagaaggacgaggtgaagggcagcgacgccgccaagggcgccgaccagaacgagatggacatcagcaagatcaccgagaagaaggaccaggacgtgaaggagctgctggacagcgacagcgacaagccctgcaaggaggagcccatggaggtggacgacgacatgaagaccgagagccacgtgaactgccaggagagcagccaggtggacgtggtgaacgtgagcgagggcttccacctgagaaccagctacaagaagaagaccaagagcagcaagctggacggcctgctggagagaagaatcaagcagttcaccctggaggagaagcagagactggagaagatcaagctggagggcggcatcaagggcatcggcaagaccagcaccaacagcagcaagaacctgagcgagagccccgtgatcaccaaggccaaggagggctgccagagcgacagcatgagacaggagcagagccccaacgccaacaacgaccagcccgaggacctgatccagggctgcagcgagagcgacagcagcgtgctgagaatgagcgaccccagccacaccaccaacaagctgtaccccaaggacagagtgctggacgacgtgagcatcagaagccccgagaccaagtgccccaagcagaacagcatcgagaacgacatcgaggagaaggtgagcgacctggccagcagaggccaggagcccagcaagagcaagaccaagggcaacgacttcttcatcgacgacagcaagctggccagcgccgacgacatcggcaccctgatctgcaagaacaagaagcccctgatccaggaggagagcgacaccatcgtgagcagcagcaagagcgccctgcacagcagcgtgcccaagagcaccaacgacagagacgccacccccctgagcagagccatggacttcgagggcaagctgggctgcgacagcgagagcaacagcaccctggagaacagcagcgacaccgtgagcatccaggacagcagcgaggaggacatgatcgtgcagaacagcaacgagagcatcagcgagcagttcagaaccagagagcaggacgtggaggtgctggagcccctgaagtgcgagctggtgagcggcgagagcaccggcaactgcgaggacagactgcccgtgaagggcaccgaggccaacggcaagaagcccagccagcagaagaagctggaggagagacccgtgaacaagtgcagcgaccagatcaagctgaagaacaccaccgacaagaagaacaacgagaacagagagagcgagaagaagggccagagaaccagcaccttccagatcaacggcaaggacaacaagcccaagatctacctgaagggcgagtgcctgaaggagatcagcgagagcagagtggtgagcggcaacgtggagcccaaggtgaacaacatcaacaagatcatccccgagaacgacatcaagagcctgaccgtgaaggagagcgccatcagacccttcatcaacggcgacgtgatcatggaggacttcaacgagagaaacagcagcgagaccaagagccacctgctgagcagcagcgacgccgagggcaactacagagacagcctggagaccctgcccagcaccaaggagagcgacagcacccagaccaccacccccagcgccagctgccccgagagcaacagcgtgaaccaggtggaggacatggagatcgagaccagcgaggtgaagaaggtgaccagcagccccatcaccagcgaggaggagagcaacctgagcaacgacttcatcgacgagaacggcctgcccatcaacaagaacgagaacgtgaacggcgagagcaagagaaagaccgtgatcaccgaggtgaccaccatgaccagcaccgtggccaccgagagcaagaccgtgatcaaggtggagaagggcgacaagcagaccgtggtgagcagcaccgagaactgcgccaagagcaccgtgaccaccaccaccaccaccgtgaccaagctgagcacccccagcaccggcggcagcgtggacatcatcagcgtgaaggagcagagcaagaccgtggtgaccaccaccgtgaccgacagcctgaccaccaccggcggcaccctggtgaccagcatgaccgtgagcaaggagtacagcaccagagacaaggtgaagctgatgaagttcagcagacccaagaagaccagaagcggcaccgccctgcccagctacagaaagttcgtgaccaagagcagcaagaagagcatcttcgtgctgcccaacgacgacctgaagaagctggccagaaagggcggcatcagagaggtgccctacttcaactacaacgccaagcccgccctggacatctggccctaccccagccccagacccaccttcggcatcacctggagatacagactgcagaccgtgaagagcctggccggcgtgagcctgatgctgagactgctgtgggccagcctgagatgggacgacatggccgccaaggccccccccggcggcggcaccaccagaaccgagaccagcgagaccgagatcaccaccaccgagatcatcaagagaagagacgtgggcccctacggcatcagaagcgagtactgcatcagaaagatcatctgccccatcggcgtgcccgagacccccaaggagacccccaccccccagagaaagggcctgagaagcagcgccctgagacccaagagacccgagacccccaagcagaccggccccgtgatcatcgagacctgggtggccgaggaggagctggagctgtgggagatcagagccttcgccgagagagtggagaaggagaaggcccaggccgtggagcagcaggccaagaagagactggagcagcagaagcccaccgtgatcgccaccagcaccaccagccccaccagcagcaccaccagcaccatcagccccgcccagaaggtgatggtggcccccatcagcggcagcgtgaccaccggcaccaagatggtgctgaccaccaaggtgggcagccccgccaccgtgaccttccagcagaacaagaacttccaccagaccttcgccacctgggtgaagcagggccagagcaacagcggcgtggtgcaggtgcagcagaaggtgctgggcatcatccccagcagcaccggcaccagccagcagaccttcaccagcttccagcccagaaccgccaccgtgaccatcagacccaacaccagcggcagcggcggcaccaccagcaacagccaggtgatcaccggcccccagatcagacccggcatgaccgtgatcagaacccccctgcagcagagcaccctgggcaaggccatcatcagaacccccgtgatggtgcagcccggcgccccccagcaggtgatgacccagatcatcagaggccagcccgtgagcaccgccgtgagcgcccccaacaccgtgagcagcacccccggccagaagagcctgaccagcgccaccagcaccagcaacatccagagcagcgccagccagccccccagaccccagcagggccaggtgaagctgaccatggcccagctgacccagctgacccagggccacggcggcaaccagggcctgaccgtggtgatccagggccagggccagaccaccggccagctgcagctgatcccccagggcgtgaccgtgctgcccggccccggccagcagctgatgcaggccgccatgcccaacggcaccgtgcagagattcctgttcacccccctggccaccaccgccaccaccgccagcaccaccaccaccaccgtgagcaccaccgccgccggcaccggcgagcagagacagagcaagctgagcccccagatgcaggtgcaccaggacaagaccctgccccccgcccagagcagcagcgtgggccccgccgaggcccagccccagaccgcccagcccagcgcccagccccagccccagacccagccccagagccccgcccagcccgaggtgcagacccagcccgaggtgcagacccagaccaccgtgagcagccacgtgcccagcgaggcccagcccacccacgcccagagcagcaagccccaggtggccgcccagagccagccccagagcaacgtgcagggccagagccccgtgagagtgcagagccccagccagaccagaatcagacccagcacccccagccagctgagccccggccagcagagccaggtgcagaccaccaccagccagcccatccccatccagccccacaccagcctgcagatccccagccagggccagccccagagccagccccaggtgcagagcagcacccagaccctgagcagcggccagaccctgaaccaggtgaccgtgagcagccccagcagaccccagctgcagatccagcagccccagccccaggtgatcgccgtgccccagctgcagcagcaggtgcaggtgctgagccagatccagagccaggtggtggcccagatccaggcccagcagagcggcgtgccccagcagatcaagctgcagctgcccatccagatccagcagagcagcgccgtgcagacccaccagatccagaacgtggtgaccgtgcaggccgccagcgtgcaggagcagctgcagagagtgcagcagctgagagaccagcagcagaagaagaagcagcagcagatcgagatcaagagagagcacaccctgcaggccagcaaccagagcgagatcatccagaagcaggtggtgatgaagcacaacgccgtgatcgagcacctgaagcagaagaagagcatgacccccgccgagagagaggagaaccagagaatgatcgtgtgcaaccaggtgatgaagtacatcctggacaagatcgacaaggaggagaagcaggccgccaagaagagaaagagagaggagagcgtggagcagaagagaagcaagcagaacgccaccaagctgagcgccctgctgttcaagcacaaggagcagctgagagccgagatcctgaagaagagagccctgctggacaaggacctgcagatcgaggtgcaggaggagctgaagagagacctgaagatcaagaaggagaaggacctgatgcagctggcccaggccaccgccgtggccgccccctgcccccccgtgacccccgccccccccgccccccccgcccccccccccagccccccccccccccccgccgtgcagcacaccggcctgctgagcacccccaccctgcccgccgccagccagaagagaaagagagaggaggagaaggacagcagcagcaagagcaagaagaagaagatgatcagcaccaccagcaaggagaccaagaaggacaccaagctgtactgcatctgcaagaccccctacgacgagagcaagttctacatcggctgcgacagatgccagaactggtaccacggcagatgcgtgggcatcctgcagagcgaggccgagctgatcgacgagtacgtgtgcccccagtgccagagcaccgaggacgccatgaccgtgctgacccccctgaccgagaaggactacgagggcctgaagagagtgctgagaagcctgcaggcccacaagatggcctggcccttcctggagcccgtggaccccaacgacgcccccgactactacggcgtgatcaaggagcccatggacctggccaccatggaggagagagtgcagagaagatactacgagaagctgaccgagttcgtggccgacatgaccaagatcttcgacaactgcagatactacaaccccagcgacagccccttctaccagtgcgccgaggtgctggagagcttcttcgtgcagaagctgaagggcttcaaggccagcagaagccacaacaacaagctgcagagcaccgccagctag

SEQ ID NO: 256418 - protein, 1528 aa, Artificial Sequence
  derived and/or modified sequence
MSVAIRKRSWEEHVTHWMGQPFNSDDRNTACHHGLVADSLQASMEKDATLNVDRKEKCVSLPDCCHGSELRDFPGRPMGHLSKDVDENDSHEGEDQFLSLEASTETLVHVSDEDNNADLCLTDDKQVLNTQGQKTSGQHMIQGAGSLEKALPIIQSNQVSSNSWGIAGETELALVKESGERKVTDSISKSLELCNEISLSEIKDAPKVNAVDTLNVKDIAPEKQLLNSAVIAQQRRKPDPPKDENERSTCNVVQNEFLDTPCTNRGLPLLKTDFGSCLLQPPSCPNGMSAENGLEKSGFSQHQNKSPPKVKAEDGMQCLQLKETLATQEPTDNQVRLRKRKEIREDRDRARLDSMVLLIMKLDQLDQDIENALSTSSSPSGTPTNLRRHVPDLESGSESGADTISVNQTRVNLSSDTESTDLPSSTPVANSGTKPKTTAIQGISEKEKAEIEAKEACDWLRATGFPQYAQLYEDFLFPIDISLVKREHDFLDRDAIEALCRRLNTLNKCAVMKLEISPHRKRSDDSDEDEPCAISGKWTFQRDSKRWSRLEEFDVFSPKQDLVPGSPDDSHPKDGPSPGGTLMDLSERQEVSSVRSLSSTGSLPSHAPPSEDAATPRTNSVISVCSSSNLAGNDDSFGSLPSPKELSSFSFSMKGHEKTAKSKTRSLLKRMESLKLKSSHHSKHKAPSKLGLIISGPILQEGMDEEKLKQLNCVEISALNGNRINVPMVRKRSVSNSTQTSSSSSQSETSSAVSTPSPVTRTRSLSACNKRVGMYLEGFDPFNQSTFNNVVEQNFKNRESYPEDTVFYIPEDHKPGTFPKALTNGSFSPSGNNGSVNWRTGSFHGPGHISLRRENSSDSPKELKRRNSSSSMSSRLSIYDNVPGSILYSSSGDLADLENEDIFPELDDILYHVKGMQRIVNQWSEKFSDEGDSDSALDSVSPCPSSPKQIHLDVDNDRTTPSDLDSTGNSLNEPEEPSEIPERRDSGVGASLTRSNRHRLRWHSFQSSHRPSLNSVSLQINCQSVAQMNLLQKYSLLKLTALLEKYTPSNKHGFSWAVPKFMKRIKVPDYKDRSVFGVPLTVNVQRTGQPLPQSIQQAMRYLRNHCLDQVGLFRKSGVKSRIQALRQMNEGAIDCVNYEGQSAYDVADMLKQYFRDLPEPLMTNKLSETFLQIYQYVPKDQRLQAIKAAIMLLPDENREVLQTLLYFLSDVTAAVKENQMTPTNLAVCLAPSLFHLNTLKRENSSPRVMQRKQSLGKPDQKDLNENLAATQGLAHMIAECKKLFQVPEEMSRCRNSYTEQELKPLTLEALGHLGNDDSADYQHFLQDCVDGLFKEVKEKFKGWVSYSTSEQAELSYKKVSEGPPLRLWRSVIEVPAVPEEILKRLLKEQHLWDVDLLDSKVIEILDSQTEIYQYVQNSMAPHPARDYVVLRTWRTNLPKGACALLLTSVDHDRAPVVGVRVNVLLSRYLIEPCGPGKSKLTYMCRVDLRGHMPEWYTKSFGHLCAAEVVKIRDSFSNQNTETKDTKSR

SEQ ID NO: 256419 - protein, 498 aa, Artificial Sequence
  derived and/or modified sequence
MSVAIRKRSWEEHVTHWMGQPFNSDDRNTACHHGLVADSLQASMEKDATLNVDRKEKCVSLPDCCHGSELRDFPGRPMGHLSKDVDENDSHEGEDQFLSLEASTETLVHVSDEDNNADLCLTDDKQVLNTQGQKTSGQHMIQGAGSLEKALPIIQSNQVSSNSWGIAGETELALVKESGERKVTDSISKSLELCNEISLSEIKDAPKVNAVDTLNVKDIAPEKQLLNSAVIAQQRRKPDPPKDENERSTCNVVQNEFLDTPCTNRGLPLLKTDFGSCLLQPPSCPNGMSAENGLEKSGFSQHQNKSPPKVKAEDGMQCLQLKETLATQEPTDNQVRLRKRKEIREDRDRARLDSMVLLIMKLDQLDQDIENALSTSSSPSGTPTNLRRHVPDLESGSESGADTISVNQTRVNLSSDTESTDLPSSTPVANSGTKPKTTAIQGISEKEKAAVKSVKLEVDEDKSTKGSNFSNSEVAIGLSPYTFPQKRLFHVAGEENIT

SEQ ID NO: 256420 - protein, 467 aa, Artificial Sequence
  derived and/or modified sequence
MKRIKVPDYKDRSVFGVPLTVNVQRTGQPLPQSIQQAMRYLRNHCLDQVGLFRKSGVKSRIQALRQMNEGAIDCVNYEGQSAYDVADMLKQYFRDLPEPLMTNKLSETFLQIYQYVPKDQRLQAIKAAIMLLPDENREVLQTLLYFLSDVTAAVKENQMTPTNLAVCLAPSLFHLNTLKRENSSPRVMQRKQSLGKPDQKDLNENLAATQGLAHMIAECKKLFQVPEEMSRCRNSYTEQELKPLTLEALGHLGNDDSADYQHFLQDCVDGLFKEVKEKFKGWVSYSTSEQAELSYKKVSEGPPLRLWRSVIEVPAVPEEILKRLLKEQHLWDVDLLDSKVIEILDSQTEIYQYVQNSMAPHPARDYVVLRTWRTNLPKGACALLLTSVDHDRAPVVGVRVNVLLSRYLIEPCGPGKSKLTYMCRVDLRGHMPEWYTKSFGHLCAAEVVKIRDSFSNQNTETKDTKSR

SEQ ID NO: 256421 - protein, 1017 aa, Artificial Sequence
  derived and/or modified sequence
MKLEISPHRKRSDDSDEDEPCAISGKWTFQRDSKRWSRLEEFDVFSPKQDLVPGSPDDSHPKDGPSPGGTLMDLSERQEVSSVRSLSSTGSLPSHAPPSEDAATPRTNSVISVCSSSNLAGNDDSFGSLPSPKELSSFSFSMKGHEKTAKSKTRSLLKRMESLKLKSSHHSKHKAPSKLGLIISGPILQEGMDEEKLKQLNCVEISALNGNRINVPMVRKRSVSNSTQTSSSSSQSETSSAVSTPSPVTRTRSLSACNKRVGMYLEGFDPFNQSTFNNVVEQNFKNRESYPEDTVFYIPEDHKPGTFPKALTNGSFSPSGNNGSVNWRTGSFHGPGHISLRRENSSDSPKELKRRNSSSSMSSRLSIYDNVPGSILYSSSGDLADLENEDIFPELDDILYHVKGMQRIVNQWSEKFSDEGDSDSALDSVSPCPSSPKQIHLDVDNDRTTPSDLDSTGNSLNEPEEPSEIPERRDSGVGASLTRSNRHRLRWHSFQSSHRPSLNSVSLQINCQSVAQMNLLQKYSLLKLTALLEKYTPSNKHGFSWAVPKFMKRIKVPDYKDRSVFGVPLTVNVQRTGQPLPQSIQQAMRYLRNHCLDQVGLFRKSGVKSRIQALRQMNEGAIDCVNYEGQSAYDVADMLKQYFRDLPEPLMTNKLSETFLQIYQYVPKDQRLQAIKAAIMLLPDENREVLQTLLYFLSDVTAAVKENQMTPTNLAVCLAPSLFHLNTLKRENSSPRVMQRKQSLGKPDQKDLNENLAATQGLAHMIAECKKLFQVPEEMSRCRNSYTEQELKPLTLEALGHLGNDDSADYQHFLQDCVDGLFKEVKEKFKGWVSYSTSEQAELSYKKVSEGPPLRLWRSVIEVPAVPEEILKRLLKEQHLWDVDLLDSKVIEILDSQTEIYQYVQNSMAPHPARDYVVLRTWRTNLPKGACALLLTSVDHDRAPVVGVRVNVLLSRYLIEPCGPGKSKLTYMCRVDLRGHMPEWYTKSFGHLCAAEVVKIRDSFSNQNTETKDTKSR

SEQ ID NO: 256422 - DNA, 4587 bp, Artificial Sequence
  derived and/or modified sequence
atgagcgtggccatcagaaagagaagctgggaggagcacgtgacccactggatgggccagcccttcaacagcgacgacagaaacaccgcctgccaccacggcctggtggccgacagcctgcaggccagcatggagaaggacgccaccctgaacgtggacagaaaggagaagtgcgtgagcctgcccgactgctgccacggcagcgagctgagagacttccccggcagacccatgggccacctgagcaaggacgtggacgagaacgacagccacgagggcgaggaccagttcctgagcctggaggccagcaccgagaccctggtgcacgtgagcgacgaggacaacaacgccgacctgtgcctgaccgacgacaagcaggtgctgaacacccagggccagaagaccagcggccagcacatgatccagggcgccggcagcctggagaaggccctgcccatcatccagagcaaccaggtgagcagcaacagctggggcatcgccggcgagaccgagctggccctggtgaaggagagcggcgagagaaaggtgaccgacagcatcagcaagagcctggagctgtgcaacgagatcagcctgagcgagatcaaggacgcccccaaggtgaacgccgtggacaccctgaacgtgaaggacatcgcccccgagaagcagctgctgaacagcgccgtgatcgcccagcagagaagaaagcccgacccccccaaggacgagaacgagagaagcacctgcaacgtggtgcagaacgagttcctggacaccccctgcaccaacagaggcctgcccctgctgaagaccgacttcggcagctgcctgctgcagccccccagctgccccaacggcatgagcgccgagaacggcctggagaagagcggcttcagccagcaccagaacaagagcccccccaaggtgaaggccgaggacggcatgcagtgcctgcagctgaaggagaccctggccacccaggagcccaccgacaaccaggtgagactgagaaagagaaaggagatcagagaggacagagacagagccagactggacagcatggtgctgctgatcatgaagctggaccagctggaccaggacatcgagaacgccctgagcaccagcagcagccccagcggcacccccaccaacctgagaagacacgtgcccgacctggagagcggcagcgagagcggcgccgacaccatcagcgtgaaccagaccagagtgaacctgagcagcgacaccgagagcaccgacctgcccagcagcacccccgtggccaacagcggcaccaagcccaagaccaccgccatccagggcatcagcgagaaggagaaggccgagatcgaggccaaggaggcctgcgactggctgagagccaccggcttcccccagtacgcccagctgtacgaggacttcctgttccccatcgacatcagcctggtgaagagagagcacgacttcctggacagagacgccatcgaggccctgtgcagaagactgaacaccctgaacaagtgcgccgtgatgaagctggagatcagcccccacagaaagagaagcgacgacagcgacgaggacgagccctgcgccatcagcggcaagtggaccttccagagagacagcaagagatggagcagactggaggagttcgacgtgttcagccccaagcaggacctggtgcccggcagccccgacgacagccaccccaaggacggccccagccccggcggcaccctgatggacctgagcgagagacaggaggtgagcagcgtgagaagcctgagcagcaccggcagcctgcccagccacgccccccccagcgaggacgccgccacccccagaaccaacagcgtgatcagcgtgtgcagcagcagcaacctggccggcaacgacgacagcttcggcagcctgcccagccccaaggagctgagcagcttcagcttcagcatgaagggccacgagaagaccgccaagagcaagaccagaagcctgctgaagagaatggagagcctgaagctgaagagcagccaccacagcaagcacaaggcccccagcaagctgggcctgatcatcagcggccccatcctgcaggagggcatggacgaggagaagctgaagcagctgaactgcgtggagatcagcgccctgaacggcaacagaatcaacgtgcccatggtgagaaagagaagcgtgagcaacagcacccagaccagcagcagcagcagccagagcgagaccagcagcgccgtgagcacccccagccccgtgaccagaaccagaagcctgagcgcctgcaacaagagagtgggcatgtacctggagggcttcgaccccttcaaccagagcaccttcaacaacgtggtggagcagaacttcaagaacagagagagctaccccgaggacaccgtgttctacatccccgaggaccacaagcccggcaccttccccaaggccctgaccaacggcagcttcagccccagcggcaacaacggcagcgtgaactggagaaccggcagcttccacggccccggccacatcagcctgagaagagagaacagcagcgacagccccaaggagctgaagagaagaaacagcagcagcagcatgagcagcagactgagcatctacgacaacgtgcccggcagcatcctgtacagcagcagcggcgacctggccgacctggagaacgaggacatcttccccgagctggacgacatcctgtaccacgtgaagggcatgcagagaatcgtgaaccagtggagcgagaagttcagcgacgagggcgacagcgacagcgccctggacagcgtgagcccctgccccagcagccccaagcagatccacctggacgtggacaacgacagaaccacccccagcgacctggacagcaccggcaacagcctgaacgagcccgaggagcccagcgagatccccgagagaagagacagcggcgtgggcgccagcctgaccagaagcaacagacacagactgagatggcacagcttccagagcagccacagacccagcctgaacagcgtgagcctgcagatcaactgccagagcgtggcccagatgaacctgctgcagaagtacagcctgctgaagctgaccgccctgctggagaagtacacccccagcaacaagcacggcttcagctgggccgtgcccaagttcatgaagagaatcaaggtgcccgactacaaggacagaagcgtgttcggcgtgcccctgaccgtgaacgtgcagagaaccggccagcccctgccccagagcatccagcaggccatgagatacctgagaaaccactgcctggaccaggtgggcctgttcagaaagagcggcgtgaagagcagaatccaggccctgagacagatgaacgagggcgccatcgactgcgtgaactacgagggccagagcgcctacgacgtggccgacatgctgaagcagtacttcagagacctgcccgagcccctgatgaccaacaagctgagcgagaccttcctgcagatctaccagtacgtgcccaaggaccagagactgcaggccatcaaggccgccatcatgctgctgcccgacgagaacagagaggtgctgcagaccctgctgtacttcctgagcgacgtgaccgccgccgtgaaggagaaccagatgacccccaccaacctggccgtgtgcctggcccccagcctgttccacctgaacaccctgaagagagagaacagcagccccagagtgatgcagagaaagcagagcctgggcaagcccgaccagaaggacctgaacgagaacctggccgccacccagggcctggcccacatgatcgccgagtgcaagaagctgttccaggtgcccgaggagatgagcagatgcagaaacagctacaccgagcaggagctgaagcccctgaccctggaggccctgggccacctgggcaacgacgacagcgccgactaccagcacttcctgcaggactgcgtggacggcctgttcaaggaggtgaaggagaagttcaagggctgggtgagctacagcaccagcgagcaggccgagctgagctacaagaaggtgagcgagggcccccccctgagactgtggagaagcgtgatcgaggtgcccgccgtgcccgaggagatcctgaagagactgctgaaggagcagcacctgtgggacgtggacctgctggacagcaaggtgatcgagatcctggacagccagaccgagatctaccagtacgtgcagaacagcatggccccccaccccgccagagactacgtggtgctgagaacctggagaaccaacctgcccaagggcgcctgcgccctgctgctgaccagcgtggaccacgacagagcccccgtggtgggcgtgagagtgaacgtgctgctgagcagatacctgatcgagccctgcggccccggcaagagcaagctgacctacatgtgcagagtggacctgagaggccacatgcccgagtggtacaccaagagcttcggccacctgtgcgccgccgaggtggtgaagatcagagacagcttcagcaaccagaacaccgagaccaaggacaccaagagcagatag

SEQ ID NO: 256423 - DNA, 7447 bp, Artificial Sequence
  derived and/or modified sequence
gggcctggttgtggaggccccttttgcaaaacctcagtctgaatttagtagacagaagtcactaggaatgccttgacaggatcctgccttagctaaggctccctccagctgcagagggtgtttttgttagactcacacactgcgtgaaactgctcagaatagagccatgatctcaaccacgaaatgggaacttagattttggagaaactaacggggacggacttctttcctagcctgagtgttgagcagtgtcatgccttggcgtttcagctcctcgttgtctaggtggtgaaatgacagaactcattcgcttctttgattggtgattttgaaataatctttcatcaagttccatctcctttaccctcatatggaatatatctctctgtctgttgttaaactacgatgacatgtctgtagctatcagaaagagaagctgggaagaacatgtgacccactggatgggacagccttttaattctgatgatcgtaacacagcatgtcatcatggactagtagctgacagcttgcaggcaagtatggaaaaagatgcaactctaaatgtggaccgcaaagagaagtgtgtttcactacctgactgctgtcatggatcagagctgagagattttcctgggaggccaatgggtcatctttcaaaggatgtggacgaaaatgacagccatgaaggtgaagatcagtttctttctctggaagccagcacagaaacactagtgcatgtttctgatgaggataacaatgctgatttatgccttacagatgataaacaggttttaaatacccaagggcagaaaacatcaggccaacatatgatccaaggagcaggctccttagaaaaggcactgcccatcatacaaagtaaccaagtttcttctaactcctggggaatagctggtgaaactgaattagcactggtaaaagaaagtggggagagaaaagttactgactctataagtaaaagcctggagctttgcaatgaaataagcttaagtgaaataaaagatgcacccaaagtaaatgcagtggatactttgaacgtgaaagatattgcacctgagaaacaattgcttaactctgctgtaattgctcagcaacgaaggaaacctgacccccctaaagatgaaaatgaaagaagcacctgcaatgtagtacaaaatgagttcttggatactccttgcacaaacagaggactgccattattaaaaacagattttggaagctgccttctgcagcctccttcctgccccaatggaatgtcagctgaaaatggcctggagaagagtggtttttcacaacatcaaaacaaaagtccaccaaaggtcaaggcagaagatggcatgcagtgtttacaattaaaggagaccctggccacccaggaacccacagataaccaagtcagacttcgtaagagaaaggaaataagagaagatcgagatagggcgcggctggactccatggtgctgctgattatgaaactggaccagcttgatcaggacatagaaaatgccctcagcaccagctcctctccatcaggcacaccaacaaacctgcggcggcacgttcctgatctggaatcaggatctgaaagtggagcagataccatttcagtaaatcagacacgagtaaatttgtcttctgacactgagtccacggacctcccatcttccactccagtagccaattctggaaccaaacccaagactacggctattcaaggtatttcagagaaggaaaaggctgaaattgaagccaaggaagcttgtgattggctacgggcaactggtttcccccagtatgcacagctttatgaagatttcctgttccccatcgatatttccttggtcaagagagagcatgattttttggacagagatgccattgaggctctatgcaggcgtctaaatactttaaacaaatgtgcggtgatgaagctagaaattagtcctcatcggaaacgaagtgacgattcagacgaggatgagccttgtgccatcagtggcaaatggactttccaaagggacagcaagaggtggtcccggcttgaagagtttgatgtcttttctccaaaacaagacctggtccctgggtccccagacgactcccacccgaaggacggccccagccccggaggcacgctgatggacctcagcgagcgccaggaggtgtcttccgtccgcagcctcagcagcactggcagcctccccagccacgcgccccccagcgaggatgctgccaccccccggactaactccgtcatcagcgtttgctcctccagcaacttggcaggcaatgacgactctttcggcagcctgccctctcccaaggaactgtccagcttcagcttcagcatgaaaggccacgaaaaaactgccaagtccaagacgcgcagtctgctgaaacggatggagagcctgaagctcaagagctcccatcacagcaagcacaaagcgccctcaaagctggggttgatcatcagcgggcccatcttgcaagaggggatggatgaggagaagctgaagcagctcaactgcgtggagatctccgccctcaatggcaaccgcatcaacgtccccatggtacgaaagaggagcgtttccaactccacgcagaccagcagcagcagcagccagtcggagaccagcagcgcggtcagcacgcccagccctgttacgaggacccggagcctcagtgcgtgcaacaagcgggtgggcatgtacttagagggcttcgatcctttcaatcagtcaacatttaacaacgtggtggagcagaactttaagaaccgcgagagctacccagaggacacggtgttctacatccctgaagatcacaagcctggcactttccccaaagctctcaccaatggcagtttctccccctcggggaataacggctctgtgaactggaggacgggaagcttccacggccctggccacatcagcctcaggagggaaaacagtagcgacagccccaaggaactgaagagacgcaattcttccagctccatgagcagccgcctgagcatctacgacaacgtgccgggctccatcctctactccagttcaggggacctggcggatctggagaacgaggacatcttccccgagctggacgacatcctctaccacgtgaaggggatgcagcggatagtcaatcagtggtcggagaagttttctgatgagggagattcggactcagccctggactcggtctctccctgcccgtcctctccaaaacagatacacctggatgtggacaacgaccgaaccacacccagcgacctggacagcacaggcaactccctgaatgaaccggaagagccctccgagatcccggaaagaagggattctggggttggggcttccctaaccaggtccaacaggcaccgactgagatggcacagtttccagagctcacatcggccaagcctcaactctgtatcactacagattaactgccagtctgtggcccagatgaacctgctgcagaaatactcactcctaaagctaacggccctgctggagaaatacacaccttctaacaagcatggttttagctgggccgtgcccaagttcatgaagaggatcaaggttccagactacaaggaccggagtgtgtttggggtcccactgacggtcaacgtgcagcgcacaggacaaccgttgcctcagagcatccagcaggccatgcgatacctccggaaccattgtttggatcaggttgggctcttcagaaaatcgggggtcaagtcccggattcaggctctgcgccagatgaatgaaggtgccatagactgtgtcaactacgaaggacagtctgcttatgacgtggcagacatgctgaagcagtattttcgagatcttcctgagccactaatgacgaacaaactctcggaaacctttctacagatctaccaatatgtgcccaaggaccagcgcctgcaggccatcaaggctgccatcatgctgctgcctgacgagaaccgggaggttctgcagaccctgctttatttcctgagcgatgtcacagcagccgtaaaagaaaaccagatgaccccaaccaacctggccgtgtgcttagcgccttccctcttccatctcaacaccctgaagagagagaattcctctcccagggtaatgcaaagaaaacaaagtttgggcaaaccagatcagaaagatttgaatgaaaacctagctgccactcaagggctggcccatatgatcgccgagtgcaagaagcttttccaggttcccgaggaaatgagccgatgtcgtaattcctataccgaacaagagctgaagcccctcactctggaagcactcgggcacctgggtaatgatgactcagctgactaccaacacttcctccaggactgtgtggatggcctgtttaaagaagtcaaagagaagtttaaaggctgggtcagctactccacttcggagcaggctgagctgtcctataagaaggtgagcgaaggaccccctctgaggctttggaggtcagtcattgaagtccctgctgtgccagaggaaatcttaaagcgcctacttaaagaacagcacctctgggatgtagacctgttggattcaaaagtgatcgaaattctggacagccaaactgaaatttaccagtatgtccaaaacagtatggcacctcatcctgctcgagactacgttgttttaagaacctggaggactaatttacccaaaggagcctgtgcccttttactaacctctgtggatcacgatcgcgcacctgtggtgggtgtgagggttaatgtgctcttgtccaggtatttgattgaaccctgtgggccaggaaaatccaaactcacctacatgtgcagagttgacttaaggggccacatgccagaatggtacacaaaatcttttggacatttgtgtgcagctgaagttgtaaagatccgggattccttcagtaaccagaacactgaaaccaaagacaccaaatctaggtgatcactgaagcaacgcaaccgcttccaccaccatggtgtttgtttctagaacttttgccagtccttgaagaatgggttctgtgtctaatcctgaaacaaagaaaactacaagctggagtgtaggaattgactatagcaatttgatacatttttaaagctgcttcctgtttgttgagggtctgtattcatagaccttgactggaatatgtaagactgtgcaaaaaaaaaaaaaaaatttatgtgtattcttattcaaattgcttctgagaagcaaaactctttaaatacattatggaagataatgaagatacttcattctcttgtgatatcagtgtatgcgtacctgtgtcgctttatttgcagtgtgttgagggactggtgtatccactggaatagttggtactcttggatgtgttttctcaccaagatgagcaaagaaaggtttgcacagaggagtgtgaatgtgtgtttgttgctggctgaatggcaatagatgtctaaggtggattcagtgtctggcacactgagacacctccaagaaggagattgatgcatcaggttcagtttaacctggaatatctgactacccctgaatccacccagaaagggggcccaacacccttgtccatttatgggtattttttttcgaagttattaagcatattccttttccacgaacctcttctgtactttgattgtaataggttggctcttacacccattccaaatgcagtttatttttagacccgattgcaaatagtgatgtagttttaaccagtatggattagttcagggatgaactgctccctctagccttactggctctgatccacagggttttgttttgttttgttttgttttttgtttaagtcgagatataaaaactgaacacgataacacttactcttaaatcaagcatcaacactttttccctgttagaattctttgcatttttgtgtttgtaacagaaacgccttaagacactatgtttgggaatataggaaactatgtgtgtcccaaggaaatccctgtaaatttaactcacctacaaaaggctttttccccgcctttggttgttaacggcattcctgaaagccacatgtgtttattcattgggcttgttcttatcagcaaataggttttctggttttatgactttttgtcttattttatttttcctacatttctttttttttttttttcctttagaatgccctggaaatatatttaagtggtaatgaaaaatagtaatcatagtaaaacgcaacaagaagaaaaccaacccaaaccagtgaagttttttagaacctttagaagggtggtctttattcaggttttactgtaatggtaaggattgactcaagagacagtattagtaaatttattgtgtatggatcaaaagtgaataatgtatgaatgagagctgtaagaaggatttttattttgttataatttagttaccattttcagtgttatttcaaaggttctttgaagaattttggggcagggcatcagattagagttttaaaatttgagtattttggatatcagtgttcctcatgaagatatacatggatattcaattttgatggcttccagatttgtaagattgtatgttgtatataccattctattaagaaacatgtccactgtgctttcaaacatagataaagcatgataaagattattatttaagatatacttgtatttatacctcagatattcttttgggttttgtacctcaaggcttttttcttcttattgtaaatacactttacgtgaatacagtctaagtgaagaaaataaataaaaggaagaggtttataacttgctctatatctgtacagattataatcaataagtgcactattattaaatgtttaaagtaagggaaaagtctgggctgccttccttaatattgcatctcactcccacccttaaaaccacagattgcaaagcatagcattttagcatcaactacaatcaaaagagcgatttgctgaaggaaaaatcggactgcaaatcattccaaggccaaactgcaactgagccacccactcccaaacaggaaaccctggtgaaggttcaggaagcacggagattctctccaacaaaggtccagttaggaaacgacgctgagaggatgacgacaacgtgcaacagcagaaagatgcttgcaagcagagtcagggtcaccagtgaatgccacaaaagttctctttcccactgtttaatttgacaagagaagaatttgaaggatatgaacattttcaagaactctgctgaggtcacttagagcgccatcacaacttatttgtgtgactaattgcctagattgtaagctctttgagggcagggcttgtctcttacacatctttataatcccctgcagcggctttcagtattttgtacttgtaggcacctaataaatttattatttgctatactgaa

SEQ ID NO: 256424 - DNA, 4587 bp, Artificial Sequence
  derived and/or modified sequence
atgagcgttgccatcagaaaaaggtcttgggaggaacatgtgacacactggatgggtcagcccttcaactctgacgataggaataccgcatgccatcatggtctggtggcggatagcctgcaggccagtatggagaaggacgctacccttaacgtggatcgcaaggagaagtgcgtgtccctgcctgattgttgtcatggatcagaactgagggattttccaggccggcccatgggccacctgagcaaggatgtggatgagaacgacagccatgaaggggaagaccagttcctcagcctcgaagccagcacagaaaccctggtgcatgtttctgacgaggacaataatgcggatttgtgtctgactgacgataagcaggtgcttaatacacagggacaaaagacatcgggacagcacatgatccagggggctggctcgctcgagaaagccctgccgattatacagtcgaaccaggtgtcttccaacagttggggaatagccggcgaaactgaactggccctcgtcaaggagagcggggagcggaaagtcaccgactccatctcaaaaagccttgaactgtgtaacgagattagtctatccgagataaaagacgccccaaaggtgaatgcggtggacaccttaaacgtgaaggacattgccccggagaaacagctgctcaattccgcagtgatagcacagcagcgccggaagcccgatccccctaaggacgagaatgagcggtcaacgtgcaacgtggtgcaaaacgagttcctcgacactccttgcaccaatcggggcctgcccctcttaaagaccgacttcggatcatgtcttctgcagcctccttcttgtcctaatggaatgtctgcggaaaatggcctcgagaaatcaggtttttcccagcaccagaacaagtccccaccaaaggtgaaggccgaggacgggatgcagtgtctgcaactgaaggaaacactggctacgcaggaacctaccgacaaccaggtgagactgcgcaaacggaaggaaattagagaagatcgagacagggcaagattagactctatggttcttttgatcatgaaactggaccagcttgatcaggacatcgagaatgccctcagcaccagttcttcccccagcggcacaccaactaacctcagacgacacgtccctgacttagagtctggttcagagtccggcgctgacacgatctcggtgaatcaaacgcgcgtaaacctgtcaagcgacactgaatctacagatctaccctcctctactccagttgctaattctggaaccaagcccaagacgacggctatccaaggaatatccgaaaaggaaaaagccgagatagaagccaaagaggcatgcgactggctgagggccaccggctttccgcagtatgcacagctgtacgaagatttcctgttccccatcgatatctccctcgtcaaacgggaacacgactttctggatcgcgatgccatcgaagccctctgccgtcggctgaacaccctgaacaagtgtgcagtaatgaaactcgagattagcccccaccggaagcggtccgatgattcagacgaggatgagccttgcgccatatccggcaagtggaccttccagcgggactccaaacgttggtccaggctggaagagtttgacgtgtttagtcctaagcaggatctggttccaggttctcccgacgacagtcaccctaaggacggtccatcccccggaggcacgcttatggacctgtcagaacggcaagaggtctccagcgttcgttctctgagctctaccggctctctgccgtcacatgcccctccttccgaagatgcggctacacccagaacaaactcggttatttccgtttgcagttcatcaaacctcgccggaaacgacgacagcttcggtagcttacccagcccaaaggagttgagtagtttttccttcagtatgaaaggccatgagaaaactgccaagagcaagacacgatccctcctgaagagaatggaaagcctaaagctgaagtcgagccaccactccaaacataaagcgccgagcaagttaggcctcatcatctctggacccattctgcaggagggcatggacgaggagaaactgaagcaactcaactgtgtagaaatctccgcccttaatggcaatcggattaacgtcccaatggtccgaaaacgaagcgttagcaacagcacccaaaccagtagttcgtccagccaatcagagacttcctcagctgtctcaacaccctctccagtcactaggactaggtctctgagcgcttgcaacaagagggtgggtatgtatctagaaggattcgatcctttcaatcaatccactttcaacaatgtggttgagcaaaactttaaaaatcgcgaatcatatccggaggacacagttttctatattcctgaggatcacaagcctggcacgttcccaaaggccctcactaacggctctttcagcccctccggtaacaacggcagtgtgaactggagaaccggatctttccatgggcctggccatatcagtctccggcgcgaaaattcttctgattccccgaaagaactgaagcggcggaatagttcctccagcatgagcagccggctctccatctatgacaacgtgccgggcagcattctgtacagctcaagcggagacctcgcagacctggaaaacgaagacatttttcccgaactggatgatatcctgtatcatgtcaaaggtatgcagagaattgtgaatcagtggtctgagaaattcagcgatgaaggagattccgactcagctctcgattccgtcagtccctgtcccagttctccaaaacagatccacctggacgttgataatgatcgcaccacaccttccgatctggattctacgggcaatagcttgaacgagccagaagagcccagcgaaatcccagaacgccgtgacagcggggtgggtgcttcgctgacccgcagtaatcgccacaggttaagatggcacagttttcagagcagtcataggccctccttgaactctgtgtcactccagatcaattgccaatccgtcgctcagatgaatctgctgcaaaaatactccttactgaaactcacagccctcttagagaagtatacccccagtaacaaacatggtttcagctgggctgttccaaaattcatgaagagaattaaggtgccagattacaaagacagatccgtttttggggttcccctgaccgttaatgtgcaacgcaccgggcagcctctgccacaaagcattcaacaggccatgcgatatttacgcaaccactgtctcgatcaggtcggtttgtttaggaagagcggggtaaagtctagaattcaggccttgcgtcaaatgaatgagggcgcgattgactgcgtgaattacgaagggcagtccgcttacgacgtggccgatatgctcaagcagtacttccgggatctgccagagcctctgatgacaaataagctgtcggaaacattcctgcagatctaccagtacgtgcctaaggatcaacggttgcaggctattaaagcagccattatgctcttaccagacgagaaccgtgaggtgctgcagacgttgttatacttcctaagcgacgtgaccgccgccgtcaaagagaaccagatgactccgacaaatctcgccgtgtgcctagcgcctagtctcttccatctgaatacgctaaagcgtgagaattcatctcctagggttatgcagcggaagcaatcgctcggaaagcctgaccagaaggatctgaatgaaaacctggcggcaacgcaggggctggcacacatgatcgcagaatgtaaaaagctgtttcaggtgcccgaggaaatgagccggtgcaggaacagttacactgaacaagaactgaagcctcttaccctggaagccctgggccacctgggcaatgacgactctgcagactaccaacattttctgcaggactgtgtcgacgggttgttcaaagaagtcaaagaaaagtttaaaggctgggtctcgtacagcaccagtgaacaagctgagttatcttacaaaaaggtttcagagggcccccctctgaggctctggcggagcgttatagaggtgcccgcggtcccggaggaaattttgaaaagactgctgaaagaacaacacctgtgggacgtggatttgctagactctaaggtaatcgagatactggactcacaaacggagatatatcagtacgtgcagaattccatggctccccaccctgcccgcgactacgtcgtcttaaggacttggaggaccaacctgccaaaaggcgcgtgtgcactgcttctgaccagcgtcgaccatgacagggctccagtggtgggcgtccgggtgaatgttttactctctaggtatctgattgaaccatgcggacctggcaagtcaaaactgacttatatgtgccgcgtggatctcagggggcacatgccagagtggtataccaaatctttcgggcatttgtgtgctgcagaagtggttaaaattagggattcatttagtaatcaaaacacagaaacaaaggatacgaaaagtcgctag

SEQ ID NO: 256425 - DNA, 4587 bp, Artificial Sequence
  derived and/or modified sequence
atgtctgtggccatcaggaagaggtcctgggaggagcacgtgacccactggatgggccagcccttcaacagtgatgacaggaacacagcctgccaccacggcctggtggccgacagcctgcaggcctccatggagaaggatgccaccctgaatgtggacaggaaggagaagtgtgtgtccctgcctgactgctgccacggcagcgagctgcgggacttccctggccggcccatgggccacctgagcaaggatgtggatgaaaatgacagccatgaaggagaggaccagttcctgagcctggaggccagcacagagaccctggtgcacgtgtctgatgaggacaacaatgctgacctgtgcctgacagatgacaagcaggtgctgaacacccagggccagaagaccagcggccagcacatgatccagggcgccggcagcctggagaaggccctgcccatcatccagagcaaccaggtgagcagcaacagctggggcattgctggggagacagagctggccctggtgaaggagagcggggagaggaaggtgacagacagcatcagcaagagcctggagctgtgcaatgagatcagcctgtctgagatcaaggatgcccccaaggtgaatgctgtggacaccctgaatgtgaaggacatcgcccctgagaagcagctgctgaacagcgctgtgattgcccagcagaggaggaagccagacccccccaaggatgaaaatgaaagaagcacctgcaatgtggtgcagaatgagttcctggacaccccctgcaccaacagaggcctgcccctgctgaagacagactttggcagctgcctgctgcagccccccagctgccccaacggcatgtctgcagaaaatggcctggagaagagcggcttcagccagcaccagaacaagagcccccccaaggtgaaggcagaagatggcatgcagtgcctgcagctgaaggagaccctggccacccaggagcccacagacaaccaggtgcggctgaggaagaggaaggagatcagagaagatcgggaccgggcccggctggacagcatggtgctgctgatcatgaagctggaccagctggaccaggacattgaaaatgccctgagcaccagcagcagccccagcggcacccccaccaacctgcggagacatgtgcctgacctggagagcggcagcgagagcggggctgacaccatctctgtgaaccagaccagggtgaacctgagcagtgacacagagagcacagacctgcccagcagcacccctgtggccaacagcggcaccaagcccaagaccacagccatccagggcatcagcgagaaggagaaggccgagattgaggccaaggaggcctgtgactggctgcgggccaccggcttcccccagtatgcccagctgtatgaggacttcctgttccccatcgacatcagcctggtgaagcgggagcatgacttcctggacagagatgccatcgaggccctgtgccggcggctgaacaccctgaacaagtgtgctgtgatgaagctggagatcagcccccacaggaagagaagtgatgacagtgatgaagatgagccctgtgccatcagcggcaagtggaccttccagagggacagcaagcgctggagccggctggaggagtttgatgtgttcagccccaagcaggacctggtgcccggcagcccagatgacagccaccccaaggatggccccagccctgggggcaccctgatggacctgtctgagcggcaggaggtgtcctctgtgcgcagcctgagcagcacaggcagcctgcccagccacgccccacccagtgaagatgctgccacccccaggaccaacagcgtcatctctgtgtgcagcagcagcaacctggccggaaatgatgacagctttggcagcctgcccagccccaaggagctgagcagcttctccttctccatgaagggccacgagaagacagccaagagcaagaccaggagcctgctgaagaggatggagagcctgaagctgaagagcagccaccacagcaagcacaaggcccccagcaagctgggcctcatcatcagcggccccatcctgcaggagggcatggatgaggagaagctgaagcagctgaactgtgtggagatcagcgccctgaatggaaaccgcatcaacgtgcccatggtgaggaagaggtctgtgagcaacagcacccagaccagcagcagcagcagccagagcgagaccagcagcgctgtgtccacccccagccctgtgaccaggaccaggagcctgagcgcctgcaacaagagggtgggcatgtacctggagggctttgaccccttcaaccagagcaccttcaacaacgtggtggagcagaacttcaagaaccgggagagctacccagaagatactgtgttctacatccctgaggaccacaagccaggcaccttccccaaggccctgaccaacggcagcttcagccccagcggcaacaatggatctgtgaactggaggacaggcagcttccacggccctggccacatcagcctgcggcgggagaacagcagtgacagccccaaggagctgaagagaagaaacagcagcagctccatgagcagccggctgagcatctatgacaacgtgcccggcagcatcctgtacagcagcagcggggacctggccgacctggagaatgaagacatcttccctgagctggatgacatcctgtaccacgtgaagggcatgcagagaattgtgaaccagtggagcgagaagttcagtgatgaaggagacagcgacagcgccctggacagcgtgagcccctgccccagcagccccaagcagatccacctggatgtggacaatgacaggaccacccccagcgacctggacagcactggaaacagcctgaatgaacctgaggagcccagcgagatccctgagcggcgggacagcggcgtgggcgccagcctgaccaggagcaacagacaccggctgcgctggcacagcttccagagcagccaccggcccagcctgaacagcgtgtccctgcagatcaactgccagagcgtggcccagatgaacctgctgcagaagtacagcctgctgaagctgacagccctgctggagaagtacacccccagcaacaagcacggcttctcctgggccgtgcccaagttcatgaagaggatcaaggtgcctgactacaaggacagatctgtgtttggagtgcccctgactgtgaatgtgcagaggacaggccagcccctgccccagagcatccagcaggccatgagatacctgaggaaccactgcctggaccaggtgggcctcttcaggaagagcggcgtgaagagccgcatccaggccctgcggcagatgaatgaaggagccatcgactgtgtgaactatgagggccagagcgcctatgatgtggccgacatgctgaagcagtacttccgggacctgcctgagcccctgatgaccaacaagctgtctgagaccttcctgcagatctaccagtatgtgcccaaggaccagaggctgcaggccatcaaggccgccatcatgctgctgcctgatgagaaccgggaggtgctgcagaccctgctgtacttcctgagtgatgtgacagctgctgtgaaggagaaccagatgacccccaccaacctggccgtgtgcctggcccccagcctcttccacctgaacaccctgaagcgggagaacagcagcccccgggtgatgcagaggaagcagagcctgggcaagccagaccagaaggacctgaatgaaaacctggccgccacccagggcctggcccacatgattgctgagtgcaagaagctgttccaggtgcctgaggagatgagccgctgcaggaacagctacacagagcaggagctgaagcccctgaccctggaggccctgggccacctgggcaatgatgacagcgctgactaccagcacttcctgcaggactgtgtggatggcctcttcaaggaggtgaaggagaagttcaagggctgggtgtcctacagcaccagcgagcaggccgagctgagctacaagaaggtgtctgagggcccccccctgcggctgtggaggagcgtcatcgaggtgcctgctgtgcctgaggagatcctgaagaggctgctgaaggagcagcacctgtgggatgtggacctgctggacagcaaggtgattgagatcctggacagccagacagagatctaccagtatgtgcagaacagcatggccccccacccagcccgggactatgtggtgctgcggacctggaggaccaacctgcccaagggggcctgtgccctgctgctgacctctgtggaccatgaccgggcccctgtggtgggcgtgcgggtgaatgtgctgctgagccgctacctgattgagccctgtggccctgggaagagcaagctgacctacatgtgccgggtggacctgcggggccacatgcctgagtggtacaccaagagctttggccacctgtgtgccgctgaggtggtgaagatccgggacagcttcagcaaccagaacacagagaccaaggacaccaagagcaggtag

SEQ ID NO: 256426 - DNA, 4587 bp, Artificial Sequence
  derived and/or modified sequence
atgagcgtggccatccggaagcggagctgggaggagcacgtgacccattggatggggcagccgttcaattccgacgatcggaataccgcatgtcaccacggtctggtggccgactctctgcaggcttcgatggagaaggacgccaccttaaatgtggatagaaaggagaagtgtgtttcccttcctgactgctgtcatggctctgagctgcgcgacttccccgggcgtcctatggggcacctttccaaagatgtcgatgagaatgacagccatgaaggggaagaccagttcctgagtctggaggcgtcaacagaaacgctagtacacgtatctgatgaggataacaacgctgacctgtgtcttacggatgacaaacaggtcctgaacactcagggtcagaagacttctggacagcacatgatccagggagctggcagcctggaaaaggctttacccattattcagagcaaccaggtttcctctaattcatgggggatcgccggagagacagagctcgccctggtcaaagagtcaggggagcgtaaagtcactgattcaattagcaaatcactggaactttgtaatgaaataagtctgagcgagatcaaagacgcccctaaggtgaatgcggtggatacactcaatgtcaaagatatcgctcccgaaaaacagctgttgaacagtgcagtgatagcccaacagagaaggaagccagaccccccgaaagatgaaaacgaacggtcaacatgcaacgtggtccagaacgagttcctcgatacaccatgtaccaataggggtctgcctctattaaaaactgacttcggaagctgcctcttacagccaccttcctgccctaatggcatgagcgcggagaacggattagagaagagcgggtttagccagcatcagaataagagccctcccaaagttaaggccgaggacgggatgcagtgccttcagctcaaggaaaccctagctacgcaggagcctaccgacaatcaggtgaggcttaggaagcggaaggagatcagagaggacagggacagggcaagactggattccatggtgctactcataatgaaactcgatcagttggaccaagatatcgagaacgccttaagcacctctagctctccctccggcacaccgacaaacctgaggaggcatgtgcccgatctggaatctggcagcgagagcggggccgatacaataagcgtgaaccagacccgtgtcaacttgtcgagtgatacagaatctactgacctaccttcgtcaacacctgtggccaactccggaaccaagccaaagactaccgcgattcaggggatatctgagaaagaaaaggctgagattgaagcgaaagaggcctgtgactggcttagagccaccgggttcccccagtacgcccaactttacgaagattttctctttcctatcgatatttccctcgttaagagagaacacgattttttggatagagacgctattgaagctctctgcagacggctgaatacgctgaataagtgtgctgtaatgaaacttgagatcagcccccacagaaaacggagtgacgactcagacgaggacgagccgtgtgctatctcaggaaagtggacatttcagcgagattcaaagagatggagtaggctcgaggagtttgatgtattctcgccaaagcaggatctggtccctgggtcacctgatgactcacatcccaaggatggtccaagccccgggggcacgctcatggatctctcagaacggcaagaggtgtcaagtgtccgctctttgtccagcacagggtccctgccctcccatgcgccgcctagcgaagatgcagctacaccacgcactaatagcgtcatttctgtgtgctccagctctaacctggccggcaatgatgattccttcggcagtcttccttcccccaaggaactttcatcattctcattctcaatgaagggccacgagaagactgcgaagtctaaaacccggagcctgttaaagcgtatggaatctctcaaacttaagagtagccatcactccaagcacaaggcaccatccaagctgggacttatcatatccggccccatcttgcaggaaggcatggacgaagagaagctgaaacagttgaattgcgtggagatatccgctctgaatggtaaccgcattaacgtccctatggtcagaaaacggtcagtgtccaactctacacagacctccagctctagtagccagtcggagacttcttctgcagtgagtactcccagtccggtcacacggactagatctctgtccgcctgtaataaaagagtcggaatgtaccttgaaggctttgaccctttcaatcagtccacatttaacaacgtagtggagcaaaatttcaaaaacagggaatcttacccagaagatacggttttctacatcccagaggaccataaacctgggacctttccaaaggctttgactaatgggagtttttccccttctggcaataacggttccgttaattggaggactggcagctttcacgggccaggtcatatatccctgagacgtgagaattcttcagatagcccaaaagaactgaagcgccggaattcttcctcaagcatgtcgtctcgtctctccatttacgacaacgtgccgggctctattctctacagttcctctggagacctggccgatctggagaacgaggacatattccccgaattggatgacatcttgtatcacgtgaaaggtatgcagcgcattgtcaatcagtggtctgagaagttctctgatgaaggggactcggactccgcactcgactccgtgtctccctgtccgtccagcccaaagcagatccacctggacgtcgataatgaccggaccaccccttctgatctggatagtacaggaaatagcctaaatgaaccagaggagcccagcgagattcccgaaagacgagactctggtgtgggggcctccctgacccgtagcaatcgacaccgactgcgttggcacagcttccagagttcccaccgaccttcacttaatagcgtgtcactgcaaatcaactgtcagtctgtagcccagatgaatcttttgcagaagtactccctgctgaaactgacagctttgttagagaaatatacaccaagcaataagcatgggttttcctgggctgtccccaagtttatgaagcgtatcaaagtgcctgattacaaggatcgctccgtgttcggcgtgcccctgacagtgaacgtccagagaacaggacaacctttaccgcagtccatccagcaggcaatgcggtatctacgcaatcactgtctggaccaggtaggtctgtttcgcaagtcaggggttaaatctaggatacaggccctccgccagatgaacgagggggctattgactgcgtgaattacgaaggccagagtgcctacgacgtggcggatatgctgaagcagtactttcgggatctccccgagcctctgatgacgaacaagctgtctgagacgttcctccaaatttatcagtatgtcccaaaggaccaaagattgcaggcgataaaagcagccataatgttacttcccgatgaaaaccgagaagtcctgcaaacactgctgtactttctgagtgatgtcacagccgcagtgaaggaaaatcagatgacacctaccaaccttgcagtctgtctggctccatctctcttccatctcaataccttgaagcgcgaaaactctagtccgcgggtgatgcagcgcaagcagtctctgggaaagcctgatcagaaagatctcaatgagaacctagctgccacgcaggggctggcacatatgatcgccgaatgtaagaagctttttcaagtcccggaggagatgtctcggtgccggaactcatacacggagcaagaactgaaaccactcaccctggaagccctggggcacctggggaacgatgacagcgccgactatcagcattttctacaagattgtgtggacggcctgttcaaggaggttaaagagaaattcaagggctgggtctcctattccactagcgagcaagctgagcttagctacaaaaaggtcagtgagggcccacctctccgcctctggcggtcagtgatagaggtccctgctgttcccgaggaaatacttaaacggctgctgaaggagcagcacttgtgggacgtcgaccttttggactcaaaggttatcgaaattctggactcccagacagaaatctatcagtacgtccagaatagcatggctcctcaccctgcaagagactacgtggtcctacgcacctggcgaactaacctgcccaagggggcctgtgcactgttgctaacaagtgtggaccacgaccgggcccccgtagttggggtgcgggtgaatgtgcttctgtcaagatacttgattgagccctgcgggccaggtaagtcgaagctcacatacatgtgccgcgtggacctgcgaggccatatgcccgaatggtacactaagtccttcgggcatctgtgtgcagccgaagttgtgaagattagggatagcttctccaaccaaaacaccgagactaaggataccaagtctcggtag

SEQ ID NO: 256427 - DNA, 4587 bp, Artificial Sequence
  derived and/or modified sequence
atgtcagtggccatcaggaagaggagctgggaagaacacgtcacccactggatgggacagccctttaacagcgacgaccggaacaccgcttgccatcacgggctggtggcagatagcctccaggcatctatggaaaaagatgcaaccctgaacgtggacagaaaggaaaaatgcgtgagcctgccggactgctgccacggaagtgaattgcgggatttcccaggaaggcctatgggccacctatctaaagacgtcgacgaaaatgactctcatgagggagaagatcagtttcttagccttgaggcgagtacagagactttggtacacgtgtcggatgaagacaataatgccgatttgtgcctgaccgacgacaaacaggttttaaatacacaggggcagaaaacatcaggtcagcacatgatccagggggctggatctctggagaaagccctgccaattattcaaagtaaccaggtaagttccaactcctgggggatagccggtgaaaccgagctggcccttgtgaaggagtctggggagcgcaaagtgaccgatagcatctctaagagcctcgagttgtgtaatgagatttcattgtcagagatcaaggacgcccctaaagttaatgctgtcgacaccctgaatgtgaaggacatagccccagagaaacaactgctcaattccgctgtgatcgcccagcaaaggcggaagcctgacccccctaaagacgaaaatgaacgaagcacttgcaacgtggttcagaatgagttcctggacaccccttgcaccaatcgtggcctacctctgctaaagactgattttggaagctgtctcctgcagccaccttcttgtcctaacggtatgagcgccgaaaacggcctggaaaagtctggcttctctcagcaccagaacaagtccccgcctaaggtcaaagccgaggacggcatgcagtgtttgcagcttaaagaaaccttagccacccaggagcctaccgacaatcaagtgcgcctccgtaaacggaaagagatacgcgaggatcgtgacagagcaaggctggatagcatggtcctcctcatcatgaagttagaccagcttgaccaagatatcgaaaacgctctttctaccagttccagccctagcggaactcctactaatctgagacgccacgtacccgacctggaatccggctcagagagcggcgctgatactattagcgtgaaccagacccgagtcaatctgtcctccgacaccgaatccaccgacctgcccagcagcacccctgtggcaaacagcggcacaaaaccaaagacaactgccatacagggaatctctgaaaaagagaaagctgagatagaagctaaggaggcctgcgattggctacgcgcaactggcttccctcagtacgctcaattgtacgaagattttttattccccatagacatcagcctggtaaagcgcgagcacgacttccttgaccgggacgccattgaggctctatgcaggcgtctgaatacccttaacaaatgcgccgttatgaagctagagatatctcctcatcggaagaggtcggacgatagcgatgaagatgaaccttgcgcaattagtggcaaatggacctttcagagggactcaaagcggtggtcccgcctggaggaattcgacgtgttcagcccgaagcaagatctggtgccagggagccccgacgactcacatcccaaagacggcccatccccgggaggcaccctgatggacttgagtgagcgccaggaagtgagttcagtgaggtccctatcctcgacaggatcgctcccctcccacgccccaccatccgaagatgctgccaccccccgaactaactctgttatctccgtgtgctcatccagcaacctggccggaaatgacgactcatttggcagcctaccaagtccaaaggaactgagcagcttctcattcagtatgaaaggccatgagaagaccgctaagagtaaaactcgctcacttttgaagaggatggagagccttaaactcaagtcctctcatcattccaagcacaaggcgccaagcaagctcggactcatcatctcaggcccaatactccaggagggcatggacgaagagaaactgaaacagttgaattgtgtcgagataagcgccttgaacgggaatcgcataaacgtcccaatggtgcggaagaggagcgtctcaaattctacacagactagctcttcttccagtcagagtgagacctcatcggccgtgagcacccctagtcccgtgacacggacaagatctctgtccgcttgcaataagcgcgtcggtatgtacctggaggggtttgatccttttaaccagtcgacctttaataatgtggtggagcagaactttaagaaccgtgagtcgtaccctgaggatacagtgttctatatccccgaggatcacaagcccggtacattccctaaagcattgaccaacggctcctttagcccctctggcaacaatggctccgtgaattggcggaccggctcgtttcatggacccggacacattagccttagaagagagaattccagtgattctcccaaagagctgaagcgacggaactcaagctctagcatgagttcacgactaagcatttatgacaacgtgccagggtctatactatacagtagcagcggtgacttggcagacttggagaacgaagatatctttcccgagttggatgacattctgtatcacgtcaagggcatgcagcggattgtgaaccagtggtcagaaaagttttccgatgagggggactctgatagcgccctggacagcgtttctccttgcccttcctcgccaaaacagattcatcttgacgtcgacaacgaccgaacgacccccagcgatctggactctaccgggaactcgctgaacgaacctgaagagccctctgagattcctgagcgcagggatagcggagtcggcgcttcactcacacgctctaatcgccatcggctgcgctggcactcctttcaatccagccacagaccctctttaaatagcgttagcttgcagataaactgtcaaagtgtggcccagatgaatctcctccagaagtacagtttgctgaagttgacagctctattggaaaaatacactccctcaaataaacacggcttcagctgggcagttcccaagttcatgaagcgaatcaaggtacccgactacaaggatcggtctgtttttggcgtgccactgaccgtgaacgtgcagcggacaggacaaccattacctcagtctatccagcaagccatgaggtacctgagaaaccactgtcttgaccaggtgggcctgtttaggaagagcggggtgaagtccaggatccaggccctgaggcagatgaacgagggtgctatcgattgcgtgaattatgagggtcaatccgcttacgacgtggcagatatgctgaaacagtatttcagagatctgccagagccattgatgaccaataagctaagcgaaacatttctccagatctaccagtatgtgcccaaggatcagagactccaggccattaaggcagcaatcatgctgcttcctgacgagaatagggaggtgcttcagaccctcctttacttcctaagcgatgtaacggccgcagtgaaagagaaccagatgaccccgacaaacctggctgtgtgtctcgcaccttccttgttccacttgaatacccttaaacgagaaaatagcagccctagggtgatgcagagaaagcagtctctcggcaagcccgaccagaaggacctcaatgaaaatctcgctgctacacaggggctggcccacatgatagccgaatgtaagaagctctttcaggtgcctgaagaaatgtccagatgccggaacagctatacggagcaggagcttaaacccctgacactggaggccctcggacatctcggtaatgacgactcggccgattaccagcactttctccaagattgcgttgatgggctgtttaaggaggtgaaagaaaaattcaaaggctgggtgtcatatagcacttcggagcaagccgagcttagctacaagaaggtgtcagagggaccaccgctgagattatggcgatctgtaatcgaggtccccgctgtgcccgaagaaatacttaagaggctgttgaaagagcagcacctttgggacgtggacctgctcgattccaaagtgatcgaaatactggactctcaaactgagatctatcagtatgtgcagaactcaatggcaccacaccctgcccgagattacgtggtcctgagaacttggcgcaccaatctcccgaagggcgcatgcgccttgctgcttaccagtgtcgaccatgatcgggcacccgtggtgggcgtgcgggtgaacgttctgctgagcaggtaccttattgaaccctgtggccctggaaaaagcaaacttacctacatgtgccgcgtcgatctccggggtcacatgccggagtggtacacaaaaagcttcgggcacttatgcgccgctgaagtagttaagatcagggacagctttagtaatcagaacactgagactaaggataccaaaagccggtag

SEQ ID NO: 256428 - DNA, 3556 bp, Artificial Sequence
  derived and/or modified sequence
actgacttcgtgccctccatgttccttgacagcctgggcctctcctactggattaatacctgatgagtacctgatcacgcaacagtgaaacaacacaagaaattgaagccaaggaagcttgtgattggctacgggcaactggtttcccccagtatgcacagctttatgaagatttcctgttccccatcgatatttccttggtcaagagagagcatgattttttggacagagatgccattgaggctctatgcaggcgtctaaatactttaaacaaatgtgcggtgatgaagctagaaattagtcctcatcggaaacgaagtgacgattcagacgaggatgagccttgtgccatcagtggcaaatggactttccaaagggacagcaagaggtggtcccggcttgaagagtttgatgtcttttctccaaaacaagacctggtccctgggtccccagacgactcccacccgaaggacggccccagccccggaggcacgctgatggacctcagcgagcgccaggaggtgtcttccgtccgcagcctcagcagcactggcagcctccccagccacgcgccccccagcgaggatgctgccaccccccggactaactccgtcatcagcgtttgctcctccagcaacttggcaggcaatgacgactctttcggcagcctgccctctcccaaggaactgtccagcttcagcttcagcatgaaaggccacgaaaaaactgccaagtccaagacgcgcagtctgctgaaacggatggagagcctgaagctcaagagctcccatcacagcaagcacaaagcgccctcaaagctggggttgatcatcagcgggcccatcttgcaagaggggatggatgaggagaagctgaagcagctcaactgcgtggagatctccgccctcaatggcaaccgcatcaacgtccccatggtacgaaagaggagcgtttccaactccacgcagaccagcagcagcagcagccagtcggagaccagcagcgcggtcagcacgcccagccctgttacgaggacccggagcctcagtgcgtgcaacaagcgggtgggcatgtacttagagggcttcgatcctttcaatcagtcaacatttaacaacgtggtggagcagaactttaagaaccgcgagagctacccagaggacacggtgttctacatccctgaagatcacaagcctggcactttccccaaagctctcaccaatggcagtttctccccctcggggaataacggctctgtgaactggaggacgggaagcttccacggccctggccacatcagcctcaggagggaaaacagtagcgacagccccaaggaactgaagagacgcaattcttccagctccatgagcagccgcctgagcatctacgacaacgtgccgggctccatcctctactccagttcaggggacctggcggatctggagaacgaggacatcttccccgagctggacgacatcctctaccacgtgaaggggatgcagcggatagtcaatcagtggtcggagaagttttctgatgagggagattcggactcagccctggactcggtctctccctgcccgtcctctccaaaacagatacacctggatgtggacaacgaccgaaccacacccagcgacctggacagcacaggcaactccctgaatgaaccggaagagccctccgagatcccggaaagaagggattctggggttggggcttccctaaccaggtccaacaggcaccgactgagatggcacagtttccagagctcacatcggccaagcctcaactctgtatcactacagattaactgccagtctgtggcccagatgaacctgctgcagaaatactcactcctaaagctaacggccctgctggagaaatacacaccttctaacaagcatggttttagctgggccgtgcccaagttcatgaagaggatcaaggttccagactacaaggaccggagtgtgtttggggtcccactgacggtcaacgtgcagcgcacaggacaaccgttgcctcagagcatccagcaggccatgcgatacctccggaaccattgtttggatcaggttgggctcttcagaaaatcgggggtcaagtcccggattcaggctctgcgccagatgaatgaaggtgccatagactgtgtcaactacgaaggacagtctgcttatgacgtggcagacatgctgaagcagtattttcgagatcttcctgagccactaatgacgaacaaactctcggaaacctttctacagatctaccaatatgtgcccaaggaccagcgcctgcaggccatcaaggctgccatcatgctgctgcctgacgagaaccgggaggttctgcagaccctgctttatttcctgagcgatgtcacagcagccgtaaaagaaaaccagatgaccccaaccaacctggccgtgtgcttagcgccttccctcttccatctcaacaccctgaagagagagaattcctctcccagggtaatgcaaagaaaacaaagtttgggcaaaccagatcagaaagatttgaatgaaaacctagctgccactcaagggctggcccatatgatcgccgagtgcaagaagcttttccaggttcccgaggaaatgagccgatgtcgtaattcctataccgaacaagagctgaagcccctcactctggaagcactcgggcacctgggtaatgatgactcagctgactaccaacacttcctccaggactgtgtggatggcctgtttaaagaagtcaaagagaagtttaaaggctgggtcagctactccacttcggagcaggctgagctgtcctataagaaggtgagcgaaggaccccctctgaggctttggaggtcagtcattgaagtccctgctgtgccagaggaaatcttaaagcgcctacttaaagaacagcacctctgggatgtagacctgttggattcaaaagtgatcgaaattctggacagccaaactgaaatttaccagtatgtccaaaacagtatggcacctcatcctgctcgagactacgttgttttaagaacctggaggactaatttacccaaaggagcctgtgcccttttactaacctctgtggatcacgatcgcgcacctgtggtgggtgtgagggttaatgtgctcttgtccaggtatttgattgaaccctgtgggccaggaaaatccaaactcacctacatgtgcagagttgacttaaggggccacatgccagaatggtacacaaaatcttttggacatttgtgtgcagctgaagttgtaaagatccgggattccttcagtaaccagaacactgaaaccaaagacaccaaatctaggtgatcactgaagcaacgcaaccgcttccaccaccatggtgtttgtttctagaacttttgccagtccttgaagaatgggttctgtgtctaatcctgaaacaaagaaaactacaagctggagtgtaggaattgactatagcaatttgatacatttttaaagctgcttcctgtttgttgagggtctgtattcatagaccttgactggaatatgtaagactgtgc

SEQ ID NO: 256429 - protein, 539 aa, Artificial Sequence
  derived and/or modified sequence
MDCQLSILLLLSCSVLDSFGELIPQPSNEVNLLDSKTIQGELGWISYPSHGWEEISGVDEHYTPIRTYQVCNVMDHSQNNWLRTNWVPRNSAQKIYVELKFTLRDCNSIPLVLGTCKETFNLYYMESDDDHGVKFREHQFTKIDTIAADESFTQMDLGDRILKLNTEIREVGPVNKKGFYLAFQDVGACVALVSVRVYFKKCPFTVKNLAMFPDTVPMDSQSLVEVRGSCVNNSKEEDPPRMYCSTEGEWLVPIGKCSCNAGYEERGFMCQACRPGFYKALDGNMKCAKCPPHSSTQEDGSMNCRCENNYFRADKDPPSMACTRPPSSPRNVISNINETSVILDWSWPLDTGGRKDVTFNIICKKCGWNIKQCEPCSPNVRFLPRQFGLTNTTVTVTDLLAHTNYTFEIDAVNGVSELSSPPRQFAAVSITTNQAAPSPVLTIKKDRTSRNSISLSWQEPEHPNGIILDYEVKYYEKQEQETSYTILRARGTNVTISSLKPDTIYVFQIRARTAAGYGTNSRKFEFETSPDCMYYFNAV

SEQ ID NO: 256430 - DNA, 1620 bp, Artificial Sequence
  derived and/or modified sequence
atggactgccaattatccatccttcttctgctctcttgctctgtgctcgacagctttggggaattgattccacagcccagcaatgaagtgaacttgcttgattcaaaaaccatccagggtgaactgggatggatcagctatcctagccatgggtgggaggagatctcgggggtggacgaacattatacacctatcagaacatatcaggtgtgtaacgttatggatcactctcagaataattggttgaggacaaactgggtgcctcgaaattccgcccagaagatatacgtggagcttaaattcaccctgcgggactgcaactccatccctttggtgctgggcacctgcaaggagaccttcaatctgtactacatggagtccgacgacgatcatggcgtgaagtttcgtgagcatcagttcacgaagattgataccatcgctgcagatgagtcattcactcaaatggacttgggcgaccgcattctcaaattaaacaccgaaatccgtgaggtgggaccggtgaacaaaaagggtttttacctcgcatttcaggacgtgggagcgtgcgtggctcttgtgtcggtacgggtatacttcaagaaatgccccttcactgtaaagaacttagcaatgttccctgataccgttccgatggacagccagtcattggtcgaggttcggggctcctgtgttaataatagcaaggaggaggatcctcccagaatgtactgctcaaccgagggcgagtggttggttcctatcgggaaatgttcctgcaacgctggatacgaggagcggggctttatgtgtcaggcctgtagaccgggattttataaggcgttagatggcaacatgaagtgtgctaaatgcccaccgcatagctccacacaggaggacggtagtatgaactgccgatgtgaaaacaactatttccgcgccgataaggacccaccctccatggcctgcaccagacctccatccagtcctcggaatgtcatctctaacatcaatgagacttcagtaatcctcgactggtcctggcctctcgataccggcgggagaaaggatgtgacattcaacattatctgcaaaaagtgtggctggaacattaagcagtgcgaaccatgttctcctaatgtacgctttctgccaaggcagttcgggcttaccaatacgaccgtgaccgtgactgacttgctcgctcacactaactacacgttcgagatcgatgccgtgaacggtgtatctgagctctcgtcaccacccaggcagttcgcagccgtcagcattactacgaaccaagccgctccatctcctgtcctgactattaagaaagaccgtacatctcgaaactcaatctccctcagttggcaggagcccgaacatcctaatggtatcattctcgattatgaagttaagtattacgagaagcaggagcaggaaacttcctatacaatcctgcgcgctagaggaacaaacgtcactatcagctctctgaagcccgatactatttatgtgtttcagatccgggcaagaaccgctgcaggttacggaacaaactcacggaagtttgaatttgagacaagccccgattgtatgtactatttcaacgcagtctag

SEQ ID NO: 256431 - DNA, 1620 bp, Artificial Sequence
  derived and/or modified sequence
atggactgccagctgagcatcctgctgctgctgagctgcagcgtgctggacagctttggagagctgatcccccagcccagcaatgaggtgaacctgctggacagcaagaccatccagggcgagctgggctggatctcctaccccagccacggctgggaggagatcagcggcgtggatgagcactacacccccatccgcacctaccaggtgtgcaatgtgatggaccacagccagaacaactggctgcggaccaactgggtgcccagaaattctgcccagaagatctacgtggagctgaagttcaccctgcgggactgcaacagcatccccctggtgctgggcacctgcaaggagaccttcaacctgtactacatggagagtgatgatgaccatggagtgaagttccgggagcaccagttcaccaagattgacaccatcgccgcagatgagagcttcacccagatggacctgggggaccgcatcctgaagctgaacacagagatccgggaggtgggccctgtgaacaagaagggcttctacctggccttccaggatgtgggcgcctgtgtggccctggtgtctgtgcgggtgtacttcaagaagtgccccttcaccgtgaagaacctggccatgtttcctgacacagtgcccatggacagccagagcctggtggaggtgcggggcagctgtgtgaacaacagcaaggaggaggacccccccaggatgtactgcagcacagaaggagagtggctggtgcccatcggcaagtgcagctgcaatgccggctatgaggagcggggcttcatgtgccaggcctgcaggcctggcttctacaaggccctggatggcaacatgaagtgtgccaagtgccccccccacagcagcacccaggaggatggctccatgaactgccgctgtgagaacaactacttccgggctgacaaggaccccccatccatggcctgcaccaggcctcccagcagccccagaaatgtcatcagcaacatcaatgagaccagcgtcatcctggactggagctggcccctggacacaggaggcaggaaggatgtgaccttcaacatcatctgcaagaagtgtggctggaacatcaagcagtgtgagccctgcagccccaacgtgcgcttcctgccccggcagtttggcctgaccaacaccaccgtgacagtgacagacctgctggcccacaccaactacacctttgaaattgatgctgtgaatggagtgtctgagctgagcagccccccccggcagtttgctgctgtgtccatcaccaccaaccaggccgcccccagccctgtgctgaccatcaagaaggacaggaccagcaggaacagcatcagcctgtcctggcaggagcctgagcaccccaacggcatcatcctggactatgaggtgaagtactatgagaagcaggagcaggagaccagctacaccatcctgcgggcccggggcaccaacgtgaccatcagcagcctgaagccagacaccatctacgtgttccagatccgggccaggacagctgctggctacggcaccaacagcaggaagtttgaatttgagaccagcccagactgcatgtactacttcaatgctgtgtag

SEQ ID NO: 256432 - DNA, 1620 bp, Artificial Sequence
  derived and/or modified sequence
atggactgccagctgagcatcctgctgctgctgagctgcagcgtgttagactcctttggagagctcatcccacagccgtcgaatgaagtcaaccttttagatagcaaaactatccagggtgaacttggatggatatcttatccatcccatggttgggaggagatcagcggcgtggacgagcactatacgcccattcggacttaccaggtgtgcaacgtaatggaccatagccagaacaattggctgcggacaaactgggttccacggaattcagcccaaaagatttatgtggaactgaagtttacattgagagactgcaatagcattccacttgtactcggcacttgcaaggagactttcaatctctactacatggaaagtgacgatgatcacggggttaaattcagagaacaccagttcactaaaattgatacgattgcagctgacgagtccttcacacagatggacctgggagatcgaattctcaaactgaatacagaaatcagagaagtggggcctgtgaataagaaaggattctatcttgctttccaagacgtcggggcatgcgtggctctcgttagtgtccgtgtgtattttaaaaaatgtcccttcaccgtgaagaacttagctatgttccctgatacagtgcccatggactcccagagcctggtcgaagtccgggggtcctgtgtaaacaattccaaggaggaggacccccccaggatgtactgcagcacggaaggcgaatggctcgttccgattggcaaatgctcttgtaatgcgggatatgaagagcgcggcttcatgtgccaggcttgtcggccgggattctacaaggccctggacggcaatatgaagtgtgccaagtgtcctccccacagctccacacaggaggacggttccatgaactgtcggtgtgaaaataattactttcgcgcggataaggatcccccaagtatggcatgcactcgcccaccttcttccccccgcaacgtgatctccaacattaacgagacaagtgtgatcttggactggtcatggccattagatactggtggtagaaaagacgtgacattcaacatcatttgtaaaaaatgcgggtggaatattaaacagtgtgagccatgctcacccaatgtacggttcctgcctcgccagttcggtcttacaaataccaccgtgacagtgactgacctgctcgcccacacaaactatactttcgagatagatgcggtcaacggtgtcagcgagctgagttcccctcccagacaattcgcggccgtgagtattacaactaaccaggcggcgccttctcctgtactgaccattaaaaaggacagaacaagtcgcaactcaatatcgctgtcctggcaggagccggagcaccctaatgggattatactggattacgaggtaaagtactacgagaaacaggagcaggaaacctcttatacaatactgcgcgctaggggcacaaacgtcactatttccagtctcaagccagataccatctacgtcttccaaattcgcgcacgcacagcagccggctacggcactaattccaggaagtttgaatttgagacatccccggattgcatgtactatttcaatgctgtgtag

SEQ ID NO: 256433 - DNA, 1620 bp, Artificial Sequence
  derived and/or modified sequence
atggactgccaactgtccatcctgcttctactgtcatgcagcgtccttgatagctttggggagttgattccacagccctctaacgaagtgaatctgttagacagcaaaacgatccaaggagaattaggctggattagttatccatcccacggctgggaggagatcagcggcgtggatgagcactacacccccatcagaacataccaggtctgtaacgttatggatcattcgcaaaataactggttaaggacaaattgggtgccccgaaatagtgcccagaaaatctatgtagagctgaagtttactcttagggattgcaattcgattcctctggttttgggaacctgcaaagaaacattcaacctgtactatatggaaagtgatgacgaccacggtgtgaaattccgggaacaccagttcaccaaaattgacacaattgcggcagacgagtcatttacccagatggatctcggggatagaattttaaagctgaacaccgagatacgggaagtggggcctgttaataagaaaggattttacctggccttccaggatgtaggcgcttgtgtagcccttgttagcgttcgagtttacttcaagaagtgtcccttcacggtgaaaaatcttgcaatgtttccagacaccgtcccaatggactcacaatctctggtcgaagtgcgcggttcctgcgttaataactctaaggaagaggatcctccgaggatgtattgcagcacggagggagagtggctggtgccgatcgggaagtgcagctgtaacgcagggtacgaggaacgcggattcatgtgccaggcgtgccggcctggattttacaaggccctcgatggtaacatgaaatgtgccaagtgtcccccacattcatccacccaagaagacgggagcatgaattgccggtgtgaaaacaattattttagagcagacaaggaccctccatcaatggcctgtaccaggccaccctccagccctaggaacgtcatatctaacataaatgagaccagcgtgattctcgattggtcgtggccactcgacaccggtgggagaaaagacgttacttttaatatcatctgtaagaaatgtgggtggaatatcaaacagtgcgaaccatgtagcccaaacgtccgttttctgccaagacagttcggcctgacgaacaccacagtgaccgttactgatctcctggcccacacaaactatacatttgagatagatgccgtgaacggcgtgtcagaactgagctcgccccctaggcaattcgcggcagtgtctataaccactaatcaggctgccccaagcccggtgctcaccataaagaaagatagaactagtcgaaactcaatcagcctttcttggcaggagccggagcaccccaacggaattatactggactatgaagtaaagtactacgaaaagcaggagcaggaaacttcttacaccattctccgtgctcggggaaccaatgtgacgatcagctccctaaaacccgacactatctacgttttccaaattcgcgctcgcacggccgcaggttacggaacgaattctcgcaaattcgagttcgaaacttctcccgattgtatgtattactttaacgctgtgtag

SEQ ID NO: 256434 - DNA, 1620 bp, Artificial Sequence
  derived and/or modified sequence
atggactgccagctgagcatcctgctgctgctgagctgcagcgtgctggacagcttcggcgagctgatcccccagcccagcaacgaggtgaacctgctggacagcaagaccatccagggcgagctgggctggatcagctaccccagccacggctgggaggagatcagcggcgtggacgagcactacacccccatcagaacctaccaggtgtgcaacgtgatggaccacagccagaacaactggctgagaaccaactgggtgcccagaaacagcgcccagaagatctacgtggagctgaagttcaccctgagagactgcaacagcatccccctggtgctgggcacctgcaaggagaccttcaacctgtactacatggagagcgacgacgaccacggcgtgaagttcagagagcaccagttcaccaagatcgacaccatcgccgccgacgagagcttcacccagatggacctgggcgacagaatcctgaagctgaacaccgagatcagagaggtgggccccgtgaacaagaagggcttctacctggccttccaggacgtgggcgcctgcgtggccctggtgagcgtgagagtgtacttcaagaagtgccccttcaccgtgaagaacctggccatgttccccgacaccgtgcccatggacagccagagcctggtggaggtgagaggcagctgcgtgaacaacagcaaggaggaggacccccccagaatgtactgcagcaccgagggcgagtggctggtgcccatcggcaagtgcagctgcaacgccggctacgaggagagaggcttcatgtgccaggcctgcagacccggcttctacaaggccctggacggcaacatgaagtgcgccaagtgccccccccacagcagcacccaggaggacggcagcatgaactgcagatgcgagaacaactacttcagagccgacaaggacccccccagcatggcctgcaccagaccccccagcagccccagaaacgtgatcagcaacatcaacgagaccagcgtgatcctggactggagctggcccctggacaccggcggcagaaaggacgtgaccttcaacatcatctgcaagaagtgcggctggaacatcaagcagtgcgagccctgcagccccaacgtgagattcctgcccagacagttcggcctgaccaacaccaccgtgaccgtgaccgacctgctggcccacaccaactacaccttcgagatcgacgccgtgaacggcgtgagcgagctgagcagcccccccagacagttcgccgccgtgagcatcaccaccaaccaggccgcccccagccccgtgctgaccatcaagaaggacagaaccagcagaaacagcatcagcctgagctggcaggagcccgagcaccccaacggcatcatcctggactacgaggtgaagtactacgagaagcaggagcaggagaccagctacaccatcctgagagccagaggcaccaacgtgaccatcagcagcctgaagcccgacaccatctacgtgttccagatcagagccagaaccgccgccggctacggcaccaacagcagaaagttcgagttcgagaccagccccgactgcatgtactacttcaacgccgtgtag

SEQ ID NO: 256435 - DNA, 2546 bp, Artificial Sequence
  derived and/or modified sequence
cttctccagcaatcagagcgctccccctcacatcagtggcatgcttcatggagatatgctcctctcactgccctctgcaccagcaacatggattgtcagctctccatcctcctccttctcagctgctctgttctcgacagcttcggggaactgattccgcagccttccaatgaagtcaatctactggattcaaaaacaattcaaggggagctgggctggatctcttatccatcacatgggtgggaagagatcagtggtgtggatgaacattacacacccatcaggacttaccaggtgtgcaatgtcatggaccacagtcaaaacaattggctgagaacaaactgggtccccaggaactcagctcagaagatttatgtggagctcaagttcactctacgagactgcaatagcattccattggttttaggaacttgcaaggagacattcaacctgtactacatggagtctgatgatgatcatggggtgaaatttcgagagcatcagtttacaaagattgacaccattgcagctgatgaaagtttcactcaaatggatcttggggaccgtattctgaagctcaacactgagattagagaagtaggtcctgtcaacaagaagggattttatttggcatttcaagatgttggtgcttgtgttgccttggtgtctgtgagagtatacttcaaaaagtgcccatttacagtgaagaatctggctatgtttccagacacggtacccatggactcccagtccctggtggaggttagagggtcttgtgtcaacaattctaaggaggaagatcctccaaggatgtactgcagtacagaaggcgaatggcttgtacccattggcaagtgttcctgcaatgctggctatgaagaaagaggttttatgtgccaagcttgtcgaccaggtttctacaaggcattggatggtaatatgaagtgtgctaagtgcccgcctcacagttctactcaggaagatggttcaatgaactgcaggtgtgagaataattacttccgggcagacaaagaccctccatccatggcttgtacccgacctccatcttcaccaagaaatgttatctctaatataaacgagacctcagttatcctggactggagttggcccctggacacaggaggccggaaagatgttaccttcaacatcatatgtaaaaaatgtgggtggaatataaaacagtgtgagccatgcagcccaaatgtccgcttcctccctcgacagtttggactcaccaacaccacggtgacagtgacagaccttctggcacatactaactacacctttgagattgatgccgttaatggggtgtcagagctgagctccccaccaagacagtttgctgcggtcagcatcacaactaatcaggctgctccatcacctgtcctgacgattaagaaagatcggacctccagaaatagcatctctttgtcctggcaagaacctgaacatcctaatgggatcatattggactacgaggtcaaatactatgaaaagcaggaacaagaaacaagttataccattctgagggcaagaggcacaaatgttaccatcagtagcctcaagcctgacactatatacgtattccaaatccgagcccgaacagccgctggatatgggacgaacagccgcaagtttgagtttgaaactagtccagactgtatgtattatttcaatgcagtctagaggagggggcagggatcttgcaaaagatgtctgatcgtttattctcactgtttctaagttttaaacaaatgtgatacatttaaggtatattgcttgggacattgcaatttgcagagccctgtgtctgtatacagtatttgtgtttgtgtgggtgtacattttgtgtttctttttttcttgtatgcaaatcaaacatattctaatgcctgaaatgcttctgttttttttttttagccataaattgcttttgaggaacattatttaatatagtaacacacttccagtgtctgtcatttcagatattccaggttcattgcgtgattcaatgaaccacaaaaaagaaacttgctgatccatgagaatcttaattttgttttaatccttaacacattcaatagcatatcacagagagaataaggattttctaaaatgtgttttatcacttcattcacattcagaagtaatttgaatagcctgttcctttaaccccaaatttggctaaaattggcctaaaactggcaaacatttttccagtaacttttctttttttcaaatgaattttcttcatacttaaaaaagccctttgctaaaatataattttcaaaaaggtaaaattatgtctatggcactaatataaaatgagtagaagttaatgattttacttaactcatttttttctttctttctttttttttttttttttttgagacggagtcttgctctgtcacccaggctggagtacagcagagcgatctcggctcactgcaagctcctgcaagctccgcctcctggcttcacgccattctccccctcagcctcccgagtagctgggactacag

SEQ ID NO: 256436 - protein, 317 aa, Artificial Sequence
  derived and/or modified sequence
MSCLDVMYQVYGPPQPYFAAAYTPYHQKLAYYSKMQEAQECNASPSSSGSGSSSFSSQTPASIKEEEGSPEKERPPEAEYINSRCVLFTYFQGDISSVVDEHFSRALSQPSSYSPSCTSSKAPRSSGPWRDCSFPMSQRSFPASFWNSAYQAPVPPPLGSPLATAHSELPFAAADPYSPAALHGHLHQGATEPWHHAHPHHAHPHHPYALGGALGAQAAPYPRPAAVHEVYAPHFDPRYGPLLMPAASGRPARLATAPAPAPGSPPCELSGKGEPAGAAWAGPGGPFASPSGDVAQGLGLSVDSARRYSLCGASLLS

SEQ ID NO: 256437 - DNA, 954 bp, Artificial Sequence
  derived and/or modified sequence
atgagctgcctggacgtgatgtaccaggtgtacggccccccccagccctacttcgccgccgcctacaccccctaccaccagaagctggcctactacagcaagatgcaggaggcccaggagtgcaacgccagccccagcagcagcggcagcggcagcagcagcttcagcagccagacccccgccagcatcaaggaggaggagggcagccccgagaaggagagaccccccgaggccgagtacatcaacagcagatgcgtgctgttcacctacttccagggcgacatcagcagcgtggtggacgagcacttcagcagagccctgagccagcccagcagctacagccccagctgcaccagcagcaaggcccccagaagcagcggcccctggagagactgcagcttccccatgagccagagaagcttccccgccagcttctggaacagcgcctaccaggcccccgtgcccccccccctgggcagccccctggccaccgcccacagcgagctgcccttcgccgccgccgacccctacagccccgccgccctgcacggccacctgcaccagggcgccaccgagccctggcaccacgcccacccccaccacgcccacccccaccacccctacgccctgggcggcgccctgggcgcccaggccgccccctaccccagacccgccgccgtgcacgaggtgtacgccccccacttcgaccccagatacggccccctgctgatgcccgccgccagcggcagacccgccagactggccaccgcccccgcccccgcccccggcagccccccctgcgagctgagcggcaagggcgagcccgccggcgccgcctgggccggccccggcggccccttcgccagccccagcggcgacgtggcccagggcctgggcctgagcgtggacagcgccagaagatacagcctgtgcggcgccagcctgctgagctag

SEQ ID NO: 256438 - DNA, 954 bp, Artificial Sequence
  derived and/or modified sequence
atgagctgcctggatgtgatgtaccaagtctatggtccgccacagccctattttgccgcagcctacacaccatatcaccaaaagctcgcgtactattcaaagatgcaggaggcccaggagtgcaatgcgtcccctagctcgagcgggtccggctcaagctccttctcatcgcagactcctgcctcgatcaaggaggaggagggttcacctgaaaaggagcggccacctgaagctgagtatatcaacagcaggtgcgttttgttcacctactttcagggtgacatatctagcgtagtagacgagcatttctcccgggcactctctcaaccttctagttattcgcctagttgcacctcgtctaaggccccccgaagctcaggaccatggcgagactgcagcttcccaatgtcccagcgtagtttcccagcctccttctggaactcagcctatcaggcccccgttccacctcccttgggaagcccactggctactgctcattctgaactgcctttcgcggcagccgacccctattcccccgcagccctgcatggccatttgcaccaaggcgctactgaaccctggcaccacgcacaccctcatcacgcccatcctcaccatccatacgctcttgggggggccctgggcgctcaagctgcaccttaccctcggcctgctgctgttcacgaggtgtacgcaccacacttcgacccccgatacgggcccttactcatgcctgcagcgtctggcagaccggcccgtctggcaacggcacctgcccccgcccctggctcccccccctgcgagttgagcgggaagggagagccagctggcgccgcctgggcaggtccagggggcccgttcgcttctccttcaggggatgtggcccaggggctaggtctgtccgtagacagcgcccgacggtacagcctctgcggggcttctctgttgtcctag

SEQ ID NO: 256439 - DNA, 954 bp, Artificial Sequence
  derived and/or modified sequence
atgagctgcctggatgtgatgtaccaggtgtatggccccccccagccctactttgctgctgcctacaccccctaccaccagaagctggcctactacagcaagatgcaggaggcccaggagtgcaatgccagccccagcagcagcggcagcggcagcagcagcttcagcagccagaccccagccagcatcaaggaggaggagggcagccctgagaaggagaggcctcctgaggccgagtacatcaacagccgctgtgtgctcttcacctacttccagggcgacatcagctctgtggtggatgagcacttcagccgggccctgagccagcccagcagctacagccccagctgcaccagcagcaaggcccccaggagcagcggcccctggagggactgcagcttccccatgagccagaggagcttccctgccagcttctggaacagcgcctaccaggcccctgtgcccccacccctgggcagccccctggccacagcccacagcgagctgccctttgctgctgctgacccctacagccctgctgccctgcacggccacctgcaccagggcgccacagagccctggcaccacgcccacccccaccacgcccacccccaccacccctatgccctgggcggggccctgggcgcccaggccgccccctaccccaggcctgctgctgtgcatgaggtgtatgccccccactttgaccccaggtatggccccctgctgatgcctgctgccagcggccgcccagcccggctggccacagccccagccccagcccctggcagccccccctgtgagctgagcggcaagggggagcctgctggggccgcctgggccggccctgggggcccctttgccagccccagcggagatgtggcccagggcctgggcctgtctgtggacagcgcccggcgctacagcctgtgtggggccagcctgctgtcctag

SEQ ID NO: 256440 - DNA, 954 bp, Artificial Sequence
  derived and/or modified sequence
atgagctgcctggacgtgatgtaccaggtgtacggccccccccagccttactttgcggctgcatatacaccctatcatcaaaagcttgcctactattcaaagatgcaagaagcccaagaatgcaatgcatcacctagctcatcaggttccggtagctcatccttcagctcccagactcctgcctccatcaaggaagaggaggggagccccgagaaggagcggcccccagaggcagaatacattaatagtagatgtgtcctgttcacctacttccaaggtgacatttctagcgtcgtggacgagcattttagcagagctctgtcccagccatcgtcctacagccctagttgcacaagttccaaggcacccaggagtagcggcccatggcgcgattgtagcttccccatgagccaacgatcctttcctgcctcattctggaactcagcctaccaggcacccgtgcctccgccgctgggcagcccccttgctactgcccattctgagcttcctttcgccgctgccgatccctatagcccagcggccctgcatggtcaccttcatcagggggccaccgaaccctggcatcacgcgcatcctcaccatgctcatccacatcatccttacgccctgggcggagctctgggagcccaggccgcaccctacccacgccctgccgcagtacacgaggtgtacgcacctcattttgatcctcgctatgggcccctcctcatgccagccgcctctgggaggcccgcaaggctcgcgaccgcgcccgctccagcgccaggttcccctccatgtgagctcagtggcaagggagaacccgccggtgctgcatgggcgggaccaggagggcccttcgcttctccatccggcgatgtggcccagggactcggtctgagcgtggatagtgcacgcagatacagcctgtgcggtgctagccttctctcatag

SEQ ID NO: 256441 - DNA, 954 bp, Artificial Sequence
  derived and/or modified sequence
atgagctgccttgacgttatgtaccaagtctatggacctccgcagccctactttgctgccgcttacaccccttatcaccagaagctggcctattactcaaagatgcaggaggctcaggaatgcaatgccagcccatcaagctctggcagtggatcttcttcattttcatctcagaccccagcatccataaaagaggaggaaggatcccccgagaaagaacgaccccctgaggctgaatacattaacagccgatgcgtgctcttcacatattttcagggggatatcagctccgtcgtggacgaacattttagtcgcgctcttagtcagcctagtagctattccccatcgtgcaccagcagtaaagcgcctaggtcaagcggaccttggcgtgattgcagctttcccatgagccagaggagctttccggcaagtttctggaactctgcataccaagcgcctgtccctccacctcttgggagccccctggcaaccgcccatagtgagctgccttttgccgcagccgacccttatagcccggcagcactgcacgggcacttacatcagggggctactgagccttggcatcacgcccatccccatcacgcccatccgcatcacccctatgcactcgggggagctctcggggctcaggcagccccttatcctcgcccagcggctgtccacgaagtgtacgcccctcatttcgaccccagatatggccctctccttatgcctgctgcctcaggcagacctgctaggctagccaccgcacccgcaccagcaccagggtcgccaccatgcgagctctctggcaaaggagaaccggcaggtgccgcttgggctggtccgggaggacctttcgcatcaccctctggcgatgtcgctcaaggcctgggcttgagcgtggattcagcccgtcgctatagtctgtgtggcgcttccctcctatcgtag

SEQ ID NO: 256442 - DNA, 2212 bp, Artificial Sequence
  derived and/or modified sequence
gcggtcgggagtaaaatcgcaggagtgggagggtagcgagccagctggattccgagccgcggagcgcgctggctttgctccgcctgatgactccagagcgcgggtccaagcgccgcccatgcagcacccctgagctccggggaaggagagttaatgaaaaaacacttaaccgtctccgctgcggagagtcatgagctgtctggatgttatgtaccaagtctatggtcctccgcagccctacttcgcagccgcctacaccccctaccaccagaaactagcctattattccaaaatgcaggaagcgcaggagtgcaatgccagccccagcagcagtggcagcggcagctcctcattttccagccaaaccccagccagtataaaagaggaagaaggcagcccagagaaagagcgcccaccagaggcagagtacatcaactcccgctgcgtcctcttcacttatttccagggggacatcagctccgtggtggatgaacatttcagcagggccctgagccaacccagcagctactctcctagctgtaccagcagcaaagcaccaaggagctctgggccctggcgagactgctccttcccgatgagccagcgcagcttccccgcctccttctggaatagcgcgtaccaggcgccagtgcccccgccgctgggcagccctctggccaccgcgcactcggagctgcccttcgccgccgccgacccctactcgcccgccgcgctgcatggccacctgcaccagggcgccacggagccctggcaccacgcgcacccgcaccacgcgcacccgcatcacccctacgccctgggcggcgccctcggcgcccaggccgccccctacccgcgccccgccgccgtgcacgaagtctacgcgccgcacttcgacccgcgctatgggccgctgctgatgccagccgcctcggggcgcccggcccgcctcgcaaccgccccggcgcccgcgcccggcagtcctccctgcgagctctccggcaaaggcgagccggcgggcgccgcgtgggccgggcccgggggacccttcgcgagcccctcgggggacgtggcccagggtctgggcctcagcgtggactcagctcgtcgttattccctctgtggtgcatccctcctgagctgatctgctgacccagggtttccccttccccttcccttctgaccagccttggaggctcagcatctgtgcctctcactccgtggatgaggacatgggggaaggcagagacttcagacttctcagtgtgttgggaaaaccaaaaaccacaactacagaaattcatctaaaaataagtcctgctgctgaaagagcaaatccaaagactgagttatgtttaatgacttttggccgaatcactggaaatatctgtggtgagattgctgagtcaggtgatgtgatatcataagctttcttggaacgggggaaagaaaatgaaactttttggtgtgaatattttttatgctgatgtgaattattttgttaggtagtgtgattatagcactactactgtcagattttaaattgtatgtgtacttgcatctaagactgtggtagagaagtaaagagaagtcaattccttcttcctcacctctcagcctccagatcccttcctgcccatcccttccctacaatgcccactccagacgcaaagatacacttttttcctttggactgtgaacatggaagcctcagcctgaatgtgagtggcaagtggcttatctggagccacctgcccaagtcttactaaaatgcagctgttgttagacaactgttgaaaactccagaaatacatcacccaaggtggcagttctcagtatttggcagaacaattgcaattgcactgggtatattatatatatatatgtatgcatatatatcatattttttacaaggaacattttatgatgaaagaagaaacccttctctgccttctctcccacgaattctgtccctgtatcctctggatgtaaaaagcaaggagagaccccaactgtctccatggagaagaactaggaatcaccacaaggggaagaaatgtacatgaagtctccattacctcgaatttttttctcagtctcactggttgtgatttggtcactttagtgttgggacaggggaaagggtctgtgcgtgggcaaagctgaaggtgatgaggaagaagagacgaacattaaagatgtctatttacta

SEQ ID NO: 256443 - protein, 1524 aa, Artificial Sequence
  derived and/or modified sequence
MPLLHRKPFVRQKPPADLRPDEEVFYCKVTNEIFRHYDDFFERTILCNSLVWSCAVTGRPGLTYQEALESEKKARQNLQSFPEPLIIPVLYLTSLTHRSRLHEICDDIFAYVKDRYFVEETVEVIRNNGARLQCRILEVLPPSHQNGFANGHVNSVDGETIIISDSDDSETQSCSFQNGKKKDAIDPLLFKYKVQPTKKELHESAIVKATQISRRKHLFSRDKLKLFLKQHCEPQDGVIKIKASSLSTYKIAEQDFSYFFPDDPPTFIFSPANRRRGRPPKRIHISQEDNVANKQTLASYRSKATKERDKLLKQEEMKSLAFEKAKLKREKADALEAKKKEKEDKEKKREELKKIVEEERLKKKEEKERLKVEREKEREKLREEKRKYVEYLKQWSKPREDMECDDLKELPEPTPVKTRLPPEIFGDALMVLEFLNAFGELFDLQDEFPDGVTLEVLEEALVGNDSEGPLCELLFFFLTAIFQAIAEEEEEVAKEQLTDADTKGCSLKSLDLDSCTLSEILRLHILASGADVTSANAKYRYQKRGGFDATDDACMELRLSNPSLVKKLSSTSVYDLTPGEKMKILHALCGKLLTLVSTRDFIEDYVDILRQAKQEFRELKAEQHRKEREEAAARIRKRKEEKLKEQEQKMKEKQEKLKEDEQRNSTADISIGEEEREDFDTSIESKDTEQKELDQDMVTEDEDDPGSHKRGRRGKRGQNGFKEFTRQEQINCVTREPLTADEEEALKQEHQRKEKELLEKIQSAIACTNIFPLGRDRMYRRYWIFPSIPGLFIEEDYSGLTEDMLLPRPSSFQNNVQSQDPQVSTKTGEPLMSESTSNIDQGPRDHSVQLPKPVHKPNRWCFYSSCEQLDQLIEALNSRGHRESALKETLLQEKSRICAQLARFSEEKFHFSDKPQPDSKPTYSRGRSSNAYDPSQMCAEKQLELRLRDFLLDIEDRIYQGTLGAIKVTDRHIWRSALESGRYELLSEENKENGIIKTVNEDVEEMEIDEQTKVIVKDRLLGIKTETPSTVSTNASTPQSVSSVVHYLAMALFQIEQGIERRFLKAPLDASDSGRSYKTVLDRWRESLLSSASLSQVFLHLSTLDRSVIWSKSILNARCKICRKKGDAENMVLCDGCDRGHHTYCVRPKLKTVPEGDWFCPECRPKQRSRRLSSRQRPSLESDEDVEDSMGGEDDEVDGDEEEGQSEEEEYEVEQDEDDSQEEEEVSLPKRGRPQVRLPVKTRGKLSSSFSSRGQQQEPGRYPSRSQQSTPKTTVSSKTGRSLRKINSAPPTETKSLRIASRSTRHSHGPLQADVFVELLSPRRKRRGRKSANNTPENSPNFPNFRVIATKSSEQSRSVNIASKLSLQESESKRRCRKRQSPEPSPVTLGRRSSGRQGGVHELSAFEQLVVELVRHDDSWPFLKLVSKIQVPDYYDIIKKPIALNIIREKVNKCEYKLASEFIDDIELMFSNCFEYNPRNTSEAKAGTRLQAFFHIQAQKLGLHVTPSNVDQVSTPPAAKKSRI

SEQ ID NO: 256444 - protein, 1233 aa, Artificial Sequence
  derived and/or modified sequence
MKSLAFEKAKLKREKADALEAKKKEKEDKEKKREELKKIVEEERLKKKEEKERLKVEREKEREKLREEKRKYVEYLKQWSKPREDMECDDLKELPEPTPVKTRLPPEIFGDALMVLEFLNAFGELFDLQDEFPDGVTLEVLEEALVGNDSEGPLCELLFFFLTAIFQAIAEEEEEVAKEQLTDADTKGCSLKSLDLDSCTLSEILRLHILASGADVTSANAKYRYQKRGGFDATDDACMELRLSNPSLVKKLSSTSVYDLTPGEKMKILHALCGKLLTLVSTRDFIEDYVDILRQAKQEFRELKAEQHRKEREEAAARIRKRKEEKLKEQEQKMKEKQEKLKEDEQRNSTADISIGEEEREDFDTSIESKDTEQKELDQDMVTEDEDDPGSHKRGRRGKRGQNGFKEFTRQEQINCVTREPLTADEEEALKQEHQRKEKELLEKIQSAIACTNIFPLGRDRMYRRYWIFPSIPGLFIEEDYSGLTEDMLLPRPSSFQNNVQSQDPQVSTKTGEPLMSESTSNIDQGPRDHSVQLPKPVHKPNRWCFYSSCEQLDQLIEALNSRGHRESALKETLLQEKSRICAQLARFSEEKFHFSDKPQPDSKPTYSRGRSSNAYDPSQMCAEKQLELRLRDFLLDIEDRIYQGTLGAIKVTDRHIWRSALESGRYELLSEENKENGIIKTVNEDVEEMEIDEQTKVIVKDRLLGIKTETPSTVSTNASTPQSVSSVVHYLAMALFQIEQGIERRFLKAPLDASDSGRSYKTVLDRWRESLLSSASLSQVFLHLSTLDRSVIWSKSILNARCKICRKKGDAENMVLCDGCDRGHHTYCVRPKLKTVPEGDWFCPECRPKQRSRRLSSRQRPSLESDEDVEDSMGGEDDEVDGDEEEGQSEEEEYEVEQDEDDSQEEEEVSLPKRGRPQVRLPVKTRGKLSSSFSSRGQQQEPGRYPSRSQQSTPKTTVSSKTGRSLRKINSAPPTETKSLRIASRSTRHSHGPLQADVFVELLSPRRKRRGRKSANNTPENSPNFPNFRVIATKSSEQSRSVNIASKLSLQESESKRRCRKRQSPEPSPVTLGRRSSGRQGGVHELSAFEQLVVELVRHDDSWPFLKLVSKIQVPDYYDIIKKPIALNIIREKVNKCEYKLASEFIDDIELMFSNCFEYNPRNTSEAKAGTRLQAFFIFRLKSLDSTSHPVMWTKLAHHRLRKSHESDFVLLKDIFEEKQIVHENGTLNHAV

SEQ ID NO: 256445 - DNA, 4575 bp, Artificial Sequence
  derived and/or modified sequence
atgccactccttcacagaaaaccttttgtgcgtcagaaaccacccgctgacttgcggcctgacgaggaggtgttctattgtaaggtgactaatgaaatctttcgccactacgatgacttctttgagcgcacaattctatgcaattcgctggtttggtcatgcgctgtgacaggcagacccggacttacataccaggaggccctggaaagtgagaagaaagcgcggcagaatcttcagtcgttcccagagcctctaattatccccgttttgtatttgaccagcctcacgcaccgctcaagactacatgagatttgcgatgatatttttgcatacgtgaaggatagatactttgtggaagagaccgttgaggtcatccgtaacaatggtgctcgcctccagtgccgtatcctggaggtgctgcccccttcacaccagaacggttttgccaacggtcacgtaaactccgtagacggagagaccattatcatcagcgacagcgacgacagcgaaacacagtcctgcagcttccagaacggcaagaagaaggacgccattgaccctcttttatttaaatacaaggtccaaccaacaaagaaagaactgcacgaatctgctatcgtgaaggctacccagatcagtaggcgcaaacacctgttcagtcgcgataaactcaaactgtttctgaaacagcattgtgaaccacaggacggtgtgataaagattaaagcaagcagcctgagtacctataaaatagctgagcaggattttagctactttttccctgatgatcccccgacattcattttctcccccgcaaacaggcggagggggagaccccctaagaggattcatatcagccaggaggacaatgtcgcaaacaagcagacattggcaagttatcggtctaaggctaccaaagagcgagacaagctgttgaagcaggaggaaatgaagagtttggcttttgagaaggcgaagctgaagcgcgagaaagccgatgccttggaagccaagaagaaagagaaagaagacaaggaaaagaagagggaagagctcaagaaaattgtagaggaagaaagactgaagaaaaaggaggagaaggagcggttaaaagtggagcgggaaaaagaaagggagaagctgcgtgaggagaaaaggaaatacgttgaatatcttaaacaatggtccaagcctcgggaggatatggagtgcgacgacctaaaagagctgcctgaaccaaccccagttaaaacccgccttccaccagagatctttggcgatgccctgatggtcctcgaattcctgaatgcttttggggagttgttcgaccttcaagatgagttcccagacggcgtgaccctggaggtcttggaggaggcactggttggtaatgatagtgagggacccttatgcgagctcttgttcttctttctgacagcaatatttcaggctatagcagaggaagaagaggaagtcgcaaaggaacagctgacggacgcagacacaaagggctgttctctcaaaagcctggatctcgactcatgtacgttgagtgagatcctgaggctgcatatccttgcatcgggggcagatgtgacaagcgccaatgcgaaatatcgctaccaaaagcggggtggatttgatgcaaccgatgacgcctgtatggagcttcgcttgtctaacccgtctttggtgaaaaagttgagctctactagcgtctacgacctgaccccaggagagaagatgaaaatcctccacgcactctgtgggaagcttctgactctcgtctcaacacgtgactttattgaagactatgttgatattctgcggcaggccaagcaagaatttagagagcttaaggcagaacagcataggaaggaaagagaggaggcagctgctcgcatcaggaagcgaaaagaggaaaagctgaaggaacaagaacagaagatgaaagagaaacaagagaagctaaaagaagatgagcagcgaaacagtactgccgacattagcattggggaggaggagcgggaggatttcgacaccagcatagaatcaaaagatactgagcagaaagagcttgatcaagacatggtcactgaggatgaagatgatccaggtagtcacaagcggggtcggaggggcaagcgaggtcagaacggctttaaggagttcactcggcaggagcagatcaattgcgttacaagagagcccctgaccgcagatgaagaagaggccctaaagcaggagcatcaacgaaaggagaaagagctgttagaaaaaatccagagtgctatagcttgtaccaacatctttcctctgggacgcgatcggatgtacaggagatattggatatttccctcgatcccaggcctgtttattgaggaggactatagcgggctgaccgaagacatgctgttaccgcggccttccagcttccagaacaacgtgcagtcgcaggatccccaagtgtcaacaaaaaccggcgagccattgatgtccgaatcgacatccaatatcgatcaggggccgcgggatcacagcgtccagttgccgaaacccgttcacaaaccgaaccgatggtgcttctacagctcctgcgagcagctcgatcagctgattgaggcgttaaacagtcggggccatcgtgagagtgcactcaaggaaacgttgctgcaagaaaaatcgcggatctgcgcccagctggccaggtttagtgaggagaaattccacttctccgacaagcctcaacctgattccaagcctacctattcccgaggcagatctagtaacgcctacgatccatcacagatgtgcgccgagaaacaacttgagttacggctcagagacttcctgctagacatcgaggaccgcatttaccagggaacgttaggcgccataaaagtgactgatcggcatatttggcggtcagccttggagtcaggccgttacgagttacttagtgaagaaaataaggagaacgggattatcaaaaccgtgaatgaggatgtggaggagatggagatcgatgaacagaccaaagttattgttaaagatcgactgttggggataaagactgaaacacctagcacagtatctactaatgcatccacccctcagagcgtgtcttccgttgttcattacctggccatggccctgttccagatcgagcagggcatcgagcgtagatttctcaaggccccactcgacgccagcgacagcggacgctcttacaaaacggttctcgaccgttggagggagtctctgctgagcagtgccagtctctcccaggtgtttctgcacctatctaccttagacaggtctgtcatttggagcaagagcatcttaaatgcgagatgtaaaatttgtcgcaaaaaaggggacgcagaaaacatggtgctttgcgatggatgcgatcggggacatcatacctattgtgtccgccctaaactgaaaacagtgccagagggggattggttttgtccagaatgtcgtcccaaacagcgaagtcgtagactctcctctcgccagcgcccatctctcgaatccgacgaggatgtggaggattcgatgggtggggaggatgacgaggtggatggggatgaagaagagggccaaagcgaagaggaagaatatgaagtggagcaggacgaggacgattctcaagaagaggaggaggtgtccctgcccaaaaggggacgaccccaggtgcgacttcctgtgaaaacccgagggaagttatccagctccttcagttcacgaggacagcagcaggaacctggccgttacccaagtagaagccagcaatctactccaaagaccactgtcagtagcaaaacaggccgtagtctgaggaaaataaactctgccccaccaacagagaccaagagccttcgcatcgcctcccgatccacaagacacagccacggtccactgcaggctgacgtctttgtagagttgttgtcaccacgaagaaagcggcgcggaagaaagagcgcaaacaatactcccgagaactcaccaaatttccccaacttccgcgtgatcgctaccaagagtagtgaacaatccagatctgttaacatcgcgtccaaactgtctctccaggaaagcgagagtaaaagaaggtgtcgaaaaagacagtcccctgagccctctcctgtgacccttggtcgtcgcagttcaggacgccaggggggggtgcacgagctgtcagctttcgagcagctggtagtcgaattagtaaggcatgatgacagttggcctttcctgaagcttgtgagcaagatccaggtacctgactattatgatatcatcaaaaaacccatagccttaaacattatccgagaaaaggttaataagtgtgagtacaaactcgcctctgagtttatagacgacatagagctgatgtttagcaactgctttgaatacaatccgagaaatacaagcgaggcgaaggctggaacccggttgcaggcattttttcacattcaagctcagaaattggggttgcacgtcactccatctaatgtcgaccaagtttcaacgccccccgcagccaaaaagagccgcatttag

SEQ ID NO: 256446 - DNA, 3702 bp, Artificial Sequence
  derived and/or modified sequence
atgaaaagcttggcatttgaaaaagcaaagcttaagcgcgagaaagctgacgctctcgaggcaaaaaagaaagagaaagaggacaaagaaaagaaaagagaagagctgaagaagatagttgaagaagaaagactcaaaaagaaagaagagaaagaaaggcttaaggttgagagggaaaaagaacgtgagaagctgcgagaagagaaacgtaagtacgttgagtacctcaaacagtggagcaagcccagagaggatatggaatgtgacgatctaaaggagctgcccgaacccacaccagtgaagaccaggctgccacctgagattttcggcgatgctctaatggtgctggaatttctgaacgcctttggtgagctctttgatctgcaggacgagtttcctgatggagtgacccttgaggttctggaggaggccctggtgggcaacgattctgaaggccccctgtgcgagctcctgtttttctttctgaccgcgatattccaagccatagcagaagaggaagaggaggtggctaaggagcaactcactgatgcagataccaaaggatgttccctgaagagcctggatctcgattcgtgtacgttatcagagatacttagactccacatcctggcgtccggtgctgatgtcacgagtgctaacgctaaatatagataccagaaacgcggcggcttcgacgcaaccgatgacgcctgtatggagctaaggctgagtaacccaagtttggtgaaaaagctgagttctacatctgtttacgacctgacccccggagaaaaaatgaagattctccacgctctatgtgggaaactgctcaccctggtgtcaactcgtgactttatcgaagattacgtcgacattcttaggcaggcgaaacaggagttcagggagctgaaagcggagcagcatcgtaaggaacgggaggaggccgccgccaggatccggaaacgcaaggaggaaaagctgaaggagcaagaacaaaagatgaaagagaagcaggagaaattgaaggaggacgagcagaggaatagtaccgctgatatcagtatcggtgaggaagaacgtgaagatttcgacaccagtattgagtccaaggacactgaacaaaaagagcttgaccaggatatggtaaccgaagatgaagacgatcccggtagccataaacgcggccgtagaggcaaacgcggtcaaaatgggtttaaagagttcaccagacaagaacaaataaattgtgttacaagagagccacttaccgctgacgaggaggaggccctgaagcaggaacaccagagaaaggaaaaggagcttctagagaagattcagtctgctatcgcctgtacgaatatatttcccctcggtagggacaggatgtaccgacgttactggatcttcccttcaatcccggggctgttcatcgaagaggattactcaggactgaccgaggatatgcttctaccgcgccccagcagctttcagaataacgttcaatcccaggatcctcaggtgagcacaaagaccggggagcctctgatgtctgaatccaccagcaacattgatcagggcccgagagaccacagtgtccagctgccaaagcctgttcacaagccaaatcggtggtgcttttatagctcctgcgagcagctggaccagctgattgaggctcttaactccaggggccaccgggagtcagccctaaaagagactctgctccaggagaaatctcgcatttgcgctcaactagctaggttctcagaggaaaagttccacttctccgataagcctcagcctgatagtaaacctacctatagccgaggaaggtcgagtaacgcctacgatccttctcagatgtgcgctgagaagcaactcgaactgcggctgagggacttcctgctcgacattgaagataggatctaccagggcacactgggcgccatcaaagttaccgacaggcatatctggcggagcgccctcgaatccggcaggtacgaactactaagtgaagaaaacaaggaaaatggtatcatcaagacagtgaacgaagatgtcgaggaaatggaaatagacgaacaaacaaaggtgatcgtcaaagacaggttgctgggcattaagactgaaacaccatccacagttagcaccaatgcctccaccccccagtcagtgagctcagtcgttcattatcttgctatggccttgtttcagattgagcagggaatagagaggagattcctcaaagcccccctagacgccagtgatagcgggagaagctataagaccgtgttggataggtggcgtgaaagccttttaagctctgctagcttgagccaggtttttctacacctgtccacactcgaccgttcagttatatggagtaagtcaattcttaacgctcgctgtaaaatctgcaggaagaagggagatgctgaaaacatggtcctgtgcgacgggtgtgacagaggccatcatacttactgcgtgaggcctaaattgaagacagtgcctgaaggtgattggttttgcccggagtgccgtcctaaacagcggagccggcggctgagttcccgacagaggccttctcttgagtccgacgaggatgtggaggattctatggggggtgaagacgacgaagtagacggcgacgaggaagagggtcaatcagaggaggaggagtatgaggtggagcaggacgaagatgactcccaggaggaagaagaagtgagcctgcctaaacgcggccgtccacaggtgaggttgcctgtgaagaccagaggcaagttaagttcctccttttcatccagaggccagcagcaggagcccggccgctatccttcccgctctcagcagtctactccaaagacaacagtatcttcgaaaacaggacgctcactgcgtaagatcaatagcgctcctccaactgagaccaagtcgttgagaatcgcgagccgaagcacacgccattcccacggacccttgcaggctgatgttttcgtggaactgctgagccctcggcgtaaaaggcggggccgcaagagcgcgaataacacaccagaaaacagcccaaacttcccaaactttcgggttatcgccactaaatcttcagagcaaagtaggtctgtgaatatcgcttcaaagctcagcctccaggaatccgagagcaagcggcggtgcagaaagcgacagagccctgaaccgtcacccgtcacgttgggaaggaggtcctctggcaggcaagggggtgtccatgaactctccgcgtttgagcagctcgtcgtggaactagttaggcacgacgatagctggcctttcctgaagctggtcagcaagattcaagttcccgattactatgatatcataaagaaaccaatcgctcttaacatcatccgggagaaggttaataagtgcgaatataaacttgcgtcagagttcatagatgacatcgagctcatgttctccaactgcttcgagtataacccgcgaaacacgtcagaggctaaggccggcacccggctgcaggccttttttattttccggttaaagtctctggactccacatcacaccctgttatgtggactaaattagctcatcatagattgcgcaaatcgcacgaatccgattttgtgctgttgaaggacatctttgaggagaagcagatcgtccacgagaatgggacgttgaaccacgctgtctag

SEQ ID NO: 256447 - DNA, 4575 bp, Artificial Sequence
  derived and/or modified sequence
atgcccctgctgcacaggaagccctttgtgcggcagaagcccccagctgacctgcggccagatgaggaggtgttctactgcaaggtgaccaatgagatcttccgccactatgatgacttctttgagaggaccatcctgtgcaacagcctggtgtggagctgtgctgtgacaggccggcccggcctgacctaccaggaggccctggagagcgagaagaaggcccggcagaacctgcagagcttccctgagcccctcatcatccctgtgctgtacctgaccagcctgacccacaggagccggctgcacgagatctgtgatgacatctttgcctacgtgaaggaccgctactttgtggaggagaccgtggaggtgatccggaacaacggggcccggctgcagtgccgcatcctggaggtgctgccccccagccaccagaatggatttgccaacggccacgtgaacagcgtggatggagagaccatcatcatcagtgacagtgatgattctgagacccagagctgcagcttccagaatggcaagaagaaggatgccatcgaccccctgctcttcaagtacaaggtgcagcccaccaagaaggagctgcacgagagcgccatcgtgaaggccacccagatcagcaggaggaagcacctgttcagccgggacaagctgaagctgttcctgaagcagcactgtgagccccaggatggagtcatcaagatcaaggccagcagcctgagcacctacaagattgctgagcaggacttctcctacttcttcccagatgacccccccaccttcatcttctccccagccaacagaagaagaggccggccccccaagaggatccacatcagccaggaggacaacgtggccaacaagcagaccctggccagctaccgcagcaaggccaccaaggagcgggacaagctgctgaagcaggaggagatgaagagcctggcctttgagaaggccaagctgaagcgggagaaggcagatgccctggaggccaagaagaaggagaaggaggacaaggagaagaagcgggaggagctgaagaagatcgtggaggaggagcggctgaagaagaaggaggagaaggagcggctgaaggtggagcgggagaaggagcgggagaagctgcgggaggagaagaggaaatatgtggagtacctgaagcagtggagcaagccccgggaggacatggagtgtgatgacctgaaggagctgcctgagcccacccctgtgaagacccggctgcccccagagatctttggagatgccctgatggtgctggagttcctgaatgccttcggggagctgtttgacctgcaggatgagttcccagatggagtgaccctggaggtgctggaggaggccctggtgggcaatgacagcgagggccccctgtgtgagctgctcttcttcttcctgacagccatcttccaggccatcgccgaggaggaggaggaggtggccaaggagcagctgacagatgctgacaccaagggctgcagcctgaagagcctggacctggacagctgcaccctgtctgagatcctgcggctgcacatcctggccagcggggctgatgtgaccagcgccaatgccaagtaccgctaccagaagagaggaggctttgatgccacagatgatgcctgcatggagctgcggctgagcaaccccagcctggtgaagaagctgagcagcacctctgtgtatgacctgaccccaggagagaagatgaagatcctgcacgccctgtgtgggaagctgctgaccctggtgtccacccgggacttcattgaagattatgtggacatcctgcggcaggccaagcaggagttccgggagctgaaggccgagcagcacaggaaggagcgggaggaggccgccgcccgcatcaggaagaggaaggaggagaagctgaaggagcaggagcagaagatgaaggagaagcaggagaagctgaaggaggatgagcagaggaacagcacagctgacatcagcattggagaggaggagagagaagattttgacaccagcattgagagcaaggacacagagcagaaggagctggaccaggacatggtgacagaagatgaagatgatcctggcagccacaagaggggccggcggggcaagaggggccagaatggcttcaaggagttcacccggcaggagcagatcaactgtgtgacccgggagcccctgacagcagatgaggaggaggccctgaagcaggagcaccagaggaaggagaaggagctgctggagaagatccagagcgccatcgcctgcaccaacatcttccccctgggccgggacaggatgtaccgccgctactggatcttccccagcatccctggcctcttcatcgaggaggactacagcggcctgacagaggacatgctgctgccccggcccagcagcttccagaacaacgtgcagagccaggacccccaggtgtccaccaagacaggagagcccctgatgtctgagagcaccagcaacatcgaccagggcccccgggaccacagcgtgcagctgcccaagcctgtgcacaagcccaaccgctggtgcttctacagcagctgtgagcagctggaccagctgattgaggccctgaacagccggggccaccgggagagcgccctgaaggagaccctgctgcaggagaagagccgcatctgtgcccagctggcccgcttcagcgaggagaagttccacttcagtgacaagccccagcctgacagcaagcccacctacagccggggccgcagcagcaatgcctatgaccccagccagatgtgtgccgagaagcagctggagctgcggctgcgggacttcctgctggacattgaagatcgcatctaccagggcaccctgggcgccatcaaggtgacagacagacacatctggaggtctgccctggagagcggccgctatgagctgctgtctgaggagaacaaggaaaatggcatcatcaagacagtgaatgaagatgtggaggagatggagattgatgagcagaccaaggtgattgtgaaggaccggctgctgggcatcaagacagagacccccagcacagtgtccaccaatgccagcaccccccagagcgtgtcctctgtggtgcactacctggccatggccctcttccagatcgagcagggcattgaaagacgcttcctgaaggcccccctggatgccagtgacagcggccgcagctacaagacagtgctggaccgctggagggagagcctgctgagcagcgccagcctgagccaggtgttcctgcacctgagcaccctggacagaagtgtcatctggagcaagagcatcctgaatgcccgctgcaagatctgcaggaagaagggagatgctgagaacatggtgctgtgtgatggctgtgaccggggccaccacacctactgtgtgcggcccaagctgaagacagtgcctgagggggactggttctgcccagagtgccggcccaagcagaggagccggcggctgagcagccggcagaggcccagcctggagagtgatgaagatgtggaggacagcatgggaggagaagatgatgaggtggatggagatgaggaggagggccagagcgaggaggaggagtatgaggtggagcaggatgaagatgacagccaggaggaggaggaggtgtccctgcccaagaggggccggccccaggtgcggctgcctgtgaagacccggggcaagctgagcagcagcttcagcagccggggccagcagcaggagcccggccgctaccccagccgcagccagcagagcacccccaagaccaccgtgagcagcaagacaggccgcagcctgaggaagatcaacagcgccccacccacagagaccaagagcctgagaattgccagccgcagcaccaggcacagccacggccccctgcaggctgatgtgtttgtggagctgctgagccccaggaggaagaggcggggcaggaagagcgccaacaacaccccagagaacagccccaacttccccaacttccgggtcatcgccaccaagagcagcgagcagagccgctctgtgaacatcgccagcaagctgagcctgcaggagagcgagagcaagaggcgctgcaggaagaggcagagccctgagcccagccctgtgaccctgggcagaagaagcagcggccggcagggcggcgtgcatgagctgagcgcctttgagcagctggtggtggagctggtgagacatgatgacagctggcccttcctgaagctggtgtccaagatccaggtgcctgactactatgacatcatcaagaagcccatcgccctgaacatcatccgggagaaggtgaacaagtgtgagtacaagctggccagcgagttcattgatgacatcgagctgatgttcagcaactgctttgagtacaaccccaggaacaccagcgaggccaaggccggcacccggctgcaggccttcttccacatccaggcccagaagctgggcctgcacgtgacccccagcaatgtggaccaggtgtccaccccacctgctgccaagaagagccgcatctag

SEQ ID NO: 256448 - DNA, 3702 bp, Artificial Sequence
  derived and/or modified sequence
atgaagagcctggcctttgagaaggccaagctgaagcgggagaaggcagatgccctggaggccaagaagaaggagaaggaggacaaggagaagaagcgggaggagctgaagaagatcgtggaggaggagcggctgaagaagaaggaggagaaggagcggctgaaggtggagcgggagaaggagcgggagaagctgcgggaggagaagaggaaatatgtggagtacctgaagcagtggagcaagccccgggaggacatggagtgtgatgacctgaaggagctgcctgagcccacccctgtgaagacccggctgcccccagagatctttggagatgccctgatggtgctggagttcctgaatgccttcggggagctgtttgacctgcaggatgagttcccagatggagtgaccctggaggtgctggaggaggccctggtgggcaatgacagcgagggccccctgtgtgagctgctcttcttcttcctgacagccatcttccaggccatcgccgaggaggaggaggaggtggccaaggagcagctgacagatgctgacaccaagggctgcagcctgaagagcctggacctggacagctgcaccctgtctgagatcctgcggctgcacatcctggccagcggggctgatgtgaccagcgccaatgccaagtaccgctaccagaagagaggaggctttgatgccacagatgatgcctgcatggagctgcggctgagcaaccccagcctggtgaagaagctgagcagcacctctgtgtatgacctgaccccaggagagaagatgaagatcctgcacgccctgtgtgggaagctgctgaccctggtgtccacccgggacttcattgaagattatgtggacatcctgcggcaggccaagcaggagttccgggagctgaaggccgagcagcacaggaaggagcgggaggaggccgccgcccgcatcaggaagaggaaggaggagaagctgaaggagcaggagcagaagatgaaggagaagcaggagaagctgaaggaggatgagcagaggaacagcacagctgacatcagcattggagaggaggagagagaagattttgacaccagcattgagagcaaggacacagagcagaaggagctggaccaggacatggtgacagaagatgaagatgatcctggcagccacaagaggggccggcggggcaagaggggccagaatggcttcaaggagttcacccggcaggagcagatcaactgtgtgacccgggagcccctgacagcagatgaggaggaggccctgaagcaggagcaccagaggaaggagaaggagctgctggagaagatccagagcgccatcgcctgcaccaacatcttccccctgggccgggacaggatgtaccgccgctactggatcttccccagcatccctggcctcttcatcgaggaggactacagcggcctgacagaggacatgctgctgccccggcccagcagcttccagaacaacgtgcagagccaggacccccaggtgtccaccaagacaggagagcccctgatgtctgagagcaccagcaacatcgaccagggcccccgggaccacagcgtgcagctgcccaagcctgtgcacaagcccaaccgctggtgcttctacagcagctgtgagcagctggaccagctgattgaggccctgaacagccggggccaccgggagagcgccctgaaggagaccctgctgcaggagaagagccgcatctgtgcccagctggcccgcttcagcgaggagaagttccacttcagtgacaagccccagcctgacagcaagcccacctacagccggggccgcagcagcaatgcctatgaccccagccagatgtgtgccgagaagcagctggagctgcggctgcgggacttcctgctggacattgaagatcgcatctaccagggcaccctgggcgccatcaaggtgacagacagacacatctggaggtctgccctggagagcggccgctatgagctgctgtctgaggagaacaaggaaaatggcatcatcaagacagtgaatgaagatgtggaggagatggagattgatgagcagaccaaggtgattgtgaaggaccggctgctgggcatcaagacagagacccccagcacagtgtccaccaatgccagcaccccccagagcgtgtcctctgtggtgcactacctggccatggccctcttccagatcgagcagggcattgaaagacgcttcctgaaggcccccctggatgccagtgacagcggccgcagctacaagacagtgctggaccgctggagggagagcctgctgagcagcgccagcctgagccaggtgttcctgcacctgagcaccctggacagaagtgtcatctggagcaagagcatcctgaatgcccgctgcaagatctgcaggaagaagggagatgctgagaacatggtgctgtgtgatggctgtgaccggggccaccacacctactgtgtgcggcccaagctgaagacagtgcctgagggggactggttctgcccagagtgccggcccaagcagaggagccggcggctgagcagccggcagaggcccagcctggagagtgatgaagatgtggaggacagcatgggaggagaagatgatgaggtggatggagatgaggaggagggccagagcgaggaggaggagtatgaggtggagcaggatgaagatgacagccaggaggaggaggaggtgtccctgcccaagaggggccggccccaggtgcggctgcctgtgaagacccggggcaagctgagcagcagcttcagcagccggggccagcagcaggagcccggccgctaccccagccgcagccagcagagcacccccaagaccaccgtgagcagcaagacaggccgcagcctgaggaagatcaacagcgccccacccacagagaccaagagcctgagaattgccagccgcagcaccaggcacagccacggccccctgcaggctgatgtgtttgtggagctgctgagccccaggaggaagaggcggggcaggaagagcgccaacaacaccccagagaacagccccaacttccccaacttccgggtcatcgccaccaagagcagcgagcagagccgctctgtgaacatcgccagcaagctgagcctgcaggagagcgagagcaagaggcgctgcaggaagaggcagagccctgagcccagccctgtgaccctgggcagaagaagcagcggccggcagggcggcgtgcatgagctgagcgcctttgagcagctggtggtggagctggtgagacatgatgacagctggcccttcctgaagctggtgtccaagatccaggtgcctgactactatgacatcatcaagaagcccatcgccctgaacatcatccgggagaaggtgaacaagtgtgagtacaagctggccagcgagttcattgatgacatcgagctgatgttcagcaactgctttgagtacaaccccaggaacaccagcgaggccaaggccggcacccggctgcaggccttcttcatcttccggctgaagagcctggacagcaccagccaccctgtgatgtggaccaagctggcccaccaccggctgaggaagagccatgaaagtgactttgtgctgctgaaggacatctttgaggagaagcagatcgtgcatgaaaatggcaccctgaaccacgctgtgtag

SEQ ID NO: 256449 - DNA, 4575 bp, Artificial Sequence
  derived and/or modified sequence
atgcccctgctgcaccggaagcccttcgtgcggcagaagccccccgccgacttacggcctgacgaggaggtattctattgtaaagtaaccaatgagatattccggcattacgacgacttttttgagcgtaccattctgtgtaacagccttgtatggagttgtgccgtgaccggtaggcctggcctcacctatcaggaagctctggagagtgagaaaaaggcccgccaaaaccttcagagctttccagaacccctgattatccccgttctctacctgacctccctgactcaccgaagccggctgcacgaaatctgcgacgacatcttcgcatacgtcaaagaccgatactttgttgaggaaactgttgaggtgatccgcaacaacggcgctcggttgcagtgtcgcatcctcgaggtcctgcccccaagccatcagaatgggtttgcgaacgggcatgtgaatagcgtcgatggagagaccataatcatcagtgatagtgatgactcggagacacagagttgctcattccagaatggaaaaaagaaagacgccatcgacccactgttgttcaagtacaaggtacagcctaccaaaaaggagctgcatgagtcagcaatagtcaaagctacacagatttcccgcaggaaacaccttttttctagagataaattgaaactttttctaaagcaacattgcgagccccaggacggcgttattaagattaaggctagttccctgagcacatataagatcgccgaacaggacttttcatatttctttccagatgatccccccacattcatcttttccccagctaacagacgcaggggacgcccaccaaagcgtattcacatttctcaagaggacaacgtggcaaacaagcaaactcttgcgagctacaggtccaaagccaccaaggagagagataagttgctgaagcaagaggagatgaaaagcctcgccttcgaaaaggcaaagcttaagcgagaaaaggcggacgcacttgaggccaaaaagaaagagaaggaggacaaagaaaagaagcgcgaagaattgaagaaaattgtggaggaagagcgactgaagaagaaagaggagaaagaaagacttaaagtggaaagggaaaaagagagggaaaaactgcgggaggagaaaaggaagtacgtggagtatctaaagcaatggagcaaaccgcgcgaggacatggagtgtgacgatttaaaggaacttccagagcccacccccgtcaagacgaggcttcccccagaaatctttggggatgccctgatggtcctggaatttctaaatgcctttggagaactctttgatctgcaggatgaatttcctgatggagttaccctggaggtccttgaagaggctctggttggcaatgacagcgaggggcccctctgcgaactcctgttctttttcctgactgccatcttccaggccatcgcagaagaggaagaagaggtcgccaaagagcagctgacggacgcagacactaaggggtgttcgctgaagtcactcgatctggattcctgcacactaagcgaaatactgagactccacattttggcgagtggggccgacgtcaccagtgcaaatgccaaatataggtaccagaaacgaggtggcttcgacgccactgacgacgcttgtatggaactgcggctgtcgaatcccagtttagttaagaagcttagcagcacctccgtgtacgaccttacccccggcgaaaagatgaagatactccatgcattgtgtggaaaactactgaccttagtgtctaccagagatttcattgaagattacgtagacattctccggcaggctaaacaggagttcagagagctaaaagccgaacagcaccggaaggaacgggaggaggccgctgcaagaatcaggaagcgcaaggaggaaaagcttaaggagcaggagcagaaaatgaaagaaaaacaggagaaactaaaggaagacgaacagagaaacagcacagccgacatcagtatcggcgaggaggagagggaggacttcgatacctccatcgagtctaaagacacagaacagaaggaactggatcaggacatggtcacagaagatgaagacgatccagggtcacacaagcgcggtcgccgcggaaaacgggggcagaacggattcaaggagtttactcgacaggaacagataaactgtgtcaccagagagcctctcaccgcagacgaggaggaagcccttaagcaggagcatcagaggaaagagaaggaattactcgaaaaaatacaatcagctatcgcgtgcaccaatatctttccccttgggcgcgacagaatgtataggcggtactggatattcccatctatccctggcctgttcatcgaggaggattactcgggtttgaccgaggacatgcttctgccaaggccaagcagctttcagaacaatgtgcagtcccaggacccacaagttagcaccaagaccggcgagcctttaatgagcgaaagcacttcaaacatcgaccagggccctagagatcattctgtgcagctgcccaagcctgtgcataagccaaatcgctggtgtttctattcaagctgcgaacagctggaccagctaatcgaggctctgaactctcgaggccaccgcgaaagtgctctgaaggagacgctgctccaggagaagtcgcgcatatgtgcacaactggctcgtttcagtgaagagaagtttcacttttctgacaagcctcaacctgacagtaagcccacttacagcaggggccgcagtagcaatgcgtacgacccctctcagatgtgcgctgagaagcagctggaactcaggttgagagacttcctcctggatatcgaagatcgtatataccagggtacattgggagccataaaggtgaccgatcggcatatatggagaagcgcactcgagtccggaagatatgaactgttgtctgaagagaacaaagagaatggaatcattaaaaccgtaaacgaagatgtcgaagaaatggaaatagacgaacaaactaaggtgatcgttaaagatcggctcctgggcataaagaccgagacacccagcacagtgtctactaatgcctctacgccacagtcagtgtcctcagttgtccactatttggcaatggcgttatttcagatcgagcagggcatcgaaagacggttcctcaaagcgccgcttgatgcatccgattcaggccgcagctacaagactgtgcttgatcgttggcgcgaaagtctgctttcttccgctagcttaagtcaagtgtttctgcacctgtcaaccctggacaggtccgtgatttggagcaagtctatcttgaatgcccggtgtaagatctgtcggaagaagggggatgccgaaaatatggtgctgtgtgacgggtgtgatagggggcaccacacttattgcgtccgccctaagctcaaaactgtaccggaaggggattggttttgtcccgagtgtcggcccaaacagcgtagtagacgtctgtccagtcgacaacggccttctctagaatccgacgaagacgtggaggacagcatgggaggagaggacgacgaggtggacggagatgaggaagagggccaatcagaagaggaggagtacgaggtcgagcaggacgaggacgacagccaagaggaagaagaagtgagcctgccaaaaagaggccggcctcaggtccgactccctgtaaaaactaggggtaaactttcttccagtttttcctcccggggccaacagcaggagccaggcagataccctagccggagtcagcagtctactcccaagactacggtctccagtaaaaccggcagatctctgaggaagatcaacagtgcccctcccaccgaaacaaagagcctccgtattgctagccgatccacacgacactcgcacggaccactgcaggcggacgtcttcgtggagctgctctccccccgcagaaagagacggggcagaaaatctgcaaataacacacctgaaaactcaccaaatttccccaatttcagagtcattgccacaaaatccagtgaacagagccgcagtgttaacattgcaagcaaattatctctgcaggagtccgaatccaagcgcagatgcaggaagcgacaaagtccagaaccttctccagtgactttaggtagacgctcttcggggaggcaggggggtgtgcatgagcttagcgcctttgagcagctggtggtggaactcgtgcgtcatgatgactcttggcctttccttaagctagtgtctaaaatccaggtgcctgattactatgatatcatcaagaagcctatagctctgaacattatccgggagaaagtgaacaagtgtgagtacaaactggcatccgaatttatcgacgacatcgagttaatgttctccaattgtttcgagtacaacccacgtaataccagcgaggccaaagccggcactcgcctgcaggcctttttccacattcaggcccaaaaattggggttacatgttacgcctagtaacgtggatcaagtgtccaccccaccagctgcgaaaaagtctcgaatctag

SEQ ID NO: 256450 - DNA, 3702 bp, Artificial Sequence
  derived and/or modified sequence
atgaagagcctggccttcgagaaggccaagctgaagcgggagaaggcagatgcccttgaggctaaaaaaaaagagaaggaagacaaggagaaaaaacgggaggagctaaagaaaattgtcgaggaggagaggttaaaaaaaaaggaggaaaaggaaaggctcaaggtcgagcgggagaaagagcgcgagaaactccgtgaggagaaacgtaagtatgtggagtatctgaagcagtggtcaaaaccgagagaagacatggagtgtgatgacttgaaggaactgcccgagcctaccccggttaagacgagattacccccagagatctttggcgacgcattgatggtcctagaattcttaaacgccttcggcgagttgtttgacttgcaggatgagttcccagacggtgtcaccctagaggtcttagaagaagccctggtggggaacgatagcgagggtccactttgtgaactcttgtttttctttctaaccgctatttttcaggccatagcagaagaggaagaggaagtggctaaggagcaactgactgacgcagatactaaggggtgttcactcaagagcctggatttggatagttgcacactgtctgagattctcaggctgcacatattggccagcggagccgatgtaactagcgctaacgctaaatatcggtatcagaagagaggcgggtttgacgctacagacgacgcctgcatggaattgcgactctccaatcctagtcttgtgaaaaagctctcatccactagcgtgtacgatctaacccctggagagaaaatgaagatcctgcacgccctatgcggaaaacttctaacactcgtgtccacaagagactttatcgaggactacgtagacatactccgtcaggcaaagcaggaatttagagaactgaaagccgagcagcaccggaaggaacgggaagaggccgccgcccgcatccggaagaggaaagaagaaaagcttaaggagcaggagcaaaaaatgaaagagaagcaggagaagctcaaggaagatgaacagaggaatagcacagcggacatttcaattggtgaggaagaacgtgaagactttgacaccagcatagagtcaaaggacactgaacagaaagagcttgaccaggacatggtgaccgaagacgaggacgaccctggatctcataaacggggccgtcgaggaaagagagggcagaatggattcaaggagtttaccaggcaggagcagataaactgcgtcaccagagagccactgaccgcggatgaagaggaagctctaaagcaggagcaccagcgaaaagagaaagagttgctcgagaaaatccagagcgccatcgcttgcactaatatattcccccttggccgggatagaatgtacagaagatattggatatttccatcgataccagggctatttattgaagaagactactctggcctgacagaagacatgctgcttcccaggccgtcttcctttcaaaacaatgtgcagtctcaggatccccaggtcagcactaaaactggagagccgctcatgtccgaaagcacgtcaaacatcgatcaagggccacgggatcacagtgtacagttgcccaaaccagttcacaagcccaataggtggtgcttctactcatcatgtgagcagctagatcaactgatcgaggccttgaatagccgcggacatcgtgagagcgccctgaaagaaacgctcctgcaggaaaaatccaggatctgtgcccagctggcccgattcagcgaggaaaaatttcacttctctgacaagccgcagccggactcaaaacctacatattccagagggagaagtagcaacgcctatgatccttctcagatgtgcgcagagaaacagcttgaattgcgactgcgcgactttcttctggacattgaagataggatttatcaaggtaccttgggcgcgatcaaggttaccgaccgacacatctggagaagtgcactcgaatctggcagatatgagctgctctctgaggaaaataaggagaacggtataattaaaactgtaaacgaagacgtcgaagaaatggaaattgatgaacagactaaggtgatcgtcaaggatcgtcttctggggattaagaccgaaacaccctccactgttagcacaaatgctagcacaccacaatccgtgtcctctgttgttcactatctcgctatggccctctttcaaatcgaacaggggattgagaggaggttcctcaaggcaccattggatgccagcgattccggccgttcttacaaaacagtacttgacagatggcgagagtccctgcttagctctgcctcgttatcgcaagtgtttctgcacctatcaaccctagatcggagcgtgatctggtctaagtccattcttaatgctcgctgcaaaatttgcagaaagaaaggcgacgcggaaaacatggtgctgtgtgatggttgcgatcgcggccaccacacctactgcgtccgaccaaaactgaagaccgtgcccgaaggcgactggttttgcccggagtgtagaccaaaacaaaggagtcgaagactgtcttctaggcagcgcccctctctggagtccgatgaggatgtcgaggacagcatgggaggcgaggatgatgaggtggacggcgacgaagaagaaggtcagtccgaggaggaagagtacgaagtggagcaagatgaggatgactcacaggaggaagaggaggtctccttgccgaagagagggagacctcaggtccggttgcccgtgaaaactagaggaaaactgagctcatcgtttagcagcaggggacaacagcaagagcccggaagatacccaagccggagccagcaatccacacccaagaccaccgtgtcttctaaaacaggccgatccttgcggaaaatcaactctgctccacccacagagactaaaagtttgagaattgcttcccggtccaccaggcattcacacgggcccctccaagctgatgtgttcgtagaactgttgtcacctcggcgaaagaggcggggacggaaatccgcaaacaacaccccagagaatagtcccaattttcctaactttagagtgattgccacaaagagttccgaacagtctcggagcgtgaacatagcttccaaattgtccttgcaggaatctgagtccaaacgtcggtgtagaaagcggcagtcacccgaaccttctcccgttacgcttggtcgtagaagttctggcagacaagggggtgtacacgaactgagtgcttttgaacaacttgtggtcgagctggtccgccacgatgattcttggccttttttgaaattggtgtccaaaattcaggttcctgactattacgatatcattaaaaaaccaattgctttaaacatcattcgtgagaaagtaaacaaatgcgagtataagctcgcttccgagttcatcgacgacatagaattgatgttctcgaactgtttcgaatataatccccggaacactagcgaggcgaaagctggcacacgccttcaagcgttctttatattccgattgaaatctctggattctacttcacaccccgtcatgtggactaaactggctcaccaccgccttagaaagagccatgagagtgatttcgtgcttctgaaggatatcttcgaagagaagcagatcgtccacgagaatggcacccttaatcacgccgtctag

SEQ ID NO: 256451 - DNA, 4575 bp, Artificial Sequence
  derived and/or modified sequence
atgcctcttctgcaccgtaaaccctttgtgagacagaagccacccgctgatctaaggccggatgaggaggtcttctactgcaaggtgacaaacgagatcttccgccattatgatgatttcttcgaacgcacaatcctgtgtaactctttggtttggagttgtgccgtcactgggcgtcccggactcacttaccaggaagctctcgagtctgaaaagaaggcacgtcaaaacctgcagtcctttcccgagccactgattattcctgttttgtacctgacgtccctgactcatcggtcccggttgcacgagatttgtgatgacatctttgcctacgtaaaagaccgctacttcgtggaggagacagttgaggtgattcggaataatggggcacgtctgcagtgtcgtatcctggaggtgttgccaccatcacaccagaatggattcgccaacggacatgtgaatagtgtggacggagagacgattataatatctgacagcgacgactccgagacgcagagctgttcatttcagaacgggaagaaaaaggacgcaatagacccactgttgtttaagtacaaagtgcagcccaccaagaaggagctgcacgaatccgccatcgtgaaagcaacccagatctctcgaagaaagcatctttttagcagggacaagttaaaactttttctcaagcaacactgcgaaccacaggatggagttatcaagattaaggcctcctccctgagtacttacaagatcgccgagcaagacttcagctacttttttcccgacgacccccctacatttattttcagcccagccaacaggaggcgagggaggccccctaaacgcatccacattagccaggaggacaacgttgcaaacaaacagaccctggccagttacagatcaaaagcaaccaaggagcgggacaagctcctgaaacaggaagagatgaagagcctagcattcgagaaggccaagctgaagagagagaaagctgacgccctggaagccaaaaagaaggagaaagaggataaggagaaaaagcgtgaggaacttaagaagatagtcgaggaggagcgactcaagaagaaagaagaaaaggaaaggctgaaggttgagagagagaaagaacgagagaaactgcgggaggagaaacggaagtatgtcgagtatctgaaacagtggtccaagcctcgggaagatatggaatgcgatgatctaaaggaattacccgagcccacccctgtgaaaacgagactgccgccagagatcttcggggatgctttgatggttcttgaatttctgaacgcttttggcgagctctttgatctgcaagatgagtttccggatggcgtaaccttggaggtgctggaggaggctctcgtcggcaatgattcagaaggccctctctgtgaactcctcttttttttcttaactgcaatcttccaggcaatcgccgaggaggaggaggaggtggccaaagagcaacttacagatgcagataccaaggggtgctccctcaaaagcctggatttggattcttgtacactgagcgaaatactaagactgcacattctggctagtggagctgacgtgacatcagcaaacgccaagtaccggtatcagaaacgaggtggcttcgatgctacggatgatgcatgcatggagttgcggctttccaacccttctctcgttaagaagctttcttctacaagcgtgtatgacttgactccaggagagaagatgaaaatcttgcacgccctgtgtggtaagctgcttacactggtctcaacccgcgatttcatagaggattatgtcgacatactgagacaggcaaagcaagagttcagagagttgaaagctgaacaacatagaaaagagagggaggaagctgcagcaagaatccgtaaacgcaaagaggagaaattgaaagaacaggagcagaagatgaaggaaaagcaggaaaagctcaaagaggatgagcaacgaaacagtaccgcagatatctcgatcggtgaagaggagagggaagacttcgataccagcattgaatccaaggacacggaacagaaggagctggaccaggacatggtaaccgaggatgaggacgatccaggatctcataagcggggtcgaagaggcaagcgcggacagaacggcttcaaagagtttacgaggcaagagcagataaactgtgtcactagagagcccctgacggccgacgaggaggaggcactgaaacaggaacatcagcgtaaggaaaaagaattgctggaaaagatccagagcgctattgcttgtactaacatatttccactggggagagaccgcatgtatcggaggtactggatcttcccatccataccgggtctctttatagaggaggactattctggccttactgaggatatgcttctgccgaggcctagctccttccaaaacaatgtacagagccaggatccccaggtgagcacaaagacaggggaaccgttaatgagcgagagtaccagtaacatagaccagggaccaagagatcattccgtgcaattgccaaagcccgtgcataagccaaatcgctggtgcttttactcttcgtgtgagcagctagatcagctgatcgaggcactcaattctagagggcacagagaatccgcccttaaagagacactgctacaagagaagtcgagaatctgcgcacagttagctcggttttccgaagagaagtttcacttctccgacaaaccccagcccgatagcaagccgacatactctcggggacgcagctccaatgcttacgatccaagtcagatgtgcgccgagaaacagttggaactgaggctgcgggatttcctgctggatatcgaagatagaatctatcagggcaccctgggagcgataaaagtcacagatagacacatttggagaagtgctctcgaatccggcagatacgagctgctatctgaggagaataaggagaacggtatcattaagacggtgaatgaagacgttgaagagatggagatagacgagcaaaccaaagtgattgtaaaggatcggctgctaggtattaagaccgagacaccttctacagttagcaccaatgcctcaacccctcagagtgtctcgagcgtagtgcattacctggccatggctctgtttcagatcgagcagggcatcgaaagacgcttcctgaaagctcctttggacgcctctgactccggtagatcttacaaaacagtgttggacaggtggagggaatcgttactgagctcggcaagcttatctcaagtttttctgcatctcagcaccctagacagatctgtcatatggtccaagtccattctgaatgcacgctgtaaaatatgccgcaaaaagggtgacgctgagaacatggtactgtgcgacggatgtgatcgtggccatcacacctactgtgtgcgacccaaactgaaaacagtgccagaaggggattggttctgccctgagtgcagaccaaagcagagatccaggcgcctctcctctaggcagcgaccatctcttgaatcggatgaagacgtagaagacagcatgggtggcgaggacgatgaggtggacggtgatgaggaggaagggcagtctgaggaagaggagtacgaggtcgagcaagatgaggatgactcccaggaggaggaggaagtttcactacccaaacgaggccgaccccaggtccgccttcctgtcaagaccaggggaaaactttccagctccttctcgtcgaggggtcaacagcaagagccgggtagatacccgtcccgtagtcagcagtccacaccaaagacgaccgtgtcttcaaagacggggcgtagccttcgcaaaattaattcagcccctccaacagagacaaaatcactcagaatagcctccaggagtaccagacactcacacgggcctctccaggctgatgtctttgtggaactcttgagtcctcggagaaagcgtagaggcaggaaaagcgcaaacaatactcctgagaactctccaaattttccgaactttcgtgtgatagcgacgaaatccagcgagcaatcccgctccgtaaatatcgcatcaaaattgtcgttgcaggagagcgaaagtaagcgtaggtgtcggaagcgacaaagccccgagccaagccctgttacattgggcagacggtcttccggcaggcagggaggggtccacgagctttcagccttcgaacaactggtggtcgaactggtacggcacgacgatagttggcctttccttaagctggtgtccaaaatccaggtgcccgattattacgacataataaaaaagcccatcgctcttaatatcattagggagaaggtcaataaatgcgaatacaaacttgcctccgaattcatcgatgatattgagcttatgttctccaattgcttcgaatataaccccagaaatacatccgaggctaaggccggtacacgactccaggcattctttcacattcaagctcagaagctgggcttacacgtgactccatcaaatgtagatcaggtttcgacgcccccagcagccaagaagtctcggatctag

SEQ ID NO: 256452 - DNA, 3702 bp, Artificial Sequence
  derived and/or modified sequence
atgaagagtttggctttcgaaaaggccaaacttaaacgggagaaagcagacgccctggaggccaaaaagaaggaaaaagaggataaggagaaaaagagggaggagctcaaaaaaatagtggaagaagaaagactgaaaaagaaagaggaaaaagagcgacttaaggtggagcgcgaaaaggaaagagagaagcttagagaggaaaagcgaaagtatgttgaatacttgaaacagtggtccaagcccagagaagacatggagtgtgacgacctgaaagagcttcccgaaccaacgccggttaaaacacgactccctcctgaaattttcggcgatgccctgatggtactcgaatttctcaacgcctttggcgagctgtttgacttacaagatgagttcccagacggcgtgacattggaggttctagaggaggcactggtgggcaacgacagcgaaggacctctttgcgagctcctcttctttttcctgacagccattttccaggctatagccgaagaagaagaggaagtggctaaagagcagctgactgatgccgataccaaaggctgttcgctcaaatcactcgatttagacagttgcaccctgtccgagattctgagactgcatatccttgcatccggtgccgatgtgaccagcgcaaatgctaaataccgatatcagaaacgaggaggattcgacgctacagacgatgcatgcatggagctccgcttatcaaacccctccctagtgaaaaagctcagtagcacgagcgtttacgatctcacccccggagagaaaatgaagatcttgcacgcattgtgcggcaaactgctgacactggtcagtacacgggacttcatcgaagattatgtcgatattctgcggcaggccaagcaggaattccgcgaactaaaagctgaacagcacaggaaggagcgcgaagaagctgcagcaagaattcgaaagaggaaagaggaaaaactcaaggagcaagaacaaaagatgaaggaaaagcaagagaaattaaaggaggatgagcagcgcaactccactgctgacattagcattggggaggaggaaagggaggacttcgacacttctatagaaagtaaagacacagaacagaaagagctcgatcaggatatggtgacggaggatgaggacgaccctggtagtcataagcgcggaaggaggggtaaaagggggcagaacgggttcaaagagtttacaagacaggaacagataaactgtgttactagggaaccactcactgccgacgaggaagaggcccttaaacaagaacatcagaggaaagagaaagaactgctcgagaagatccagagtgctattgcatgcaccaatatttttccattaggcagagatcggatgtaccgacgctactggatcttcccaagtattccagggctgttcatcgaggaagactatagcggactgacggaagacatgctgcttccgcgtccgagttcctttcagaacaacgtacagagtcaggacccccaggtgagcactaaaacgggcgagccactgatgagcgagagcaccagtaacatcgatcaaggtccgagggatcacagcgtgcagctgcccaagccagttcacaaacccaaccgttggtgtttctattcttcctgtgagcagctggatcagttaattgaagccttgaatagtcggggtcaccgggagtcagccctgaaggaaacactgcttcaagagaaaagccgcatctgtgcccaactcgctcggttctctgaggagaaattccatttttccgacaagccccagcctgactcaaagccaacatattctcgtggccgatcaagtaatgcctacgaccccagtcagatgtgtgccgagaagcagctcgaactccgtctgcgtgactttctgctcgacattgaagatcgcatctaccagggcacattgggtgccatcaaggtaactgatagacacatatggcgcagcgccttggagtcgggcaggtacgaactgctctccgaggagaataaagaaaacggcatcattaaaaccgtgaacgaggatgtagaggagatggaaatcgacgaacagacaaaggtcatcgtgaaagacaggttgctcggtataaagactgaaaccccttcaacggtctctaccaacgctagtacacctcagtctgtgtcatctgtcgtgcactacctcgcaatggcgctatttcagatcgaacaggggatcgaacgcagattccttaaggcaccacttgacgcctctgattcaggcaggagttacaagacggttctggatcggtggagagaaagcttactgtcgtcggctagcctctctcaggtgtttctccacttgtccactttagatagatccgtcatctggagcaagtcaatcttgaacgcgcgttgtaaaatctgtcgcaaaaagggcgacgcggagaatatggtgctttgcgacgggtgtgatcggggacaccatacatattgtgtccggcctaagctaaaaacagtgccagaaggagattggttttgtccagagtgcagaccaaagcagaggtcccggaggttgagttcccgacagaggccgtccctggaaagtgacgaggatgtggaggattccatgggaggtgaggacgatgaggtagatggagacgaggaggaaggacagtcagaggaggaagaatatgaagtagaacaagatgaggacgatagccaagaggaggaagaggtttccctccccaagaggggaaggccacaggttagactcccggtcaaaaccagaggcaaactgtcctccagcttctctagccgcggacagcagcaggaacccggaagatatccttcaagaagccagcaatctacaccaaagaccactgtgtcttccaagaccgggcgttcccttaggaaaatcaattccgctcctccaaccgagactaagagtctccggatcgcttctaggagcacgcgtcacagccacggtccactccaggcagacgtgttcgttgagttactgagccctcggaggaaaagaaggggtcggaagtcagcgaataatacccccgaaaattctcccaactttcctaattttagagtaatagcaacaaaaagcagtgaacagtcccggtccgtaaacattgcctcaaagctctctctgcaggagagtgagagtaaacgccgatgccgaaagagacagtcgcctgaaccatctcctgtaacactcggtcgaaggagctctgggcgtcagggcggtgttcacgagttgtctgcctttgaacagctggtggtggagctagtgaggcacgatgactcatggccttttctcaagctagtttccaaaattcaagtgcccgattactacgacataattaagaaacccatagccctcaacattatcagggagaaggtgaataagtgtgaatacaagctcgcatcggagttcatagacgatatcgaacttatgtttagcaactgcttcgagtacaacccacgtaatacgtcagaggcaaaggctggaacaaggctgcaggcgtttttcatcttcagactgaaatctctggactctactagccacccagtaatgtggaccaaattagcacatcataggttacggaagtcccatgaatctgactttgtgctcctgaaggacatttttgaggagaaacagattgtgcatgagaacggaactctgaatcatgctgtgtag

SEQ ID NO: 256453 - DNA, 5920 bp, Artificial Sequence
  derived and/or modified sequence
cttttcccatcgtgtagtcaagagtctgtgccagacttgaaggctttactttgttagccatgtgtttatgaacccccagcgctttccctagatcttttggctgataatctcaaacatggaggatgcttctgaatcttcacgaggggttgctccattaattaataatgtagttctcccaggctctccgctgtctcttcctgtatcagtgacaggctgtaaaagtcatcgagtagccaataaaaaggtagaagcgaggagtgaaaagctcctcccaacagctcttcctccttcagagccgaaagtagatcagaaacttcccaggagctccgagaggcggggaagtggcggtgggacgcaattccccgcgcggagtcgggcagtggcagcgggagaagcggcagccaggggcgcggcggggccggagagaggcggtcccctgggaggacggggtctcccctcgttgcctttgtagtggagaaggtggacaagtggcagtcggcgtgatcgcagggaagcggggccggcgcgggcggccgagggtccaggcgagcccgcgggcggacgggagatgccgctgctacaccgaaagccgtttgtgagacagaagccgcccgcggacctgcggcccgacgaggaagttttctactgtaaagtcaccaacgagatcttccgccactacgatgacttttttgaacgaaccattctgtgcaacagccttgtgtggagttgtgctgtgacgggtagacctggactgacgtatcaggaagcacttgagtcagaaaaaaaagcaagacagaatcttcagagttttccagaaccactaattattccagttttatacttgaccagccttacccatcgttcgcgcttacatgaaatttgtgatgatatctttgcatatgtcaaggatcgatattttgtcgaagaaactgtggaagtcattaggaacaatggtgcaaggttgcagtgtaggattttggaagtcctccctccatcacatcaaaatggttttgctaatggacatgttaacagtgtggatggagaaactattatcatcagtgatagtgatgattcagaaacacaaagctgttcttttcaaaatgggaagaaaaaagatgcaattgatcccttactattcaagtataaagtgcaacccactaaaaaagaattacatgagtctgctattgttaaagcaacacaaatcagccggagaaaacacctattttctcgtgataaactaaagctttttctgaagcaacactgtgaaccacaagatggagtcattaaaataaaggcatcatctctttcaacgtataaaatagcagaacaagatttttcttatttcttccctgatgatccacccacatttatcttcagtcctgctaacagacgaagagggagacctcccaaacgaatacatattagtcaagaggacaatgttgctaataaacagactcttgcaagttataggagcaaagctactaaagaaagagataaacttttgaaacaagaagaaatgaagtcactggcttttgaaaaggctaaattaaaaagagaaaaagcagatgccctagaagcgaagaaaaaagaaaaagaagataaagagaaaaagagggaagaattgaaaaaaattgttgaagaagagagactaaagaaaaaagaagaaaaagagaggcttaaagtagaaagagaaaaggaaagagagaagttacgtgaagaaaagcgaaagtatgtggaatacttaaaacagtggagtaaacctagagaagatatggaatgtgatgaccttaaggaacttccagaaccaacaccagtgaaaactagactacctcctgaaatctttggtgatgctctgatggttttggagttccttaatgcatttggggaactttttgatcttcaagatgagtttcctgatggagtaaccctagaagtattagaggaagctcttgtaggaaatgacagtgaaggcccactgtgtgaattgctttttttcttcctgactgcaatcttccaggcaatagctgaagaagaagaggaagtagccaaagagcaactaactgatgctgacaccaaaggctgcagtttgaaaagtttggatcttgatagctgcactctttcagaaatcctcagactgcacatcttagcttcaggtgctgatgtaacatcagcaaatgcaaagtatagatatcaaaaacgaggaggatttgatgctacagatgatgcttgtatggagcttcgtttgagcaatcccagtctagtgaagaaactgtcaagcacctcagtgtatgatttgacaccaggagaaaaaatgaagatactccatgctctctgtggaaagctactgaccctagtttcaactagggattttattgaagattatgttgatatattacgacaggcaaagcaggagttccgggaattaaaagcagaacaacatcgaaaagagagggaagaagcagctgccagaattcgtaaaaggaaggaagaaaaacttaaggagcaagaacaaaaaatgaaagagaaacaagaaaaactgaaagaagatgagcaaagaaattcaacggcagatatatctattggggaggaagaaagggaagattttgatactagcattgagagcaaagacacagagcaaaaggaattagatcaagatatggtcactgaagatgaagatgacccaggatcacataaaagaggcagaagggggaaaagaggacaaaatggatttaaagaatttacaaggcaagaacagatcaactgtgtaacaagagagcctcttactgctgatgaggaagaagcattaaaacaggaacaccaacgaaaagagaaagagctcttagaaaaaatccaaagtgccatagcctgtaccaatatctttcccttgggtcgcgaccgcatgtatagacgatactggattttcccttctattcctggactctttattgaagaggattattctggtcttactgaagacatgctgttgcctagaccttcatcatttcagaataatgtacagtctcaagatcctcaggtatccactaaaactggagagcctttgatgtctgaatctacctccaacattgaccaaggtccacgtgaccattctgtgcagctgccaaaaccagtgcataagccaaatcggtggtgcttttacagttcttgtgaacagctagaccagcttattgaagctcttaattctagaggacatagagaaagtgccttaaaagaaactttgttacaagagaaaagcagaatatgtgcacagctagcccgtttttctgaagagaaatttcatttttcagacaaacctcagcctgatagcaaaccaacatatagtcggggaagatcttccaatgcatatgatccatctcagatgtgtgcagaaaagcaacttgaactaaggctgagagattttcttttagatattgaagatagaatctaccaaggaacattaggagccatcaaggttacagatcgacatatctggagatcagcattagaaagtggacggtatgagctgttaagtgaggaaaacaaggaaaatgggataattaaaactgtgaatgaagacgtagaagagatggaaattgatgaacaaacaaaggtcatagtaaaagacagacttttggggataaaaacagaaactccaagtactgtatcaacaaatgcaagtacaccacaatcagtgagcagtgtggttcattatctggcaatggcactctttcaaatagagcagggcattgagcggcgttttctgaaagctccacttgatgccagtgacagtgggcgttcttataaaacagttctggaccgttggagagagtctctcctttcttctgctagtctatcccaagtttttcttcacctatccaccttggatcgtagcgtgatatggtctaaatctatactgaatgcgcgttgcaagatatgtcgaaagaaaggcgatgctgaaaacatggttctttgtgatggctgtgataggggtcatcatacctactgtgttcgaccaaagctcaagactgtgcctgaaggagactggttttgtccagaatgtcgaccaaagcaacgttctagaagactctcctctagacagagaccatccttggaaagtgatgaagatgtggaagacagtatgggaggtgaggatgatgaagttgatggcgatgaagaagaaggtcaaagtgaggaggaagagtatgaggtagaacaagatgaagatgactctcaagaagaggaagaagtcagcctacccaaacgaggaagaccacaagttagattgccagttaaaacaagagggaaacttagctcttctttctcaagtcgtggccaacaacaagaacctggaagatacccttcaaggagtcagcagagcacacccaaaacaactgtttcttctaaaactggtagaagcctaagaaagataaactctgctcctcctacagaaacaaaatctttaagaattgccagtcgttctactcgccacagtcatggcccactgcaagcagatgtatttgtggaattgcttagtcctcgtagaaaacgcagaggcaggaaaagtgctaataatacaccagaaaatagtcccaacttccctaacttcagagtcattgccacaaagtcaagtgaacagtcaagatctgtaaatattgcttcaaaactttctctccaagagagtgaatccaaaagaagatgcagaaaaagacaatctccagagccatcgcctgtgacactgggtcgaaggagttctggccgacagggaggagttcatgaattgtctgcttttgaacaacttgttgtagaattggtacgacatgatgacagctggccttttttgaaacttgtttctaaaatccaggtcccagactactatgacatcatcaaaaagcccattgccttaaatataattcgtgaaaaagtgaataagtgtgaatataaattagcatctgagtttattgatgacattgagttaatgttttcgaactgctttgaatacaaccctcgtaacacaagtgaagcaaaagctggaactaggcttcaagcattttttcatattcaggctcaaaagcttggactccacgtcacacccagtaatgtggaccaagttagcacaccaccggctgcgaaaaagtcacgaatctgactttgtccttctaaaggatatatttgaagaaaaacaaattgttcatgaaaatggaacattaaatcatgctgtataaagcaataacaattgattgaccacatgaaagtgtggcctgcactatattctcaattttaatattaagcactcaggagaatgtaggaaagatatcctttgctacagttttgttcagtatctaataagtttgatagatgtattggatacagtactggtttacagaggtttttgtacatttttgagatcattcatgtgtccagagatcttggaaaatattttttcacccacgatttattttgttattgatgatttttttttaaagtggtggtattaagggagagttatctacatggatgagtcttccgctatagcacagtttagaaaaggtgtttatgtcttaattaattgtttgagtacattctttcaacactacacatgaatgaatccaatcttataaccttgaagtgctgtaccagtgctggctgcaggtattaagtccaagtttattaactagatatttatttagtattgagagtaatttgtgaatttgttttgtatttataaaatttatacctgaaaaatgttccttaatgttttaaaccttttactgtgtttttattcctctaacttccttaatgatcaatcaaaaaaagtaacaccctccctttttcctgacagttctttcagctttacagaactgtattataagtttctatgtataactttttaactgtacaaataaaataacattttttcaaataa

SEQ ID NO: 256454 - DNA, 5218 bp, Artificial Sequence
  derived and/or modified sequence
cttttcccatcgtgtagtcaagagtctgtgccagacttgaaggctttactttgttagccatgtgtttatgaacccccagcgctttccctagatcttttggctgataatctcaaacatggaggatgcttctgaatcttcacgaggggttgctccattaattaataatgtagttctcccaggctctccgctgtctcttcctgtatcagtgacaggctgtaaaagtcatcgagtagccaataaaaaggtagaagcgaggagtgaaaagctcctcccaacagctcttcctccttcagagccgaaagtagatcagaaacttcccaggagctccgagaggcggggaagtggcggtgggacgcaattccccgcgcggagtcgggcagtggcagcgggagaagcggcagccaggggcgcggcggggccggagagaggcggtcccctgggaggacggggtctcccctcgttgcctttgtagtggagaaggtggacaagtggcagtcggcgtgatcgcagggaagcggggccggcgcgggcggccgagggtccaggcgagcccgcgggcggacgggagatgccgctgctacaccgaaagccgtttgtgagacagaagccgcccgcggacctgcggcccgacgaggaagttttctactgtaaagtcaccaacgagatcttccgccactacgatgacttttttgaacgaaccattctgtgcaacagccttgtgtggagttgtgctgtgacgggtagacctggactgacgtatcaggaagcacttgagtcagaaaaaaaagcaagacagaatcttcagagttttccagaaccactaattattccagttttatacttgaccagccttacccatcgttcgcgcttacatgaaatttgtgatgatatctttgcatatgtcaaggatcgatattttgtcgaagaaactgtggaagtcattaggaacaatggtgcaaggttgcagtgtaggattttggaagtcctccctccatcacatcaaaatggttttgctaatggacatgttaacagtgtggatggagaaactattatcatcagtgatagtgatgattcagaaacacaaagctgttcttttcaaaatgggaagaaaaaagatgcaattgatcccttactattcaagtataaagtgcaacccactaaaaaagaattacatgagtctgctattgttaaagcaacacaaatcagccggagaaaacacctattttctcgtgataaactaaagctttttctgaagcaacactgtgaaccacaagatggagtcattaaaataaaggcatcatctctttcaacgtataaaatagcagaacaagatttttcttatttcttccctgatgatccacccacatttatcttcagtcctgctaacagacgaagagggagacctcccaaacgaatacatattagtcaagaggacaatgttgctaataaacagactcttgcaagttataggagcaaagctactaaagaaagagataaacttttgaaacaagaagaaatgaagtcactggcttttgaaaaggctaaattaaaaagagaaaaagcagatgccctagaagcgaagaaaaaagaaaaagaagataaagagaaaaagagggaagaattgaaaaaaattgttgaagaagagagactaaagaaaaaagaagaaaaagagaggcttaaagtagaaagagaaaaggaaagagagaagttacgtgaagaaaagcgaaagtatgtggaatacttaaaacagtggagtaaacctagagaagatatggaatgtgatgaccttaaggaacttccagaaccaacaccagtgaaaactagactacctcctgaaatctttggtgatgctctgatggttttggagttccttaatgcatttggggaactttttgatcttcaagatgagtttcctgatggagtaaccctagaagtattagaggaagctcttgtaggaaatgacagtgaaggcccactgtgtgaattgctttttttcttcctgactgcaatcttccaggcaatagctgaagaagaagaggaagtagccaaagagcaactaactgatgctgacaccaaaggctgcagtttgaaaagtttggatcttgatagctgcactctttcagaaatcctcagactgcacatcttagcttcaggtgctgatgtaacatcagcaaatgcaaagtatagatatcaaaaacgaggaggatttgatgctacagatgatgcttgtatggagcttcgtttgagcaatcccagtctagtgaagaaactgtcaagcacctcagtgtatgatttgacaccaggagaaaaaatgaagatactccatgctctctgtggaaagctactgaccctagtttcaactagggattttattgaagattatgttgatatattacgacaggcaaagcaggagttccgggaattaaaagcagaacaacatcgaaaagagagggaagaagcagctgccagaattcgtaaaaggaaggaagaaaaacttaaggagcaagaacaaaaaatgaaagagaaacaagaaaaactgaaagaagatgagcaaagaaattcaacggcagatatatctattggggaggaagaaagggaagattttgatactagcattgagagcaaagacacagagcaaaaggaattagatcaagatatggtcactgaagatgaagatgacccaggatcacataaaagaggcagaagggggaaaagaggacaaaatggatttaaagaatttacaaggcaagaacagatcaactgtgtaacaagagagcctcttactgctgatgaggaagaagcattaaaacaggaacaccaacgaaaagagaaagagctcttagaaaaaatccaaagtgccatagcctgtaccaatatctttcccttgggtcgcgaccgcatgtatagacgatactggattttcccttctattcctggactctttattgaagaggattattctggtcttactgaagacatgctgttgcctagaccttcatcatttcagaataatgtacagtctcaagatcctcaggtatccactaaaactggagagcctttgatgtctgaatctacctccaacattgaccaaggtccacgtgaccattctgtgcagctgccaaaaccagtgcataagccaaatcggtggtgcttttacagttcttgtgaacagctagaccagcttattgaagctcttaattctagaggacatagagaaagtgccttaaaagaaactttgttacaagagaaaagcagaatatgtgcacagctagcccgtttttctgaagagaaatttcatttttcagacaaacctcagcctgatagcaaaccaacatatagtcggggaagatcttccaatgcatatgatccatctcagatgtgtgcagaaaagcaacttgaactaaggctgagagattttcttttagatattgaagatagaatctaccaaggaacattaggagccatcaaggttacagatcgacatatctggagatcagcattagaaagtggacggtatgagctgttaagtgaggaaaacaaggaaaatgggataattaaaactgtgaatgaagacgtagaagagatggaaattgatgaacaaacaaaggtcatagtaaaagacagacttttggggataaaaacagaaactccaagtactgtatcaacaaatgcaagtacaccacaatcagtgagcagtgtggttcattatctggcaatggcactctttcaaatagagcagggcattgagcggcgttttctgaaagctccacttgatgccagtgacagtgggcgttcttataaaacagttctggaccgttggagagagtctctcctttcttctgctagtctatcccaagtttttcttcacctatccaccttggatcgtagcgtgatatggtctaaatctatactgaatgcgcgttgcaagatatgtcgaaagaaaggcgatgctgaaaacatggttctttgtgatggctgtgataggggtcatcatacctactgtgttcgaccaaagctcaagactgtgcctgaaggagactggttttgtccagaatgtcgaccaaagcaacgttctagaagactctcctctagacagagaccatccttggaaagtgatgaagatgtggaagacagtatgggaggtgaggatgatgaagttgatggcgatgaagaagaaggtcaaagtgaggaggaagagtatgaggtagaacaagatgaagatgactctcaagaagaggaagaagtcagcctacccaaacgaggaagaccacaagttagattgccagttaaaacaagagggaaacttagctcttctttctcaagtcgtggccaacaacaagaacctggaagatacccttcaaggagtcagcagagcacacccaaaacaactgtttcttctaaaactggtagaagcctaagaaagataaactctgctcctcctacagaaacaaaatctttaagaattgccagtcgttctactcgccacagtcatggcccactgcaagcagatgtatttgtggaattgcttagtcctcgtagaaaacgcagaggcaggaaaagtgctaataatacaccagaaaatagtcccaacttccctaacttcagagtcattgccacaaagtcaagtgaacagtcaagatctgtaaatattgcttcaaaactttctctccaagagagtgaatccaaaagaagatgcagaaaaagacaatctccagagccatcgcctgtgacactgggtcgaaggagttctggccgacagggaggagttcatgaattgtctgcttttgaacaacttgttgtagaattggtacgacatgatgacagctggccttttttgaaacttgtttctaaaatccaggtcccagactactatgacatcatcaaaaagcccattgccttaaatataattcgtgaaaaagtgaataagtgtgaatataaattagcatctgagtttattgatgacattgagttaatgttttcgaactgctttgaatacaaccctcgtaacacaagtgaagcaaaagctggaactaggcttcaagcattttttatattcaggctcaaaagcttggactccacgtcacacccagtaatgtggaccaagttagcacaccaccggctgcgaaaaagtcacgaatctgactttgtccttctaaaggatatatttgaagaaaaacaaattgttcatgaaaatggaacattaaatcatgctgtataa

SEQ ID NO: 256455 - DNA, 4575 bp, Artificial Sequence
  derived and/or modified sequence
atgcccctgctgcacagaaagcccttcgtgagacagaagccccccgccgacctgagacccgacgaggaggtgttctactgcaaggtgaccaacgagatcttcagacactacgacgacttcttcgagagaaccatcctgtgcaacagcctggtgtggagctgcgccgtgaccggcagacccggcctgacctaccaggaggccctggagagcgagaagaaggccagacagaacctgcagagcttccccgagcccctgatcatccccgtgctgtacctgaccagcctgacccacagaagcagactgcacgagatctgcgacgacatcttcgcctacgtgaaggacagatacttcgtggaggagaccgtggaggtgatcagaaacaacggcgccagactgcagtgcagaatcctggaggtgctgccccccagccaccagaacggcttcgccaacggccacgtgaacagcgtggacggcgagaccatcatcatcagcgacagcgacgacagcgagacccagagctgcagcttccagaacggcaagaagaaggacgccatcgaccccctgctgttcaagtacaaggtgcagcccaccaagaaggagctgcacgagagcgccatcgtgaaggccacccagatcagcagaagaaagcacctgttcagcagagacaagctgaagctgttcctgaagcagcactgcgagccccaggacggcgtgatcaagatcaaggccagcagcctgagcacctacaagatcgccgagcaggacttcagctacttcttccccgacgacccccccaccttcatcttcagccccgccaacagaagaagaggcagaccccccaagagaatccacatcagccaggaggacaacgtggccaacaagcagaccctggccagctacagaagcaaggccaccaaggagagagacaagctgctgaagcaggaggagatgaagagcctggccttcgagaaggccaagctgaagagagagaaggccgacgccctggaggccaagaagaaggagaaggaggacaaggagaagaagagagaggagctgaagaagatcgtggaggaggagagactgaagaagaaggaggagaaggagagactgaaggtggagagagagaaggagagagagaagctgagagaggagaagagaaagtacgtggagtacctgaagcagtggagcaagcccagagaggacatggagtgcgacgacctgaaggagctgcccgagcccacccccgtgaagaccagactgccccccgagatcttcggcgacgccctgatggtgctggagttcctgaacgccttcggcgagctgttcgacctgcaggacgagttccccgacggcgtgaccctggaggtgctggaggaggccctggtgggcaacgacagcgagggccccctgtgcgagctgctgttcttcttcctgaccgccatcttccaggccatcgccgaggaggaggaggaggtggccaaggagcagctgaccgacgccgacaccaagggctgcagcctgaagagcctggacctggacagctgcaccctgagcgagatcctgagactgcacatcctggccagcggcgccgacgtgaccagcgccaacgccaagtacagataccagaagagaggcggcttcgacgccaccgacgacgcctgcatggagctgagactgagcaaccccagcctggtgaagaagctgagcagcaccagcgtgtacgacctgacccccggcgagaagatgaagatcctgcacgccctgtgcggcaagctgctgaccctggtgagcaccagagacttcatcgaggactacgtggacatcctgagacaggccaagcaggagttcagagagctgaaggccgagcagcacagaaaggagagagaggaggccgccgccagaatcagaaagagaaaggaggagaagctgaaggagcaggagcagaagatgaaggagaagcaggagaagctgaaggaggacgagcagagaaacagcaccgccgacatcagcatcggcgaggaggagagagaggacttcgacaccagcatcgagagcaaggacaccgagcagaaggagctggaccaggacatggtgaccgaggacgaggacgaccccggcagccacaagagaggcagaagaggcaagagaggccagaacggcttcaaggagttcaccagacaggagcagatcaactgcgtgaccagagagcccctgaccgccgacgaggaggaggccctgaagcaggagcaccagagaaaggagaaggagctgctggagaagatccagagcgccatcgcctgcaccaacatcttccccctgggcagagacagaatgtacagaagatactggatcttccccagcatccccggcctgttcatcgaggaggactacagcggcctgaccgaggacatgctgctgcccagacccagcagcttccagaacaacgtgcagagccaggacccccaggtgagcaccaagaccggcgagcccctgatgagcgagagcaccagcaacatcgaccagggccccagagaccacagcgtgcagctgcccaagcccgtgcacaagcccaacagatggtgcttctacagcagctgcgagcagctggaccagctgatcgaggccctgaacagcagaggccacagagagagcgccctgaaggagaccctgctgcaggagaagagcagaatctgcgcccagctggccagattcagcgaggagaagttccacttcagcgacaagccccagcccgacagcaagcccacctacagcagaggcagaagcagcaacgcctacgaccccagccagatgtgcgccgagaagcagctggagctgagactgagagacttcctgctggacatcgaggacagaatctaccagggcaccctgggcgccatcaaggtgaccgacagacacatctggagaagcgccctggagagcggcagatacgagctgctgagcgaggagaacaaggagaacggcatcatcaagaccgtgaacgaggacgtggaggagatggagatcgacgagcagaccaaggtgatcgtgaaggacagactgctgggcatcaagaccgagacccccagcaccgtgagcaccaacgccagcaccccccagagcgtgagcagcgtggtgcactacctggccatggccctgttccagatcgagcagggcatcgagagaagattcctgaaggcccccctggacgccagcgacagcggcagaagctacaagaccgtgctggacagatggagagagagcctgctgagcagcgccagcctgagccaggtgttcctgcacctgagcaccctggacagaagcgtgatctggagcaagagcatcctgaacgccagatgcaagatctgcagaaagaagggcgacgccgagaacatggtgctgtgcgacggctgcgacagaggccaccacacctactgcgtgagacccaagctgaagaccgtgcccgagggcgactggttctgccccgagtgcagacccaagcagagaagcagaagactgagcagcagacagagacccagcctggagagcgacgaggacgtggaggacagcatgggcggcgaggacgacgaggtggacggcgacgaggaggagggccagagcgaggaggaggagtacgaggtggagcaggacgaggacgacagccaggaggaggaggaggtgagcctgcccaagagaggcagaccccaggtgagactgcccgtgaagaccagaggcaagctgagcagcagcttcagcagcagaggccagcagcaggagcccggcagataccccagcagaagccagcagagcacccccaagaccaccgtgagcagcaagaccggcagaagcctgagaaagatcaacagcgccccccccaccgagaccaagagcctgagaatcgccagcagaagcaccagacacagccacggccccctgcaggccgacgtgttcgtggagctgctgagccccagaagaaagagaagaggcagaaagagcgccaacaacacccccgagaacagccccaacttccccaacttcagagtgatcgccaccaagagcagcgagcagagcagaagcgtgaacatcgccagcaagctgagcctgcaggagagcgagagcaagagaagatgcagaaagagacagagccccgagcccagccccgtgaccctgggcagaagaagcagcggcagacagggcggcgtgcacgagctgagcgccttcgagcagctggtggtggagctggtgagacacgacgacagctggcccttcctgaagctggtgagcaagatccaggtgcccgactactacgacatcatcaagaagcccatcgccctgaacatcatcagagagaaggtgaacaagtgcgagtacaagctggccagcgagttcatcgacgacatcgagctgatgttcagcaactgcttcgagtacaaccccagaaacaccagcgaggccaaggccggcaccagactgcaggccttcttccacatccaggcccagaagctgggcctgcacgtgacccccagcaacgtggaccaggtgagcaccccccccgccgccaagaagagcagaatctag

SEQ ID NO: 256456 - DNA, 3702 bp, Artificial Sequence
  derived and/or modified sequence
atgaagagcctggccttcgagaaggccaagctgaagagagagaaggccgacgccctggaggccaagaagaaggagaaggaggacaaggagaagaagagagaggagctgaagaagatcgtggaggaggagagactgaagaagaaggaggagaaggagagactgaaggtggagagagagaaggagagagagaagctgagagaggagaagagaaagtacgtggagtacctgaagcagtggagcaagcccagagaggacatggagtgcgacgacctgaaggagctgcccgagcccacccccgtgaagaccagactgccccccgagatcttcggcgacgccctgatggtgctggagttcctgaacgccttcggcgagctgttcgacctgcaggacgagttccccgacggcgtgaccctggaggtgctggaggaggccctggtgggcaacgacagcgagggccccctgtgcgagctgctgttcttcttcctgaccgccatcttccaggccatcgccgaggaggaggaggaggtggccaaggagcagctgaccgacgccgacaccaagggctgcagcctgaagagcctggacctggacagctgcaccctgagcgagatcctgagactgcacatcctggccagcggcgccgacgtgaccagcgccaacgccaagtacagataccagaagagaggcggcttcgacgccaccgacgacgcctgcatggagctgagactgagcaaccccagcctggtgaagaagctgagcagcaccagcgtgtacgacctgacccccggcgagaagatgaagatcctgcacgccctgtgcggcaagctgctgaccctggtgagcaccagagacttcatcgaggactacgtggacatcctgagacaggccaagcaggagttcagagagctgaaggccgagcagcacagaaaggagagagaggaggccgccgccagaatcagaaagagaaaggaggagaagctgaaggagcaggagcagaagatgaaggagaagcaggagaagctgaaggaggacgagcagagaaacagcaccgccgacatcagcatcggcgaggaggagagagaggacttcgacaccagcatcgagagcaaggacaccgagcagaaggagctggaccaggacatggtgaccgaggacgaggacgaccccggcagccacaagagaggcagaagaggcaagagaggccagaacggcttcaaggagttcaccagacaggagcagatcaactgcgtgaccagagagcccctgaccgccgacgaggaggaggccctgaagcaggagcaccagagaaaggagaaggagctgctggagaagatccagagcgccatcgcctgcaccaacatcttccccctgggcagagacagaatgtacagaagatactggatcttccccagcatccccggcctgttcatcgaggaggactacagcggcctgaccgaggacatgctgctgcccagacccagcagcttccagaacaacgtgcagagccaggacccccaggtgagcaccaagaccggcgagcccctgatgagcgagagcaccagcaacatcgaccagggccccagagaccacagcgtgcagctgcccaagcccgtgcacaagcccaacagatggtgcttctacagcagctgcgagcagctggaccagctgatcgaggccctgaacagcagaggccacagagagagcgccctgaaggagaccctgctgcaggagaagagcagaatctgcgcccagctggccagattcagcgaggagaagttccacttcagcgacaagccccagcccgacagcaagcccacctacagcagaggcagaagcagcaacgcctacgaccccagccagatgtgcgccgagaagcagctggagctgagactgagagacttcctgctggacatcgaggacagaatctaccagggcaccctgggcgccatcaaggtgaccgacagacacatctggagaagcgccctggagagcggcagatacgagctgctgagcgaggagaacaaggagaacggcatcatcaagaccgtgaacgaggacgtggaggagatggagatcgacgagcagaccaaggtgatcgtgaaggacagactgctgggcatcaagaccgagacccccagcaccgtgagcaccaacgccagcaccccccagagcgtgagcagcgtggtgcactacctggccatggccctgttccagatcgagcagggcatcgagagaagattcctgaaggcccccctggacgccagcgacagcggcagaagctacaagaccgtgctggacagatggagagagagcctgctgagcagcgccagcctgagccaggtgttcctgcacctgagcaccctggacagaagcgtgatctggagcaagagcatcctgaacgccagatgcaagatctgcagaaagaagggcgacgccgagaacatggtgctgtgcgacggctgcgacagaggccaccacacctactgcgtgagacccaagctgaagaccgtgcccgagggcgactggttctgccccgagtgcagacccaagcagagaagcagaagactgagcagcagacagagacccagcctggagagcgacgaggacgtggaggacagcatgggcggcgaggacgacgaggtggacggcgacgaggaggagggccagagcgaggaggaggagtacgaggtggagcaggacgaggacgacagccaggaggaggaggaggtgagcctgcccaagagaggcagaccccaggtgagactgcccgtgaagaccagaggcaagctgagcagcagcttcagcagcagaggccagcagcaggagcccggcagataccccagcagaagccagcagagcacccccaagaccaccgtgagcagcaagaccggcagaagcctgagaaagatcaacagcgccccccccaccgagaccaagagcctgagaatcgccagcagaagcaccagacacagccacggccccctgcaggccgacgtgttcgtggagctgctgagccccagaagaaagagaagaggcagaaagagcgccaacaacacccccgagaacagccccaacttccccaacttcagagtgatcgccaccaagagcagcgagcagagcagaagcgtgaacatcgccagcaagctgagcctgcaggagagcgagagcaagagaagatgcagaaagagacagagccccgagcccagccccgtgaccctgggcagaagaagcagcggcagacagggcggcgtgcacgagctgagcgccttcgagcagctggtggtggagctggtgagacacgacgacagctggcccttcctgaagctggtgagcaagatccaggtgcccgactactacgacatcatcaagaagcccatcgccctgaacatcatcagagagaaggtgaacaagtgcgagtacaagctggccagcgagttcatcgacgacatcgagctgatgttcagcaactgcttcgagtacaaccccagaaacaccagcgaggccaaggccggcaccagactgcaggccttcttcatcttcagactgaagagcctggacagcaccagccaccccgtgatgtggaccaagctggcccaccacagactgagaaagagccacgagagcgacttcgtgctgctgaaggacatcttcgaggagaagcagatcgtgcacgagaacggcaccctgaaccacgccgtgtag

SEQ ID NO: 256457 - protein, 261 aa, Artificial Sequence
  derived and/or modified sequence
MFEARLVQGSILKKVLEALKDLINEACWDISSSGVNLQSMDSSHVSLVQLTLRSEGFDTYRCDRNLAMGVNLTSMSKILKCAGNEDIITLRAEDNADTLALVFEAPNQEKVSDYEMKLMDLDVEQLGIPEQEYSCVVKMPSGEFARICRDLSHIGDAVVISCAKDGVKFSASGELGNGNIKLSQTSNVDKEEEAVTIEMNEPVQLTFALRYLNFFTKATPLSSTVTLSMSADVPLVVEYKIADMGHLKYYLAPKIEDEEGS

SEQ ID NO: 256458 - DNA, 786 bp, Artificial Sequence
  derived and/or modified sequence
atgttcgaggccagactggtgcagggcagcatcctgaagaaggtgctggaggccctgaaggacctgatcaacgaggcctgctgggacatcagcagcagcggcgtgaacctgcagagcatggacagcagccacgtgagcctggtgcagctgaccctgagaagcgagggcttcgacacctacagatgcgacagaaacctggccatgggcgtgaacctgaccagcatgagcaagatcctgaagtgcgccggcaacgaggacatcatcaccctgagagccgaggacaacgccgacaccctggccctggtgttcgaggcccccaaccaggagaaggtgagcgactacgagatgaagctgatggacctggacgtggagcagctgggcatccccgagcaggagtacagctgcgtggtgaagatgcccagcggcgagttcgccagaatctgcagagacctgagccacatcggcgacgccgtggtgatcagctgcgccaaggacggcgtgaagttcagcgccagcggcgagctgggcaacggcaacatcaagctgagccagaccagcaacgtggacaaggaggaggaggccgtgaccatcgagatgaacgagcccgtgcagctgaccttcgccctgagatacctgaacttcttcaccaaggccacccccctgagcagcaccgtgaccctgagcatgagcgccgacgtgcccctggtggtggagtacaagatcgccgacatgggccacctgaagtactacctggcccccaagatcgaggacgaggagggcagctag

SEQ ID NO: 256459 - DNA, 786 bp, Artificial Sequence
  derived and/or modified sequence
atgttcgaggcccgcctcgtccagggctctatcctcaagaaggttctggaagcccttaaagatttaattaatgaggcttgttgggacatctcatcaagtggggtgaacctgcagtcgatggactcttcacacgtttcactggtccagctgacattgagatctgaaggcttcgacacctatagatgcgatcgaaacctcgctatgggagttaacctgacttcgatgagcaagatattgaaatgtgccggtaacgaggatattatcactttacgggccgaagacaatgctgatacactagccctcgtatttgaagctcctaaccaggagaaagtgtccgactacgaaatgaagcttatggacctggacgtcgagcagttagggatcccagaacaagaatactcatgcgtcgtgaaaatgccttcaggagaattcgccaggatatgcagggatttgtcgcacattggtgacgccgtggtcatctcgtgtgccaaggatggtgtaaagtttagcgccagtggggagttgggcaacgggaatatcaagctctcccagacctccaacgttgataaagaagaagaagcagtcaccatcgaaatgaacgaaccagtgcagttgacttttgcgttgagatacctcaatttcttcaccaaggcaactccgctctcgagtacagtgaccctgtcaatgtctgctgacgtgccattggttgtagaatacaaaatagccgatatgggccatctgaagtactatcttgctccgaagatcgaggatgaggagggcagctag

SEQ ID NO: 256460 - DNA, 786 bp, Artificial Sequence
  derived and/or modified sequence
atgtttgaggcacgcctcgtccaagggtccatcctgaaaaaagtgctcgaggcgttaaaggacctgattaacgaggcatgctgggacatttcttcttcaggtgtgaacctgcagtcaatggatagctcccacgtgtctctggtgcagctcactcttcgctccgaaggattcgacacgtataggtgtgaccgaaacttggccatgggcgtgaacctgactagcatgagcaaaattctgaagtgtgctggcaatgaggatatcatcactctgcgcgccgaggataacgctgatacacttgcgctggtgtttgaagctccaaatcaggagaaagtatcggattatgagatgaaactgatggatctggatgtagagcagctgggaatcccagagcaggagtacagctgtgtagtgaagatgccttctggcgagttcgcgagaatttgcagggatctcagccacattggagacgcagttgtgatttcctgtgctaaagatggagtcaagttttccgctagcggagaattgggcaatggtaacatcaagctgtctcagacatcaaatgtggataaggaggaagaagccgttaccattgaaatgaacgaacctgttcaacttactttcgctctccgatacctcaacttcttcaccaaagcgaccccactgtcttccacagtgaccctgtcaatgagcgccgacgtaccattggttgtcgaatacaagatcgcggacatgggccacctgaaatattacctcgctcctaagattgaagatgaagagggcagttag

SEQ ID NO: 256461 - DNA, 786 bp, Artificial Sequence
  derived and/or modified sequence
atgtttgaggcccggctggtgcagggcagcatcctgaagaaggtgctggaggccctgaaggacctgatcaatgaggcctgctgggacatcagcagcagtggagtgaacctgcagagcatggacagcagccacgtgtccctggtgcagctgaccctgcggtctgagggctttgacacctaccgctgtgacaggaacctggccatgggcgtgaacctgacctccatgagcaagatcctgaagtgtgctggaaatgaagacatcatcaccctgcgggcagaagataatgctgacaccctggccctggtgtttgaggcccccaaccaggagaaggtgtctgactatgagatgaagctgatggacctggatgtggagcagctgggcatccctgagcaggagtacagctgtgtggtgaagatgcccagcggggagtttgcccgcatctgccgggacctgagccacatcggagatgctgtggtgatcagctgtgccaaggatggagtgaagttcagcgccagcggggagctgggcaatggaaacatcaagctgagccagaccagcaatgtggacaaggaggaggaggccgtgaccatcgagatgaatgaacctgtgcagctgacctttgccctgcgctacctgaacttcttcaccaaggccacccccctgagcagcacagtgaccctgtccatgtctgcagatgtgcccctggtggtggagtacaagattgctgacatgggccacctgaagtactacctggcccccaagattgaagatgaggagggcagctag

SEQ ID NO: 256462 - DNA, 786 bp, Artificial Sequence
  derived and/or modified sequence
atgttcgaggcccggctggtgcagggcagcatcctgaagaaggtgctcgaggctctcaaagatttgattaatgaagcgtgctgggacatcagctcttccggcgtgaatctacaatcaatggactcatcacatgtgtccctggtacaattgacactgcggtctgaggggtttgacacctacaggtgtgaccgcaatctcgccatgggggtaaatctgacatcaatgagtaaaatcctcaagtgcgccggcaacgaagatattattacactgcgtgctgaggataatgctgacactctcgctctggtgttcgaggctccgaatcaggaaaaagtctctgactacgagatgaaacttatggaccttgacgtggagcagctgggtatacctgaacaggaatactcctgcgtggtgaagatgcccagtggagaatttgcccgtatctgcagagatctgtcccatattggtgatgctgttgtgattagctgcgctaaggacggcgttaagtttagcgcatctggcgaattagggaatggcaacattaagctgagtcaaaccagtaatgtcgacaaagaagaagaggcagttacaatagagatgaacgagccggtgcaattgacattcgcattaagatacctgaatttttttacaaaagctacgccattatcatctaccgttaccctctccatgagcgccgacgttcccttagtcgtcgagtataagattgccgacatgggacatctgaagtattatctcgccccgaagatcgaggatgaagaaggatcctag

SEQ ID NO: 256463 - DNA, 786 bp, Artificial Sequence
  derived and/or modified sequence
atgttcgaggcccggctggtgcagggcagcatcctgaagaaggtgctggaagctctaaaggatttgataaacgaggcctgctgggacatcagttcaagcggcgtgaacttgcagagcatggacagttcccacgtatctctggtgcagcttacactgagaagtgagggcttcgacacctaccgttgtgataggaacctggcgatgggcgtcaatttgactagtatgtcaaagatactgaaatgtgccggaaacgaagacataattaccctgcgggctgaagataacgccgacaccctggctctagtgtttgaagctccgaaccaggagaaagtgtctgattacgaaatgaaactgatggacctggatgtggagcaactcggcattcccgagcaggaatattcctgcgtcgtcaaaatgccgagcggtgaattcgctaggatctgcagggacttatcccacataggcgacgccgtcgtgatttcatgcgcaaaggatggggtcaaattctcggcttcgggcgagctggggaacggaaatataaaactgagccagacctccaacgtagacaaggaagaggaggccgtgacgattgagatgaatgagcccgttcaactgacatttgccttgcgctacttaaacttctttactaaggcgacaccgttgagctctaccgttacactgtccatgagcgctgacgtccctctagtggtcgagtataagatcgctgatatgggtcatttgaagtattacttagctccaaagattgaagatgaagaaggatcatag

SEQ ID NO: 256464 - DNA, 786 bp, Artificial Sequence
  derived and/or modified sequence
atgtttgaggccaggctggtgcaaggcagtattttgaagaaggtgctggaagctctcaaggatctgatcaatgaggcgtgctgggacattagctcttctggcgtgaaccttcagagcatggactcctctcatgttagcctcgttcagctaactttacggtccgagggatttgatacttaccgatgtgataggaacctggccatgggcgtaaatttgacctcaatgtcaaagatactaaagtgtgcagggaatgaagacatcatcactcttcgggctgaagataatgctgacacacttgccctggttttcgaggcacccaaccaggagaaggtcagtgactatgagatgaagttgatggatctggacgtggagcagctgggtatcccagagcaggaatatagttgtgtcgtgaaaatgcctagtggagagttcgccagaatctgcagggacctctcccacatcggggacgctgtggtaatttcatgtgcaaaggatggggtgaagttctcagcttctggcgaactagggaacggaaatattaagctttctcagactagtaacgttgataaggaggaagaggccgtcaccatcgaaatgaacgagccagttcagctgacatttgcactgcgctacctgaactttttcactaaggccacccctctctctagtaccgtcacactctctatgtctgctgacgtgcccctcgtggtggagtacaaaattgcagatatgggtcacctgaaatactatcttgcccctaagatagaggatgaagagggttcatag

SEQ ID NO: 256465 - DNA, 786 bp, Artificial Sequence
  derived and/or modified sequence
atgtttgaggcaagattggtccagggaagtatcctaaagaaagtgttagaagccctgaaggatcttattaacgaggcatgttgggacatttctagctctggtgttaatctgcaaagcatggattcaagccacgtttcccttgtccagctgactctgagatctgaagggtttgatacctaccgttgcgatcgcaacctggccatgggggtcaacctgacctccatgagtaaaatcctcaagtgtgcaggaaacgaagacatcatcacccttagggctgaggataacgccgacacactcgctctcgtgtttgaagcccctaaccaggaaaaagtttctgactacgagatgaaactgatggatctggacgttgagcagcttggtattccagaacaggagtattcttgcgtggtgaagatgcccagtggggagttcgcaagaatttgccgagacctgagccacattggcgatgccgtggtgataagctgtgcgaaagatggcgtgaagttcagcgcaagtggcgagctggggaacggcaacattaaactgagccagacctccaacgttgataaagaggaagaggccgtgaccatcgaaatgaacgagcccgtccagctgacattcgctctgcggtacctgaacttttttaccaaggcgacccccctgtcaagtaccgtaacactatctatgagtgctgatgtccctttggtcgttgaatataaaattgccgatatggggcacctgaaatattacctggctccaaagattgaggacgaggagggttcctag

SEQ ID NO: 256466 - DNA, 1344 bp, Artificial Sequence
  derived and/or modified sequence
gggctggacagcgtggtgacgtcgcaacgcggcgcagggtgagagcgcgcgcttgcggacgcggcggcattaaacggttgcaggcgtagcagagtggtcgttgtctttctaggtctcagccggtcgtcgcgacgttcgcccgctcgctctgaggctcctgaagccgaaaccagctagactttcctccttcccgcctgcctgtagcggcgttgttgccactccgccaccatgttcgaggcgcgcctggtccagggctccatcctcaagaaggtgttggaggcactcaaggacctcatcaacgaggcctgctgggatattagctccagcggtgtaaacctgcagagcatggactcgtcccacgtctctttggtgcagctcaccctgcggtctgagggcttcgacacctaccgctgcgaccgcaacctggccatgggcgtgaacctcaccagtatgtccaaaatactaaaatgcgccggcaatgaagatatcattacactaagggccgaagataacgcggataccttggcgctagtatttgaagcaccaaaccaggagaaagtttcagactatgaaatgaagttgatggatttagatgttgaacaacttggaattccagaacaggagtacagctgtgtagtaaagatgccttctggtgaatttgcacgtatatgccgagatctcagccatattggagatgctgttgtaatttcctgtgcaaaagacggagtgaaattttctgcaagtggagaacttggaaatggaaacattaaattgtcacagacaagtaatgtcgataaagaggaggaagctgttaccatagagatgaatgaaccagttcaactaacttttgcactgaggtacctgaacttctttacaaaagccactccactctcttcaacggtgacactcagtatgtctgcagatgtaccccttgttgtagagtataaaattgcggatatgggacacttaaaatactacttggctcccaagatcgaggatgaagaaggatcttaggcattcttaaaattcaagaaaataaaactaagctctttgagaactgcttctaagatgccagcatatactgaagtcttttctgtcaccaaatttgtacctctaagtacatatgtagatattgttttctgtaaataacctatttttttctctattctctgcaatttgtttaaagaataaagtccaaagtcagatctggtctagttaacctagaagtatttttgtctcttagaaatacttgtgatttttataatacaaaagggtcttgactctaaatgcagttttaagaattgtttttgaatttaaataaagttacttgaatttcaaacatca

SEQ ID NO: 256467 - DNA, 1359 bp, Artificial Sequence
  derived and/or modified sequence
ccgcggatggccggagctggcgccctggttctggaggtaaccggttactgagggcgagaagcgccacccggaggctctagcctgacaaatgcttgctgacctgggccagagctcttcccttacgcaagtctcagccggtcgtcgcgacgttcgcccgctcgctctgaggctcctgaagccgaaaccagctagactttcctccttcccgcctgcctgtagcggcgttgttgccactccgccaccatgttcgaggcgcgcctggtccagggctccatcctcaagaaggtgttggaggcactcaaggacctcatcaacgaggcctgctgggatattagctccagcggtgtaaacctgcagagcatggactcgtcccacgtctctttggtgcagctcaccctgcggtctgagggcttcgacacctaccgctgcgaccgcaacctggccatgggcgtgaacctcaccagtatgtccaaaatactaaaatgcgccggcaatgaagatatcattacactaagggccgaagataacgcggataccttggcgctagtatttgaagcaccaaaccaggagaaagtttcagactatgaaatgaagttgatggatttagatgttgaacaacttggaattccagaacaggagtacagctgtgtagtaaagatgccttctggtgaatttgcacgtatatgccgagatctcagccatattggagatgctgttgtaatttcctgtgcaaaagacggagtgaaattttctgcaagtggagaacttggaaatggaaacattaaattgtcacagacaagtaatgtcgataaagaggaggaagctgttaccatagagatgaatgaaccagttcaactaacttttgcactgaggtacctgaacttctttacaaaagccactccactctcttcaacggtgacactcagtatgtctgcagatgtaccccttgttgtagagtataaaattgcggatatgggacacttaaaatactacttggctcccaagatcgaggatgaagaaggatcttaggcattcttaaaattcaagaaaataaaactaagctctttgagaactgcttctaagatgccagcatatactgaagtcttttctgtcaccaaatttgtacctctaagtacatatgtagatattgttttctgtaaataacctatttttttctctattctctgcaatttgtttaaagaataaagtccaaagtcagatctggtctagttaacctagaagtatttttgtctcttagaaatacttgtgatttttataatacaaaagggtcttgactctaaatgcagttttaagaattgtttttgaatttaaataaagttacttgaatttcaaacatca

SEQ ID NO: 256468 - protein, 1079 aa, Artificial Sequence
  derived and/or modified sequence
MKSCAVSLTTAAVAFGDEAKKMAEGKASRESEEESVSLTVEEREALGGMDSRLFGFVRLHEDGARTKTLLGKAVRCYESLILKAEGKVESDFFCQLGHFNLLLEDYSKALSAYQRYYSLQADYWKNAAFLYGLGLVYFYYNAFHWAIKAFQDVLYVDPSFCRAKEIHLRLGLMFKVNTDYKSSLKHFQLALIDCNPCTLSNAEIQFHIAHLYETQRKYHSAKEAYEQLLQTENLPAQVKATVLQQLGWMHHNMDLVGDKATKESYAIQYLQKSLEADPNSGQSWYFLGRCYSSIGKVQDAFISYRQSIDKSEASADTWCSIGVLYQQQNQPMDALQAYICAVQLDHGHAAAWMDLGTLYESCNQPQDAIKCYLNAARSKRCSNTSTLAARIKFLQNGSDNWNGGQSLSHHPVQQVYSLCLTPQKLQHLEQLRANRDNLNPAQKHQLEQLESQFVLMQQMRHKEVAQVRTTGIHNGAITDSSLPTNSVSNRQPHGALTRVSSVSQPGVRPACVEKLLSSGAFSAGCIPCGTSKILGSTDTILLGSNCIAGSESNGNVPYLQQNTHTLPHNHTDLNSSTEEPWRKQLSNSAQGLHKSQSSCLSGPNEEQPLFSTGSAQYHQATSTGIKKANEHLTLPSNSVPQGDADSHLSCHTATSGGQQGIMFTKESKPSKNRSLVPETSRHTGDTSNGCADVKGLSNHVHQLIADAVSSPNHGDSPNLLIADNPQLSALLIGKANGNVGTGTCDKVNNIHPAVHTKTDHSVASSPSSAISTATPSPKSTEQRSINSVTSLNSPHSGLHTVNGEGLGKSQSSTKVDLPLASHRSTSQILPSMSVSICPSSTEVLKACRNPGKNGLSNSCILLDKCPPPRPPTSPYPPLPKDKLNPPTPSIYLENKRDAFFPPLHQFCTNPKNPVTVIRGLAGALKLDLGLFSTKTLVEANNEHMVEVRTQLLQPADENWDPTGTKKIWRCESNRSHTTIAKYAQYQASSFQESLRAGMQWCDLSSLQPPPPGFKRFSHLSLPNSWNYRHLPSCPTNFCIFVETGFHHVGQACLELLTSGGLLASASQSAGITGVSHHAR

SEQ ID NO: 256469 - protein, 1046 aa, Artificial Sequence
  derived and/or modified sequence
MKSCAVSLTTAAVAFGDEAKKMAEGKASRESEEESVSLTVEEREALGGMDSRLFGFVRLHEDGARTKTLLGKAVRCYESLILKAEGKVESDFFCQLGHFNLLLEDYSKALSAYQRYYSLQADYWKNAAFLYGLGLVYFYYNAFHWAIKAFQDVLYVDPSFCRAKEIHLRLGLMFKVNTDYKSSLKHFQLALIDCNPCTLSNAEIQFHIAHLYETQRKYHSAKEAYEQLLQTENLPAQVKATVLQQLGWMHHNMDLVGDKATKESYAIQYLQKSLEADPNSGQSWYFLGSVLYQQQNQPMDALQAYICAVQLDHGHAAAWMDLGTLYESCNQPQDAIKCYLNAARSKRCSNTSTLAARIKFLQNGSDNWNGGQSLSHHPVQQVYSLCLTPQKLQHLEQLRANRDNLNPAQKHQLEQLESQFVLMQQMRHKEVAQVRTTGIHNGAITDSSLPTNSVSNRQPHGALTRVSSVSQPGVRPACVEKLLSSGAFSAGCIPCGTSKILGSTDTILLGSNCIAGSESNGNVPYLQQNTHTLPHNHTDLNSSTEEPWRKQLSNSAQGLHKSQSSCLSGPNEEQPLFSTGSAQYHQATSTGIKKANEHLTLPSNSVPQGDADSHLSCHTATSGGQQGIMFTKESKPSKNRSLVPETSRHTGDTSNGCADVKGLSNHVHQLIADAVSSPNHGDSPNLLIADNPQLSALLIGKANGNVGTGTCDKVNNIHPAVHTKTDHSVASSPSSAISTATPSPKSTEQRSINSVTSLNSPHSGLHTVNGEGLGKSQSSTKVDLPLASHRSTSQILPSMSVSICPSSTEVLKACRNPGKNGLSNSCILLDKCPPPRPPTSPYPPLPKDKLNPPTPSIYLENKRDAFFPPLHQFCTNPKNPVTVIRGLAGALKLDLGLFSTKTLVEANNEHMVEVRTQLLQPADENWDPTGTKKIWRCESNRSHTTIAKYAQYQASSFQESLRAGMQWCDLSSLQPPPPGFKRFSHLSLPNSWNYRHLPSCPTNFCIFVETGFHHVGQACLELLTSGGLLASASQSAGITGVSHHAR

SEQ ID NO: 256470 - DNA, 3222 bp, Artificial Sequence
  derived and/or modified sequence
agtgcagctgtgttgtcaggcccagaggctgatgacagagaagcgtgagaaaggacccacagtcagaggaaagggggagaactatggcggattctgcagacatcaaaccatctaaccatttcacgatgcaatgatgcaccagcaacagccacatggccacagtggaccccgcaggcctggccctgcatcccgcctgccccagggtctggggtccatcggatcagcaccgcccaccacaagaaggcagtcatctgccagccaggaggagaggcctcgccagaaaccaatcctgccaacaccctgatcttggacctccagcctccaggactgagaaggaaatgtctgctgttgcagcgcccggctgtgctgctttgctccagcctccccagcagaccagtgtccagtcgttcaagggaatgagcctgtcagtagaggctgggctttgtggtgagccagcagggaaacttctcggggagggaggagggcaaagagaggccagcctggtggggaagaaggggtgggagtggagaagacacagaggccgcacactgagtgaggaggaccaaggcgcaaggcccttttcaccaggctcctgtgctctcaggggagacagggagggtggcattggctagaagggcctgcccagccctggagaaaggagctcacagcagggtcgtgaagagggcagggactgggtggggggtgctaccatgtgacctgctaggaatgaatctgcgttagcgtccgtctggctggagtagagatgcttcagcacgtgtggggctgcacacaggcacgcagggtggaggcccctccactctacagccccacagccagcacctgccttctcacctcttctagtccagggcccgagaagccattagcaaccatcctcacctcagtgtgaatctgcaactctgccgctccagtgtgaaggaggagaaggagagcaggaaggggtgtccaccaccacgtgcccacaggagcaaggctcccaccctcccggggtatgaacttgaacccctgtgacctctgtgggtgcatctgcacagaatgcaggtcccctgtcccccagccaccgcaccacaccagcctagccatcctcgcgagccgccacaggcctgggaccccccagggcactggaacacagcagccccagtgagcacctggagcccgagcctggaccggaggccacggacggcttcgaacaggccagcccccaggaggggcggctcttctacagccagcccggcactgcccgcccagcctcccagatccagaggcagctgctccagagagagtgggggctccagggacttctcccaagcaagatgaaaacacaggtttttgcgtgaaagttccttcttaaatactgacagcaagtttagagcccatctcagatccctggctgtgctccatcagcccaacagccacagacccaaaatttaaagtagccatgcgccctgagagcccaacctgcctggccacgcacaggccagccatggtcccaggagtgggcgtgtgcccccgacaccacacagctgtgtccctcccttccatcccccacccacaggcagagctggaaagatcagcaccacggagagagacgagcatggccagtcccaggcccccaggccgccctgcccacctgccccatccctcccgaactgtcccctcagagctgggtcctgggctgagactccccaaactgtgaccttcaaggcttctcacacagctcaccccagcctcacggcctccagctctgccgctcactgtccccaccacactctccctggacccccacccctccagctgctggggcaggaaatcaagcctccgactgaccctcctggtgggacccctgaagagaaaggcgtgtaagggggactctgtgcacacctgcgtaagggggactctgcacacctgcagaaccgcccatccctggagcccggcctgcagtcaccgtcgagaggagaggcctggagcacagagtggatcctgtggcatggggactttgccgttggcagaacacgcaccctggggggaagggccctggctccatcgtgcccagcaagtacctggcccatatcagggacatatgagtaaaggacagaccacctggtccagtccccacttgcctgaggacagcagcccagacccccatgaatgatgaaagtccttctctgggttgagctgaaacctcccttccttatctcccacccatgtcccccgtccccctgggaaagtctgcggtatccaagggcagccctgggctccttcagctctccagtccccatggtgaaagatccgcagagaggccaaccctcccttgggtcggctatgccaggcgggcatatgagaggccccagacgtctgcaacgctggcccgatgcccatccagtgagccagccccgcgctgcttctatccagggagtctctggatttgggctcctcaggcagcagagcacacatggagacgcggagaccccagagaagaccccacaggactggagcccaaggccaggggctgtgaggggaccccagtgaggggactgcagctgccccagctccacggcgcaactgagcttcagagagcacacgcccgggcctcacacgctgggcctcctggcctcagcttgcctaccctgtgaggacgaccacgaagtccatgacgttccagccgttccgcagttccagttcctgcgtcctccccttgttcctgccagcgggggatggcatcacgcaggcatggtgaatcctggcccttgggacttccctgcgccttgcacagatcgcacagattgtggtagatggtcccttgcaagtgtcatcctgcctgatgcatcaccaccgaggaagcgaccgaagtcagagacagaggatgctgccactccccaagaatgaagccgggcttcattcccatcacctaggctgcagtacaggggcatgatctcggctcactgcaacctccacctcctggactcaagcaaccctcccattccagcctcccaggtagcaaggactacaggcacacaccaccatgccaggctaatttttgtttgtttgtttttgttgagacggtgtttcaccatgttgcccaggctggcctcgaactcctgagttcaagtgatctgcccaccttggcctctcaaagtgctgggattacaggcacgagccaccacactcagccttcatcatctaataaaatctaaccaaatcctt

SEQ ID NO: 256471 - DNA, 3240 bp, Artificial Sequence
  derived and/or modified sequence
atgaagagctgcgccgtgagcctgaccaccgccgccgtggccttcggcgacgaggccaagaagatggccgagggcaaggccagcagagagagcgaggaggagagcgtgagcctgaccgtggaggagagagaggccctgggcggcatggacagcagactgttcggcttcgtgagactgcacgaggacggcgccagaaccaagaccctgctgggcaaggccgtgagatgctacgagagcctgatcctgaaggccgagggcaaggtggagagcgacttcttctgccagctgggccacttcaacctgctgctggaggactacagcaaggccctgagcgcctaccagagatactacagcctgcaggccgactactggaagaacgccgccttcctgtacggcctgggcctggtgtacttctactacaacgccttccactgggccatcaaggccttccaggacgtgctgtacgtggaccccagcttctgcagagccaaggagatccacctgagactgggcctgatgttcaaggtgaacaccgactacaagagcagcctgaagcacttccagctggccctgatcgactgcaacccctgcaccctgagcaacgccgagatccagttccacatcgcccacctgtacgagacccagagaaagtaccacagcgccaaggaggcctacgagcagctgctgcagaccgagaacctgcccgcccaggtgaaggccaccgtgctgcagcagctgggctggatgcaccacaacatggacctggtgggcgacaaggccaccaaggagagctacgccatccagtacctgcagaagagcctggaggccgaccccaacagcggccagagctggtacttcctgggcagatgctacagcagcatcggcaaggtgcaggacgccttcatcagctacagacagagcatcgacaagagcgaggccagcgccgacacctggtgcagcatcggcgtgctgtaccagcagcagaaccagcccatggacgccctgcaggcctacatctgcgccgtgcagctggaccacggccacgccgccgcctggatggacctgggcaccctgtacgagagctgcaaccagccccaggacgccatcaagtgctacctgaacgccgccagaagcaagagatgcagcaacaccagcaccctggccgccagaatcaagttcctgcagaacggcagcgacaactggaacggcggccagagcctgagccaccaccccgtgcagcaggtgtacagcctgtgcctgaccccccagaagctgcagcacctggagcagctgagagccaacagagacaacctgaaccccgcccagaagcaccagctggagcagctggagagccagttcgtgctgatgcagcagatgagacacaaggaggtggcccaggtgagaaccaccggcatccacaacggcgccatcaccgacagcagcctgcccaccaacagcgtgagcaacagacagccccacggcgccctgaccagagtgagcagcgtgagccagcccggcgtgagacccgcctgcgtggagaagctgctgagcagcggcgccttcagcgccggctgcatcccctgcggcaccagcaagatcctgggcagcaccgacaccatcctgctgggcagcaactgcatcgccggcagcgagagcaacggcaacgtgccctacctgcagcagaacacccacaccctgccccacaaccacaccgacctgaacagcagcaccgaggagccctggagaaagcagctgagcaacagcgcccagggcctgcacaagagccagagcagctgcctgagcggccccaacgaggagcagcccctgttcagcaccggcagcgcccagtaccaccaggccaccagcaccggcatcaagaaggccaacgagcacctgaccctgcccagcaacagcgtgccccagggcgacgccgacagccacctgagctgccacaccgccaccagcggcggccagcagggcatcatgttcaccaaggagagcaagcccagcaagaacagaagcctggtgcccgagaccagcagacacaccggcgacaccagcaacggctgcgccgacgtgaagggcctgagcaaccacgtgcaccagctgatcgccgacgccgtgagcagccccaaccacggcgacagccccaacctgctgatcgccgacaacccccagctgagcgccctgctgatcggcaaggccaacggcaacgtgggcaccggcacctgcgacaaggtgaacaacatccaccccgccgtgcacaccaagaccgaccacagcgtggccagcagccccagcagcgccatcagcaccgccacccccagccccaagagcaccgagcagagaagcatcaacagcgtgaccagcctgaacagcccccacagcggcctgcacaccgtgaacggcgagggcctgggcaagagccagagcagcaccaaggtggacctgcccctggccagccacagaagcaccagccagatcctgcccagcatgagcgtgagcatctgccccagcagcaccgaggtgctgaaggcctgcagaaaccccggcaagaacggcctgagcaacagctgcatcctgctggacaagtgccccccccccagaccccccaccagcccctacccccccctgcccaaggacaagctgaacccccccacccccagcatctacctggagaacaagagagacgccttcttcccccccctgcaccagttctgcaccaaccccaagaaccccgtgaccgtgatcagaggcctggccggcgccctgaagctggacctgggcctgttcagcaccaagaccctggtggaggccaacaacgagcacatggtggaggtgagaacccagctgctgcagcccgccgacgagaactgggaccccaccggcaccaagaagatctggagatgcgagagcaacagaagccacaccaccatcgccaagtacgcccagtaccaggccagcagcttccaggagagcctgagagccggcatgcagtggtgcgacctgagcagcctgcagccccccccccccggcttcaagagattcagccacctgagcctgcccaacagctggaactacagacacctgcccagctgccccaccaacttctgcatcttcgtggagaccggcttccaccacgtgggccaggcctgcctggagctgctgaccagcggcggcctgctggccagcgccagccagagcgccggcatcaccggcgtgagccaccacgccagatag

SEQ ID NO: 256472 - DNA, 624 bp, Artificial Sequence
  derived and/or modified sequence
atgaagagctgcgccgtgagcctgaccaccgccgccgtggccttcggcgacgaggccaagaagatggccgagggcaaggccagcagagagagcgaggaggagagcgtgagcctgaccgtggaggagagagaggccctgggcggcatggacagcagactgttcggcttcgtgagactgcacgaggacggcgccagaaccaagaccctgctgggcaaggccgtgagatgctacgagagcctgatcctgaaggccgagggcaaggtggagagcgacttcttctgccagctgggccacttcaacctgctgctggaggactacagcaaggccctgagcgcctaccagagatactacagcctgcaggccgactactggaagaacgccgccttcctgtacggcctgggcctggtgtacttctactacaacgccttccactgggccatcaaggccttccaggacgtgctgtacgtggaccccagcttctgcagagccaaggagatccacctgagactgggcctgatgttcaaggtgaacaccgactacaagagcagcctgaagcacttccagctggccctgatcgactgcaacccctgcaccctgagcaacgccgagagcaagtacttctag

SEQ ID NO: 256473 - DNA, 3141 bp, Artificial Sequence
  derived and/or modified sequence
atgaagagctgcgccgtgagcctgaccaccgccgccgtggccttcggcgacgaggccaagaagatggccgagggcaaggccagcagagagagcgaggaggagagcgtgagcctgaccgtggaggagagagaggccctgggcggcatggacagcagactgttcggcttcgtgagactgcacgaggacggcgccagaaccaagaccctgctgggcaaggccgtgagatgctacgagagcctgatcctgaaggccgagggcaaggtggagagcgacttcttctgccagctgggccacttcaacctgctgctggaggactacagcaaggccctgagcgcctaccagagatactacagcctgcaggccgactactggaagaacgccgccttcctgtacggcctgggcctggtgtacttctactacaacgccttccactgggccatcaaggccttccaggacgtgctgtacgtggaccccagcttctgcagagccaaggagatccacctgagactgggcctgatgttcaaggtgaacaccgactacaagagcagcctgaagcacttccagctggccctgatcgactgcaacccctgcaccctgagcaacgccgagatccagttccacatcgcccacctgtacgagacccagagaaagtaccacagcgccaaggaggcctacgagcagctgctgcagaccgagaacctgcccgcccaggtgaaggccaccgtgctgcagcagctgggctggatgcaccacaacatggacctggtgggcgacaaggccaccaaggagagctacgccatccagtacctgcagaagagcctggaggccgaccccaacagcggccagagctggtacttcctgggcagcgtgctgtaccagcagcagaaccagcccatggacgccctgcaggcctacatctgcgccgtgcagctggaccacggccacgccgccgcctggatggacctgggcaccctgtacgagagctgcaaccagccccaggacgccatcaagtgctacctgaacgccgccagaagcaagagatgcagcaacaccagcaccctggccgccagaatcaagttcctgcagaacggcagcgacaactggaacggcggccagagcctgagccaccaccccgtgcagcaggtgtacagcctgtgcctgaccccccagaagctgcagcacctggagcagctgagagccaacagagacaacctgaaccccgcccagaagcaccagctggagcagctggagagccagttcgtgctgatgcagcagatgagacacaaggaggtggcccaggtgagaaccaccggcatccacaacggcgccatcaccgacagcagcctgcccaccaacagcgtgagcaacagacagccccacggcgccctgaccagagtgagcagcgtgagccagcccggcgtgagacccgcctgcgtggagaagctgctgagcagcggcgccttcagcgccggctgcatcccctgcggcaccagcaagatcctgggcagcaccgacaccatcctgctgggcagcaactgcatcgccggcagcgagagcaacggcaacgtgccctacctgcagcagaacacccacaccctgccccacaaccacaccgacctgaacagcagcaccgaggagccctggagaaagcagctgagcaacagcgcccagggcctgcacaagagccagagcagctgcctgagcggccccaacgaggagcagcccctgttcagcaccggcagcgcccagtaccaccaggccaccagcaccggcatcaagaaggccaacgagcacctgaccctgcccagcaacagcgtgccccagggcgacgccgacagccacctgagctgccacaccgccaccagcggcggccagcagggcatcatgttcaccaaggagagcaagcccagcaagaacagaagcctggtgcccgagaccagcagacacaccggcgacaccagcaacggctgcgccgacgtgaagggcctgagcaaccacgtgcaccagctgatcgccgacgccgtgagcagccccaaccacggcgacagccccaacctgctgatcgccgacaacccccagctgagcgccctgctgatcggcaaggccaacggcaacgtgggcaccggcacctgcgacaaggtgaacaacatccaccccgccgtgcacaccaagaccgaccacagcgtggccagcagccccagcagcgccatcagcaccgccacccccagccccaagagcaccgagcagagaagcatcaacagcgtgaccagcctgaacagcccccacagcggcctgcacaccgtgaacggcgagggcctgggcaagagccagagcagcaccaaggtggacctgcccctggccagccacagaagcaccagccagatcctgcccagcatgagcgtgagcatctgccccagcagcaccgaggtgctgaaggcctgcagaaaccccggcaagaacggcctgagcaacagctgcatcctgctggacaagtgccccccccccagaccccccaccagcccctacccccccctgcccaaggacaagctgaacccccccacccccagcatctacctggagaacaagagagacgccttcttcccccccctgcaccagttctgcaccaaccccaagaaccccgtgaccgtgatcagaggcctggccggcgccctgaagctggacctgggcctgttcagcaccaagaccctggtggaggccaacaacgagcacatggtggaggtgagaacccagctgctgcagcccgccgacgagaactgggaccccaccggcaccaagaagatctggagatgcgagagcaacagaagccacaccaccatcgccaagtacgcccagtaccaggccagcagcttccaggagagcctgagagccggcatgcagtggtgcgacctgagcagcctgcagccccccccccccggcttcaagagattcagccacctgagcctgcccaacagctggaactacagacacctgcccagctgccccaccaacttctgcatcttcgtggagaccggcttccaccacgtgggccaggcctgcctggagctgctgaccagcggcggcctgctggccagcgccagccagagcgccggcatcaccggcgtgagccaccacgccagatag

SEQ ID NO: 256474 - DNA, 6201 bp, Artificial Sequence
  derived and/or modified sequence
caccgataactagggctggccgaggcccaggccccgccctggccctggagcaacctggacggtgttcccttgagctggtgtgacgtgccctcgtttattctgacatccagcccagtctcagtactgttgtcataaccttacgccagactcaggcagaatgtaagccattcactcgtgagcatcgcagccgcttgtgctgcctggaagctgcagggccaggactgcattttcagtttgcaattgaggtctcctgattttggtgtttccaagactggctgctataccttgataagctttccttctgcctccatgaaacctggtgtctaaaaaagatcaactaaaacttggaaccctttaaccaagaggacctttaaaaataacctttcattccagtcaagacccagctggatgcattttaaagttgggagtggcgaggaagccttcctagtgccgcccggggaatgtaaaaccaccagagcaacaggttgggacagtatggtcaggccttggagggaaagagaaccagtatccacacaagacctcgaacttgtgtggcccctcagtttcatctctcctgcctgccatcacattagactttaattgggtgagagaacagggcagagactgtcacctgcattttgcagatgggaagtagagacagagaaagtgacacgcccagggtcacccagcggtgaccagcagcgtggactctgcatccaggtctcctggaccttgatgcagtatcttttgagacatgccactctagtccctttggtgacccgtgggtgccaagagaaaataattcttatatcctgataagagcatattacaattatattatttcaatatgtgtccacagcaaaggacagtttacaaaaatgtgaatccgaatgacatttaggaatgtttgttataaatgataagttccactttggaatgattctggttttgcaggaatctttccaagaaagttggttaaaatgatgtctctgcctgtgaggccagttctatggaaaacaaacacaccctgagttctttattgatggctttagtggaggcagagcagtatgttcaaaacaagtgggaggccctgagatcgcaggaatggaaacagagttctggctgggggtggcctgtccactgcccgccccttcctggagatgcactcctttctggctttctggggagggagcagccttgctcagtggtgggagcagcttgaacgggacctgatcaacacccaggaagactgtgcacagagggcagttggtctccagcctgcaggctccatgagcacagccttgatggtggtgggcaggcgcctgcctgctgtggactacatttgatgcaaaacatcaagtaaagggtggagcgtaatacagtgaatatgcctcccagaaacatcatgctctgcctattttaacagggctctttttctttagaaaagtctccttctctatagaaaccagggacaattttggatgagagccaaccacaggacgcgctggggacgttatggtgggacctcacatgtggccaggtgcacctttgggaagaaggcagacgtgatgtgacttagcacaggcactcaaaagaggcagccactggtctttgctaatatccagaagtggattgtttgttccattcatccttctagaagctaaattctttcattgccttgagacatcactagattttgaagcacttgcaaactagaagcttgcaagatcaatgtccatgtatatttttaaagatatgcatgctttaaaaggaccctaatttctgagtacatggcttccccaaagaaacagtatatattctggagatgatgggggttttggcatggagagggactcctgtctagtctagaaaatgttacttacatgcctcttccatgtaccgatctcaagaatatgggttttctagttggctttaaacactacccaggcaggaaggtggctttggtaagaattttgagctggatgaaatgttctagtgaacttacgactgtgtatgtgcgcacgcgtgtgtgtgtgtgtgtgtgtgtgtgtgtgtgtgtgtgtgtgtgaagaaacagcaaaaggggaagtgggagaaacagtaaggaagcgtttttaattaaaaatatgtatacctaagaggagactttattttctatttctggtggtggtgatctatgttctggaatccatttaccagaagtttgtggatcttttgtttgaagtggaattgttcagtgccctactctctttgacggtgcagagccttgcggcaaagtgttctcctgggccctagagacccccagggcacctggcaggagcccgtaaaccacggcagagtcccaagtggtgcatgttttggcgagtgatgggcaggactgatgattcacagctgtgaggctgtgctattgtttttaccctcttgtactgcttttaataggaagtcccgactttacgtcagttgtgagagcagcgtcttatgatgtgacaggcaagaagacattccttgcatcaaatataagagtttaatgagaagagtggagtggataagtgaactctcccaagagtactgttttttgtttccctttttaaatgctttcttggtacataaataatataatactttttttaaagaaattccagatgagtgggaaaaaaaccaatcacctgttattacactatctgattataaccactgttaacatttcagtttttatcttttcagacttttttctatgcatctgtgtgtgttttattactttttccatgaaatataatcatattatacatactgttttataacttttatcccttttaatgctatattgtgaatagatttctatatcagtaaatatgtaattacattatttttaacctctatgtaggttgtaccttggatacttaggttgtttccaatttttttactgttgtagtcaaggacataatgaagttcttctaacatccttgcgaacttttcagaatattgacttagggtaattttctgaagttatcactggctcaaaagtacgcgcctccctatctgcggctcctttccttctgaggcatacaggacttcaccctccatcccccttgtactcattcagggtcctatgactaattctggccaatgaaatgtgagcacaggtgacacatgaagctccagacagacactgaaatgcccatgagcagttccgcagtgtctgccttcccttccctcagcaaatgctgatgtcccagggacagagcctctgtcaagcctggatccctgagtgactacgtggagcagcccccttctcccttcatgttaccctcacctgccaccctgcatggacgggtagcatgaataaaaaaaataaaccttaggtgttaaacactggggtttcagggttaattggttaactgcagcataacatatcctgttgcaacaataaaaaagaatgcacatttttaggacttgtaatatgtattgcctcaaattgccttccagaaagacagacccaattatactcccacccacagtgtgtgagtgtgtactgcttcctctttaacactggagttaccctggggacagagagctaaaaaaaatatttttttggttaaaatgtaaccctttaaggtgttcagcagtatcattgatttctaagaggtttatttcataaacattgtaaaacaaaattttaagttgcacgtatggctttttaaaaacgtttagacatttaaaaaaacaccttttagtcaagtttatctgttacttttttttttttttttaatggttgctacctatgccgtcatgcttatgcaggtctttccaattcttttttttttttttttttttttttttttttgagacggggtccaccctggcccccaggctggagtgcagtggcgtgatctcagctcactgcaacctgcgcctcccgggttcaagcgattctcatgtgtcaacctccctcctgagtagctgggactacaagtgtatgccaccacgcccaggtaactttttgtttttagtagagatgggtttcgccatgttgcctaggctggtctcgaactcctgaactcaggcaatccacacgccttggcctcccaaagtgctggaattacaggtgtgagccaccaagcccggcgaggtcttcccaattctgatggcaaggttgtataaatattcaccactatcttattcttgtacttttattatttctttctaaacagttaaatctgtgatctggctgggcgtgttggctcttgcctgtaatcccaacactttgggtcgccaaggtggaaggatcacttgagtccaggcatttgaggttacagtgagctttgatggcaccggtgcactccagcctggggaacagagcaagaccctgtctctaaaaaaaattttaaaaacctctgatctatctggaatgtattttctaaattaccccaacactgtttattgggaagtctgtcctttattctatatgaaatcccatttttgccatacacctagtagcccttctgttgggtgccaggataagcaccctggccttgagtgtgctgtgaactctttattatgggttgtgatcttcctgcacattctagcactggtaccacattgtttggatcgccatagctttggactaaacttccccattaaactttttcaaaacttgcctagtatattgtgcaggccgggcatggtggctcacgcctgtaatcccagcactttgggaggccaaggtggatggatcacctgagatcaggagttcgagaccagcctggataacatggcgaaaccccatctctactaaaaatacaaaaaaaaaaaaaaaaaaaaaaaattagctggctgtggtgataggaacctgtaatctcagctacttgggaggctgaggcagtgaacccaggaggcagaggttgcagtgagctgagatagcaccagcctgggcaacggagcgagactctgtctcaaaaaaacaaaaaacaaaacaaaaaaaaaaccttccaaaagaagtttgagataattttatgtttagaaaaattagaaattggattgagtaaaatttacatattttacacaagaggactaacatctttataatatttaacctttcagtaaatttatgttttatgtttctcagcctatcttttctagtataggtgatttttttagtgtggttactattgtaaatgagatcctactactttaaaaaatgaaaattaaatctatcgcttttatgactttaaaacattagacttatgtaagtgtaaacattatttaaaaacataatgtagaaaattaaagtcccccataattaaaatccctttcccccagaaaaagtcaacagcatattcatcagttttttcctaaagtatgttttagcactttgaccatatgagacaacccttctgctgttagcatttttctctttgcaatagatcttcctatgtcagtacacatcaatctacctcattcttacctctgcataagagagtagtgtgtagttgtataatagtttaacttggcgattggttattgattttgtaactagccagttactgaattattctaaaggttttgctgttgttaatttctttcgcctttttcagttgggtaatagttctgggtaggttgataattttattcccatatttgtaatcttatttcactttctcaactcatcacattgactggtacttttagaacaatgttaaaaaacatttacataattgtgctgatattgtacattatttgatatatatatatcaaattttttttacttagaagagtgtttctccaaaactataaatttgactcttagtgtaaaataatcttaatatttgaattatacattcaggttatgccctctatttctagtttgatgaaaatattattagtaatggatgttggggttttattaaatggcttttttccacatctgtcaagatgatcaactggcttttctctattatgactttagatgaatcgttttaatagatttgctaatgttaagacatctctgcatttctacaagaatctgatgtagtcatagtatactattcttttaatatacatctcctttcaatgttaacagtggttatttatgattggttggtccatagtagatttttattttgtgtttcttatctgtactttctgatttttctacaaagattgtgtattacttgtataataaaaataagagctttaaattgt

SEQ ID NO: 256475 - DNA, 3240 bp, Artificial Sequence
  derived and/or modified sequence
atgaagtcttgtgcagtttccctgaccaccgccgcagtagctttcggtgatgaagccaagaagatggctgaagggaaggcctcaagggaaagtgaggaagagtctgtgtccctcacagtagaggaacgagaggccctgggggggatggactctcggcttttcggatttgtccgcctgcatgaagatggtgccaggacgaaaactttactgggcaaggcagtgaggtgttacgaatccctgatactcaaagcagagggaaaagtggagtcagattttttttgccagctgggacactttaacctgctcctcgaggattacagcaaggcacttagcgcataccagcggtactattctttacaggctgattactggaaaaacgcagcgtttttgtacggcctcggcctggtgtatttttattacaacgcgtttcattgggcaattaaggcgttccaggacgtgttgtatgttgacccgtcattctgccgtgctaaggaaatccacctgcggctcggtctgatgtttaaggtaaacacagactataaatcctccctgaagcacttccaactggcactcatcgactgcaatccgtgtactctgtccaatgctgaaatacaattccacattgctcatctctatgagacacagaggaagtatcattcagctaaggaagcctatgagcaactgctccagaccgagaacctacctgcccaggtgaaagctacagttttgcagcagcttggttggatgcaccacaacatggatctcgttggcgacaaggccacaaaagagagttatgctatccagtatctgcagaagtcattggaggctgacccgaactcagggcagagctggtatttcctgggtcggtgttatagctcaatcggcaaagtccaggacgcttttatttcctaccgccagtccattgacaaaagcgaggcatccgccgatacttggtgctctatcggggtgctctatcaacaacaaaaccaacctatggatgcactgcaggcgtacatctgcgcagtgcagttggaccacggtcacgctgcggcatggatggacctgggcaccctctatgaaagctgtaaccaacctcaggatgctattaagtgttatttaaatgccgctagatcaaaaaggtgcagcaataccagcacactagccgctagaatcaaatttctccagaacgggtcggataactggaatggtgggcagtccctgagtcaccaccctgtgcagcaggtctacagtctgtgtctgaccccgcagaagcttcagcatctggagcaattgcgcgccaacagggacaatctcaaccccgcccaaaagcatcagctggagcaattggagtcccaattcgtgttaatgcagcagatgcgccataaggaagtggcacaggtgcggactacgggaattcacaacggagccatcaccgatagctctctccctaccaacagcgtttcgaatcgccaaccccacggagccctgactcgagtgtctagcgtgtctcagccaggcgtgcggccagcctgcgttgagaagctgctgtcgtccggtgcgttcagtgcaggatgtataccatgtggaacctctaaaatccttggatccaccgataccatcctgctgggttccaattgcatagctggaagcgagagtaacggcaacgtgccgtatcttcagcagaacacccacacactgccccacaatcatactgatttgaacagttccaccgaagaaccttggaggaaacagttgtccaattccgcacaggggcttcacaagtcgcagagctcttgcctgagcggcccaaacgaggaacagccccttttctctaccggttccgctcagtatcaccaagctactagcaccggaataaagaaggcaaatgaacacctgactctgcccagcaattccgtgccacagggagacgcggacagtcaccttagctgtcacactgccacatcagggggccaacaaggtattatgtttacaaaggaatccaagcccagcaaaaacaggagtctggtgcccgagactagcaggcacaccggcgacactagcaacggctgcgccgatgtgaaaggactgagtaatcatgtacaccagctcatcgccgatgccgtgagctccccaaatcatggcgactctccaaatttgctgattgcagacaacccacagttgtctgcattgcttatcgggaaagccaacggcaatgtggggaccgggacctgtgataaggtcaataatattcaccctgcggtgcacacaaagactgaccactctgtcgcgagctccccctcttccgccatctcgaccgctaccccaagtccaaaaagcaccgagcagcgtagcataaattcagtgacaagtctcaatagtccacactcaggtctgcatacggtgaatggagagggattgggcaagtcacagtccagcacgaaggtggacctgccgctggcttcccacaggtccacctcccagatactgcccagcatgtcggtgtcaatatgcccctcaagcacagaagtgttaaaggcctgcagaaatcctggaaaaaacggcctttctaatagctgcatcctgcttgacaagtgtccccccccccgtccgcctacgagtccctacccccccctccccaaggataagctgaaccctcctacgccgtctatctatctagaaaacaaacgtgatgctttttttcctccactacatcagttctgtactaatccaaaaaaccccgtcactgttattcgtggactcgccggggccttgaaactggatctgggactattttccacaaagaccctggttgaggctaataatgaacatatggttgaggtccggactcagctcctccagcccgccgatgaaaattgggacccaaccggcaccaagaagatttggcggtgcgagagcaatcgctcacatacgaccatagcaaaatatgctcaatatcaggcttctagtttccaggagtctttgagggcaggcatgcaatggtgcgatctgagctctctacagcctcccccacctgggttcaagcggttctctcacttgtccctaccgaattcctggaattaccgtcaccttccgagctgccccacgaacttctgtatctttgttgagacaggtttccaccacgtggggcaggcttgtctggaacttttaacctccggcgggctgctggcgtccgccagccagagtgccggcataaccggtgtgtcccaccacgcaaggtag

SEQ ID NO: 256476 - DNA, 624 bp, Artificial Sequence
  derived and/or modified sequence
atgaagtcctgcgcggtgtctttaacaacggccgcagtcgccttcggagacgaggcaaaaaagatggctgaggggaaagcttctcgagaaagtgaggaggaatcagtctccttgacagtcgaagagcgggaggcgctcggtggtatggattcacggctatttgggttcgtcagactgcatgaggatggagccaggacaaagaccctgctgggtaaggccgtgcggtgttacgagtccctgatcctgaaagctgaaggtaaggtcgagtccgatttcttttgccagttgggtcactttaatctgttgctggaggattactccaaagcgctgtccgcataccagaggtattatagcttacaagccgattattggaaaaacgcagcgtttctgtacggactggggctcgtctatttctactataacgcttttcactgggcgatcaaggcctttcaggacgtcctgtacgtggacccttctttctgccgggccaaggaaattcacctgcggctgggacttatgttcaaggtcaatacagattacaagtccagccttaaacattttcaactggcgctcatcgattgtaacccttgtacactctccaacgccgagtctaagtatttctag

SEQ ID NO: 256477 - DNA, 3141 bp, Artificial Sequence
  derived and/or modified sequence
atgaaatcctgtgccgtgtccttaacgactgccgcagttgcattcggggatgaggccaaaaagatggccgaaggcaaagctagccgggaaagcgaggaagagtctgtgtctctcactgttgaggagagggaggccctggggggaatggattcacggcttttcggcttcgtccgcctccacgaggacggggcgcggacaaaaactttgttaggcaaggccgttagatgctatgagtcgctcatacttaaggccgaaggcaaagtggagtcagattttttttgtcaacttggacattttaatctgctcttggaggattatagcaaggcactctctgcatatcaacgctactactcattacaagctgactactggaaaaatgcggcctttctctacgggctgggtctcgtgtacttttactataacgccttccactgggccataaaggcttttcaggacgttctttatgttgacccctccttttgtcgtgcgaaagaaatacaccttcggctgggacttatgttcaaggtgaacactgattacaagtcgtcacttaagcacttccagcttgctctgatagattgcaatccgtgtactttgagcaatgccgagattcagtttcacatcgctcacctttacgaaacgcagaggaagtaccattctgctaaggaggcgtatgagcaattattacaaactgagaacctacccgcacaagtaaaggctacagtgctccagcagctgggttggatgcatcataatatggacctggtgggagataaagccactaaagagagctacgcaatccagtacctgcagaaaagcctggaggcagatccaaacagtggtcaatcttggtacttcctaggctcagtgctgtatcagcagcagaatcaacccatggatgccctacaggcctacatctgcgcggtgcaactggaccacggccacgcagctgcctggatggatttaggcacgctctacgaaagttgcaatcagcctcaagacgccatcaagtgctatctcaatgcagcacgctccaaaaggtgtagcaacactagcacactagctgctaggatcaagtttctccaaaacggcagcgacaactggaatggaggacaatccttatctcaccatcccgttcagcaggtttatagcctctgccttacgccgcagaagctgcagcatcttgagcaactgcgggctaatcgggacaatcttaaccctgcacagaaacatcagctggagcagttggagtcccagtttgtattaatgcaacagatgagacacaaggaggtggcacaggttcgcacaaccggtatccacaatggggcaattacagacagcagccttccgacaaactccgtctccaatagacaacctcacggcgcattaacaagggtctcaagcgtgtcacagcccggggtccggcccgcatgtgtggagaaactgctttcctccggggccttttctgcagggtgcataccttgtggaacttcaaagattttgggtagtactgataccatcctgctcggcagcaactgtattgcaggcagtgaaagtaacggtaacgtcccttatctacagcagaacacccataccctccctcataaccacaccgacctgaattcctcaacagaggagccttggcgtaagcagcttagcaactccgcgcagggactgcataaatctcagtcgagctgcctgtcaggtccaaatgaggaacaacccctgttttctaccggatcagcccagtaccaccaggctactagtaccgggattaagaaggctaacgaacaccttactctgccttcaaattccgtgccgcaaggcgacgccgatagccacctgagttgccacactgccacaagtggcgggcaacaggggattatgtttaccaaggagtccaaaccatccaaaaacaggagtttagtacctgagacatcacggcataccggcgacacatctaacgggtgcgcagatgtaaaggggctctccaatcatgtgcaccaactgattgcagacgctgtgtcttccccaaaccatggggatagccctaatttgcttatcgcagataatccccagctgtcagcgctgcttattggcaaagctaacggcaatgttggcaccggaacctgcgataaagtcaataacatccaccccgcagtacacacaaaaactgaccactcagtggccagctccccctcgtctgctatcagtacagcaaccccatcacccaagtctaccgagcagaggagtatcaatagcgttaccagcctgaacagcccacactccggactgcatacagttaatggtgaaggcctggggaaaagtcagagttctaccaaagtggacctgccactggcctctcaccgatccacaagtcagatcttgccttcaatgagcgtgagtatctgccccagctcgacagaggtcctcaaagcctgccgaaatccaggaaaaaacggactttcgaatagttgtatcctcctcgataaatgccctccacctaggccacctacatcaccctatccacctctcccgaaggataagctaaacccccctaccccatctatatacctggagaacaaacgtgatgcgttttttccgcctcttcaccaattctgtacaaatccgaaaaatcccgtgaccgtgatacgtggcctggctggggctctgaaactagacctggggctgttctcaacaaagaccctggtggaagccaataatgagcacatggtggaagttagaacccagctcttacagcccgcagacgagaattgggatcctacagggactaaaaaaatctggaggtgtgaaagcaaccgttcccacaccactattgcaaaatacgcccagtaccaggccagttcattccaggagtccctgcgcgctggtatgcagtggtgtgatctgagctccttgcagcccccaccacccggattcaagcgattctctcatctgtctttacccaactcttggaattatcgccacctgcctagctgccccactaatttctgtatttttgttgagactggctttcaccatgttggccaggcctgccttgagctactgaccagcggcggccttcttgccagcgccagccaatccgcaggcataacaggagtctcgcaccatgccaggtag

SEQ ID NO: 256478 - DNA, 3240 bp, Artificial Sequence
  derived and/or modified sequence
atgaagagctgtgctgtgtccctgaccacagctgctgtggcctttggagatgaggccaagaagatggccgagggcaaggccagccgggagagcgaggaggagagcgtgtccctgactgtggaggagcgggaggccctgggcggcatggacagccggctgtttggatttgtgcggctgcatgaagatggagcccggaccaagaccctgctgggcaaggctgtgcgctgctatgagagcctcatcctgaaggccgagggcaaggtggagagtgacttcttctgccagctgggccacttcaacctgctgctggaggactacagcaaggccctgagcgcctaccagcgctactacagcctgcaggccgactactggaagaatgctgccttcctgtatggcctgggcctggtgtacttctactacaatgccttccactgggccatcaaggccttccaggatgtgctgtatgtggaccccagcttctgccgggccaaggagatccacctgcggctgggcctgatgttcaaggtgaacacagactacaagagcagcctgaagcacttccagctggccctgattgactgcaacccctgcaccctgagcaatgctgagatccagttccacatcgcccacctgtatgagacccagaggaagtaccacagcgccaaggaggcctatgagcagctgctgcagacagagaacctgcctgcccaggtgaaggccaccgtgctgcagcagctgggctggatgcaccacaacatggacctggtgggggacaaggccaccaaggagagctatgccatccagtacctgcagaagagcctggaggccgaccccaacagcggccagagctggtacttcctgggccgctgctacagcagcatcggcaaggtgcaggatgccttcatctcctaccggcagagcattgacaagtctgaggccagcgctgacacctggtgcagcattggagtgctgtaccagcagcagaaccagcccatggatgccctgcaggcctacatctgtgctgtgcagctggaccacggccatgctgctgcctggatggacctgggcaccctgtatgagagctgcaaccagccccaggatgccatcaagtgctacctgaatgctgcccggagcaagcgctgcagcaacaccagcaccctggccgcccgcatcaagttcctgcagaatggaagtgacaactggaatggaggccagagcctgagccaccaccctgtgcagcaggtgtacagcctgtgcctgaccccccagaagctgcagcacctggagcagctgcgggccaacagagacaacctgaacccagcccagaagcaccagctggagcagctggagagccagtttgtgctgatgcagcagatgaggcacaaggaggtggcccaggtgaggaccaccggcatccacaacggggccatcacagacagcagcctgcccaccaacagcgtgagcaaccggcagccccatggagccctgaccagggtgtcctctgtgtcccagcccggggtgcggcctgcctgtgtggagaagctgctgagcagcggggccttctctgctggctgcatcccctgtggcaccagcaagatcctgggcagcacagacaccatcctgctgggcagcaactgcatcgccggcagcgagagcaatggaaatgtgccctacctgcagcagaacacccacaccctgccccacaaccacacagacctgaacagcagcacagaggagccctggaggaagcagctgagcaacagcgcccagggcctgcacaagagccagagcagctgcctgagcggccccaatgaggagcagcccctcttcagcacaggcagcgcccagtaccaccaggccaccagcacaggcatcaagaaggccaatgagcacctgaccctgcccagcaacagcgtgccccagggagatgctgacagccacctgagctgccacacagccaccagcggcggccagcagggcatcatgttcaccaaggagagcaagcccagcaagaacagaagcctggtgcctgagaccagccgccacactggagacaccagcaatggctgtgctgatgtgaagggcctgagcaaccacgtgcaccagctgattgctgatgctgtgagcagccccaaccacggggacagccccaacctgctgattgctgacaacccccagctgagcgccctgctgattggcaaggccaatggaaatgtgggcaccggcacctgtgacaaggtgaacaacatccaccctgctgtgcacaccaagacagaccacagcgtggccagcagccccagcagcgccatcagcacagccacccccagccccaagagcacagagcagaggagcatcaacagcgtgaccagcctgaacagcccccacagcggcctgcacacagtgaatggagagggcctgggcaagagccagagcagcaccaaggtggacctgcccctggccagccacaggagcaccagccagatcctgcccagcatgtctgtgtccatctgccccagcagcacagaggtgctgaaggcctgcaggaaccctgggaagaatggcctgagcaacagctgcatcctgctggacaagtgccccccaccccggccccccaccagcccctacccacccctgcccaaggacaagctgaacccccccacccccagcatctacctggagaacaagagagatgccttcttcccccccctgcaccagttctgcaccaaccccaagaaccctgtgaccgtcatccggggcctggccggggccctgaagctggacctgggcctcttcagcaccaagaccctggtggaggccaacaatgagcacatggtggaggtgaggacccagctgctgcagcctgcagatgagaactgggaccccaccggcaccaagaagatctggaggtgtgagagcaacagaagccacaccaccatcgccaagtatgcccagtaccaggccagcagcttccaggagagcctgcgggccggcatgcagtggtgtgacctgagcagcctgcagcccccacctcctggcttcaagcgcttcagccacctgagcctgcccaacagctggaactaccgccacctgcccagctgccccaccaacttctgcatctttgtggagaccggcttccaccacgtgggccaggcctgcctggagctgctgaccagcggcggcctgctggccagcgccagccagagcgctggcatcaccggggtgagccaccacgccaggtag

SEQ ID NO: 256479 - DNA, 624 bp, Artificial Sequence
  derived and/or modified sequence
atgaagagctgtgctgtgtccctgaccacagctgctgtggcctttggagatgaggccaagaagatggccgagggcaaggccagccgggagagcgaggaggagagcgtgtccctgactgtggaggagcgggaggccctgggcggcatggacagccggctgtttggatttgtgcggctgcatgaagatggagcccggaccaagaccctgctgggcaaggctgtgcgctgctatgagagcctcatcctgaaggccgagggcaaggtggagagtgacttcttctgccagctgggccacttcaacctgctgctggaggactacagcaaggccctgagcgcctaccagcgctactacagcctgcaggccgactactggaagaatgctgccttcctgtatggcctgggcctggtgtacttctactacaatgccttccactgggccatcaaggccttccaggatgtgctgtatgtggaccccagcttctgccgggccaaggagatccacctgcggctgggcctgatgttcaaggtgaacacagactacaagagcagcctgaagcacttccagctggccctgattgactgcaacccctgcaccctgagcaatgctgagagcaagtacttctag

SEQ ID NO: 256480 - DNA, 3141 bp, Artificial Sequence
  derived and/or modified sequence
atgaagagctgtgctgtgtccctgaccacagctgctgtggcctttggagatgaggccaagaagatggccgagggcaaggccagccgggagagcgaggaggagagcgtgtccctgactgtggaggagcgggaggccctgggcggcatggacagccggctgtttggatttgtgcggctgcatgaagatggagcccggaccaagaccctgctgggcaaggctgtgcgctgctatgagagcctcatcctgaaggccgagggcaaggtggagagtgacttcttctgccagctgggccacttcaacctgctgctggaggactacagcaaggccctgagcgcctaccagcgctactacagcctgcaggccgactactggaagaatgctgccttcctgtatggcctgggcctggtgtacttctactacaatgccttccactgggccatcaaggccttccaggatgtgctgtatgtggaccccagcttctgccgggccaaggagatccacctgcggctgggcctgatgttcaaggtgaacacagactacaagagcagcctgaagcacttccagctggccctgattgactgcaacccctgcaccctgagcaatgctgagatccagttccacatcgcccacctgtatgagacccagaggaagtaccacagcgccaaggaggcctatgagcagctgctgcagacagagaacctgcctgcccaggtgaaggccaccgtgctgcagcagctgggctggatgcaccacaacatggacctggtgggggacaaggccaccaaggagagctatgccatccagtacctgcagaagagcctggaggccgaccccaacagcggccagagctggtacttcctgggctctgtgctgtaccagcagcagaaccagcccatggatgccctgcaggcctacatctgtgctgtgcagctggaccacggccacgccgccgcctggatggacctgggcaccctgtatgagagctgcaaccagccccaggatgccatcaagtgctacctgaatgctgcccggagcaagcgctgcagcaacaccagcaccctggccgcccgcatcaagttcctgcagaatggaagtgacaactggaatggaggccagagcctgagccaccaccctgtgcagcaggtgtacagcctgtgcctgaccccccagaagctgcagcacctggagcagctgcgggccaacagagacaacctgaacccagcccagaagcaccagctggagcagctggagagccagtttgtgctgatgcagcagatgaggcacaaggaggtggcccaggtgaggaccaccggcatccacaatggagccatcacagacagcagcctgcccaccaacagcgtgagcaaccggcagccccacggggccctgaccagggtgtcctctgtgtcccagcccggggtgcggcctgcctgtgtggagaagctgctgagcagcggggccttctctgctggctgcatcccctgtggcaccagcaagatcctgggcagcacagacaccatcctgctgggcagcaactgcatcgccggcagcgagagcaatggaaatgtgccctacctgcagcagaacacccacaccctgccccacaaccacacagacctgaacagcagcacagaggagccctggaggaagcagctgagcaacagcgcccagggcctgcacaagagccagagcagctgcctgagcggccccaatgaggagcagcccctcttcagcactggaagtgcccagtaccaccaggccaccagcacaggcatcaagaaggccaatgagcacctgaccctgcccagcaacagcgtgccccagggagatgctgacagccacctgagctgccacacagccaccagcggcggccagcagggcatcatgttcaccaaggagagcaagcccagcaagaacagaagcctggtgcctgagaccagccgccacactggagacaccagcaatggctgtgctgatgtgaagggcctgagcaaccacgtgcaccagctgattgctgatgctgtgagcagccccaaccacggggacagccccaacctgctgattgctgacaacccccagctgagcgccctgctgattggcaaggccaatggaaatgtgggcaccggcacctgtgacaaggtgaacaacatccaccctgctgtgcacaccaagacagaccacagcgtggccagcagccccagcagcgccatcagcacagccacccccagccccaagagcacagagcagaggagcatcaacagcgtgaccagcctgaacagcccccacagcggcctgcacacagtgaatggagagggcctgggcaagagccagagcagcaccaaggtggacctgcccctggccagccacaggagcaccagccagatcctgcccagcatgtctgtgtccatctgccccagcagcacagaggtgctgaaggcctgcagaaatcctgggaagaatggcctgagcaacagctgcatcctgctggacaagtgccccccacccaggcctcccaccagcccctacccacccctgcccaaggacaagctgaacccccccacccccagcatctacctggagaacaagagagatgccttcttcccccccctgcaccagttctgcaccaaccccaagaaccctgtgaccgtcatccggggcctggccggggccctgaagctggacctgggcctcttcagcaccaagaccctggtggaggccaacaatgagcacatggtggaggtgaggacccagctgctgcagcctgcagatgagaactgggaccccaccggcaccaagaagatctggaggtgtgagagcaacagaagccacaccaccatcgccaagtatgcccagtaccaggccagcagcttccaggagagcctgcgggccggcatgcagtggtgtgacctgagcagcctgcagcccccacctcctggcttcaagcgcttcagccacctgagcctgcccaacagctggaactaccgccacctgcccagctgccccaccaacttctgcatctttgtggagaccggcttccaccacgtgggccaggcctgcctggagctgctgaccagcggcggcctgctggccagcgccagccagagcgctggcatcactggagtgagccaccacgccaggtag

SEQ ID NO: 256481 - DNA, 3240 bp, Artificial Sequence
  derived and/or modified sequence
atgaagagctgcgccgtgagcctgaccaccgccgccgtggccttcggagacgaggccaagaagatggcagaagggaaggcatctcgcgagtctgaggaggaatctgtcagccttacggtcgaggaacgtgaagccctgggaggtatggactctaggctatttggtttcgtgcggttgcacgaagatggggcgagaacaaagacattgttgggaaaggccgtgcgctgctacgaatctcttatattaaaggccgaggggaaggttgagtcggacttcttttgccaactgggacacttcaatttgcttctggaggattactcaaaagcactgagcgcataccaacgctattactccttacaggcggattattggaaaaatgctgcgtttctgtacggcctgggcctcgtgtatttctactataatgcatttcactgggccattaaggcattccaggacgtgttatacgtagacccatctttttgtcgcgctaaagaaattcacctccgattagggctgatgtttaaggtcaatacagattataaaagctcattaaaacatttccaactcgctctgatcgactgcaatccgtgtacactctcaaatgctgaaattcagtttcacatcgcacacctgtacgagacgcagcgaaaataccattctgcaaaagaagcatacgagcagcttcttcaaacggaaaacctgcctgcccaggtgaaggccaccgttctccagcaactgggctggatgcatcacaacatggacctggtcggcgataaggccactaaagagtcctacgccattcagtatttgcagaaatctctggaagctgaccctaactcaggccagtcctggtacttcctggggaggtgttactcatctattggaaaagtgcaggacgctttcatcagctaccgccagtccatcgataagagcgaggcttctgccgatacctggtgtagtatcggcgtcctatatcaacagcagaatcaacccatggatgccctccaagcatatatctgcgctgtgcagctggatcatggccatgctgcagcctggatggatctgggcaccctgtatgagagctgcaaccaacctcaggacgccatcaagtgttatcttaacgccgctcggagcaagcggtgcagtaatacatctacactggcggctcggatcaaattcctgcagaatggaagcgacaactggaacgggggtcagtccctgagccatcaccccgtgcagcaggtgtatagcctctgccttacaccccagaagctccagcacttggagcagctccgcgccaatcgtgataacctaaacccagctcagaaacatcagctggagcagctcgaaagtcaattcgtgcttatgcaacagatgcgccataaagaggtggcccaggtacgtaccacaggaatccacaacggtgctattaccgactccagcctgccaacaaattcggtcagcaacagacagccccacggtgctctgactagagtgagttctgtcagccagcccggggttcggccagcctgtgttgaaaaactgctttcgtccggggcgttttctgccggatgtattccctgtggtacttcgaagatcctgggcagtacagacaccatcctgctagggagcaactgcatcgccggaagcgagagcaacgggaatgttccctacctccaacagaacacccacactctcccgcataatcacactgatctgaattcttccacagaagagccatggcggaagcagcttagtaactctgcacaaggacttcacaagagtcagtcttcgtgcctctccggtccgaacgaggagcagcctctattttccactggctctgcccaataccatcaggctacgtcaaccggcattaagaaagctaatgagcacctcacactcccttccaacagtgttccgcaaggtgacgccgatagtcatctctcgtgccacaccgctaccagcggaggacaacaaggaattatgttcaccaaggagtctaaaccttccaagaaccgaagtcttgtacctgagacaagcaggcacaccggcgacacgagcaacggctgtgccgatgtgaagggactgagtaatcacgtccatcagttgattgctgacgcagtgtccagtccgaatcacggcgacagccccaacctactcatcgccgacaacccccagttgtctgccttgctgattggtaaagccaatggcaatgtgggcacaggcacatgtgacaaagtgaataacatacatccagccgtgcataccaagaccgatcacagcgttgcctcaagccccagctccgctatcagtactgcaacccctagcccaaagtctaccgaacagaggtccattaatagcgtgactagcctgaattctccccattctgggctgcacactgttaatggggaaggcctgggtaagtcacagagcagtaccaaggtggatctccccctggctagtcacaggagtacctcccaaatcctgccctctatgtctgttagcatctgtccctcttccactgaggtcctgaaagcatgccgcaatcctggtaagaacggtctctcgaattcatgcatcttactagacaaatgccctccgcctagaccacccacctccccatacccgccccttcccaaggataaactgaaccctccaaccccatcaatctatctggaaaacaaacgagacgcctttttccccccgctgcaccagttttgcacgaaccccaaaaatccggtgaccgtgatccgtgggctcgcaggagcgctaaaattggacctggggctctttagtactaaaaccctcgttgaagcaaacaacgagcacatggtagaggtgcgaacccaactgctgcaacctgcagacgaaaattgggaccccaccggtacaaagaaaatttggaggtgtgagagcaatcggtcccatactaccattgcgaaatacgcccagtaccaagcgtcatctttccaggaaagcctgagggccggcatgcaatggtgcgacctcagctcccttcagcctccgccccctggctttaagaggttctctcacctcagcctcccaaacagctggaattaccgacacctccccagctgccccaccaacttttgcatctttgtggaaaccggctttcaccatgtgggccaggcttgcttagagctgcttacttctggagggctactggcatcagcatcccagtcagccggtattacgggcgtgagccaccacgcccgctag

SEQ ID NO: 256482 - DNA, 624 bp, Artificial Sequence
  derived and/or modified sequence
atgaagagctgcgccgtgagcctgaccaccgccgccgtggccttcggcgacgaggccaagaaaatggcggaaggcaaggcctcacgggagtctgaagaggaatctgtgagcctcacggtggaagaaagagaagccctcgggggcatggatagtcggctgtttggtttcgtacgattgcacgaggatggagcacggacaaagaccctgttggggaaggcggttaggtgctatgagagcctcatcctgaaggccgagggtaaagtggagtccgattttttttgccaactcggccatttcaacctgctgctcgaggattatagcaaggccctgtcagcctaccagaggtattatagcctgcaggcggattactggaaaaatgccgcctttctctatggattgggcttagtgtacttctattacaatgccttccattgggccatcaaagctttccaagacgtgctttatgttgatccatccttttgccgggctaaagagattcatctccggctcggcctgatgttcaaagtgaacactgattataagtcgtcactgaagcacttccagttagctctgatcgattgcaacccttgtacacttagtaatgcggaatccaagtatttctag

SEQ ID NO: 256483 - DNA, 3141 bp, Artificial Sequence
  derived and/or modified sequence
atgaagagctgcgccgtgagcctgaccaccgccgccgtggccttcggggatgaggcaaagaaaatggcagagggaaaggcttcacgggagtcagaggaagaatcagtctcattaaccgttgaagaacgtgaagcgcttgggggtatggattctaggctgttcgggttcgtgcgattacacgaggatggagcacgtactaagacccttcttggcaaggcagtgagatgctatgagtcattgatacttaaggccgaggggaaagtggagtccgatttcttttgccagcttggtcattttaatttgctgttggaagattatagcaaggccctgtccgcttaccagcgatattacagtttacaagcggactattggaagaatgctgcttttctgtacggcctgggtcttgtatacttctactacaacgcctttcattgggccatcaaagcctttcaggatgtgctgtacgtcgatccctccttctgcagggctaaagagatccacttaaggctcgggcttatgtttaaagtaaacaccgattacaaatccagcctgaagcattttcagcttgctctgattgattgcaacccatgcactctttctaatgcagaaattcaatttcatatcgctcacctgtatgagacccagaggaagtatcattcagccaaggaggcctacgagcagcttctgcagactgaaaacctgcctgctcaggtgaaggctactgtacttcagcagctgggttggatgcaccacaacatggacctggtgggagataaagcaaccaaggaatcctatgccattcagtacctgcagaagtctctggaagcggatccgaattcgggccagtcctggtatttcttggggagcgtgctatatcagcagcagaaccaaccaatggacgctctccaagcctacatttgcgcggtccagctggatcacgggcatgcagctgcatggatggatctgggcaccctgtatgagtcttgcaatcaaccccaggatgcaatcaaatgctatcttaatgctgcaagatccaagaggtgttctaataccagtactctagctgcacggatcaaatttctccagaatggctcagacaattggaatggcggtcagagcctctcccaccatccagtacaacaggtttattccctgtgcctgactcctcagaagctgcagcatttagagcaacttagggccaatagggacaacctgaatccagcccagaagcatcagctcgagcagctggagagccagttcgttctgatgcaacagatgagacacaaggaagtggctcaggtgagaacaactggcatccataacggggcaatcacagacagtagtttacccaccaactcagtgagtaaccgacagcctcacggagctcttacgagggtgagcagtgtgtctcagcctggcgtcaggccagcttgcgttgagaagctgctttctagcggcgccttctctgccggctgtataccctgcggcacgtccaagattctgggctcaacggatacaattcttttggggagtaactgtatagctggcagtgagtccaacggcaatgtcccatatctgcagcagaatacccatactttgccacacaaccacacagatttaaactcatctaccgaagagccgtggcggaaacagctgtctaattctgcgcaaggattgcacaaatctcagtcatcttgcctgtcgggcccaaacgaggaacagccacttttctctactggatcggcccagtatcaccaggctacatctacggggatcaaaaaggccaatgagcacttaaccctcccatcaaacagtgtgccccagggcgatgccgacagccacctgtcatgtcatactgcaaccagcggcggccagcaaggaattatgttcactaaggagtcgaagccctctaagaatcgcagcctcgtcccagagacgagtcgacacacaggcgacacaagtaacggatgcgcggacgtgaaagggctgtccaatcacgttcatcagctcatagcagacgccgtgtcaagtcctaaccatggtgactctccgaacctgttgatcgcagataacccccagcttagcgccttgctgattgggaaggctaatggtaatgttggcactggaacttgcgacaaagtcaataatatccatcccgctgttcacacgaagactgaccattctgtagcatcctcccctagctccgcaatcagtacggcaactcccagcccaaagtctaccgaacagcggtcaatcaactccgttaccagcctcaactcccctcactctgggctgcatacagttaacggcgagggcctcgggaaatcccagtcatccactaaagtagacttgccactggcttcacataggtccacttcccagatcctgccttcaatgtccgtttccatatgcccgtccagcactgaagtgttgaaggcttgcagaaatcccggcaaaaatgggttgagcaactcctgtatcctgctagacaagtgtccccctcctcggcccccgaccagcccgtacccgcccctcccaaaagacaagctgaaccctccaacacctagtatctacctggagaacaaacgcgacgccttttttccacctctgcatcagttctgtaccaatcccaagaaccccgtcacagtgatcagagggctcgccggtgcgctgaagttagatctgggacttttcagtacgaagaccttggtggaagcaaataacgaacacatggtagaggtgagaactcagctgttgcagcccgctgacgaaaactgggaccccaccggcactaaaaaaatctggcgctgcgagtcaaacaggagccataccactattgccaagtatgcgcaataccaagcatcgagtttccaggaaagtctgagggctggtatgcagtggtgcgacctgagtagcttacagccccctccacctggattcaaacggttctcccatttatctttacccaatagttggaattacaggcatctgccttcctgccccacaaacttctgtatcttcgtggaaacgggctttcaccacgttggacaggcctgcctggagctgctgacgtctggtggcctcctcgcaagcgcaagtcagagtgccggtattacaggtgtgtcccaccacgcccgatag

SEQ ID NO: 256484 - DNA, 3240 bp, Artificial Sequence
  derived and/or modified sequence
atgaagagctgcgcagtgagtctcactaccgcagctgtggccttcggagatgaggccaaaaagatggctgagggtaaggccagcagggagagcgaagaagaatcagtttctctgacagtggaagaaagggaagctttaggtggaatggactctagactgttcgggttcgtgcggctgcacgaggatggagcccgtaccaaaaccctgctgggtaaggccgtgcggtgctacgaatcgctgattctgaaagcggagggcaaggttgagagcgatttcttctgccagctgggacattttaatttactgctcgaggattactccaaagccctgtctgcttaccaaaggtactattcactgcaagctgactactggaaaaatgcagcatttctctacggtctggggcttgtgtacttctattacaatgccttccattgggctataaaagcctttcaggatgtcctgtatgttgatccttccttttgcagagcaaaggaaatccatctgcgcctcggcttgatgtttaaagtgaatactgactacaaatcctccctgaagcactttcagcttgccctcatcgattgcaacccttgcaccctgtctaacgctgagatccagtttcatatcgcccatctctatgagacacagcgtaagtaccactctgccaaggaagcctatgaacaattgctgcagaccgagaacctgcctgcgcaggtgaaggccactgtattgcaacaactgggctggatgcaccacaacatggatctggtcggcgataaagccacaaaagaaagttacgccattcaatacctgcagaagagcctcgaagccgatccgaattcaggccagagctggtacttcctcggccgttgttatagcagcattggaaaagttcaggacgcatttatctcttacagacagtctatcgataagtcagaggcatctgctgatacctggtgctctattggtgtgttatatcagcagcagaatcagccaatggatgctctgcaagcatatatttgcgctgtccagttggaccatggacacgcagctgcttggatggacctcggaaccttatatgagtcctgcaaccaaccccaggatgccattaaatgctatcttaacgccgcacgatcaaaacgctgttctaacacctctactctggctgcaagaatcaaattcctgcagaatggctccgataactggaatggcggtcagtccttgagtcaccatcccgttcagcaggtgtacagcttgtgcctgacaccccagaagctccagcatctcgagcagctgagggcgaacagagataaccttaatcctgcacagaaacatcaattggagcaactggagtcccaattcgttttaatgcagcagatgcgtcacaaagaagtggcccaggtccggacaacagggattcacaacggggctatcaccgactccagtctacccactaatagcgtctctaacaggcagccccacggagccttgaccagggttagcagtgtctcacagcccggagtgcggcctgcttgcgttgaaaagctgctttcctccggtgcgttctccgccggttgcatcccatgcgggacgtcaaagatactcgggagtactgacacaattctgctcggcagcaattgcatcgcgggttcagaaagtaacggcaacgtgccctacctgcagcaaaatacccatactctgcctcacaatcatacagacctgaatagctccaccgaagaaccctggaggaaacagctgagtaactcggcccaagggctccataaatcacagtcaagttgtctgagtggacccaatgaggaacagcctctgttctcaactgggagtgctcagtaccaccaggctacctcaaccggtatcaaaaaggctaacgagcacctgacactgccctctaacagcgttccgcaaggtgacgccgactctcacctgagctgccacaccgccactagtggtggtcagcagggaataatgttcacaaaagagagcaagccttccaagaacagaagtcttgtgcccgagacgagccgtcacactggagacacatcgaatgggtgtgccgatgtgaaaggtctctccaatcatgtacaccagctgatcgctgacgctgtttcatcacctaatcacggggattcgcccaacttacttatagccgataaccctcagctgtccgcactactgattgggaaggcaaatggaaatgtaggcactggtacctgtgacaaggtgaacaacatccatccggcagtgcacactaagacagaccactctgtcgccagcagcccgagttctgccatttccacagcaacgcccagtccaaagtccacagagcagcgttcaatcaactccgtgaccagccttaacagtccccattcggggttgcatacggtcaacggggaggggctgggaaaatctcagagctccaccaaggtagaccttccactagcctctcacaggtctacttctcagatacttccatccatgagtgtgtcaatttgtcccagcagcaccgaggtccttaaagcttgtcggaatccgggtaaaaatggcttgagtaattcatgtatcctactggataagtgtccgcctccacgcccacccacatccccctatccaccattgcctaaggataagctgaaccctcccactccaagcatctaccttgagaataagcgcgatgccttttttccccctctccaccagttctgcactaatccaaaaaaccctgttactgtcattcggggattggctggagccctgaagcttgatcttggactcttcagtactaagacactggttgaagctaataatgagcacatggtcgaagtcaggactcagctattacagcctgccgacgagaactgggacccgacaggcactaaaaagatctggcgttgcgaaagtaacaggagccacaccaccatcgctaaatatgcacaatatcaggcgtctagctttcaggaaagcctgcgcgcaggtatgcagtggtgtgatctgagctccttacaaccaccccctcccggttttaagcggttctcacatctgtcactgccaaactcttggaactatcgccaccttcccagctgtcccacaaacttctgcatcttcgtggaaacgggcttccaccacgtggggcaggcttgcctggagctgttgacatctgggggactgctggcgtcagcctcacaatcagcagggataaccggggtatcgcaccacgccagatag

SEQ ID NO: 256485 - DNA, 624 bp, Artificial Sequence
  derived and/or modified sequence
atgaaatcatgtgccgtgagcttgactacagccgcagtggcatttggagatgaggccaagaagatggctgaagggaaagcgtcacgggagtcagaagaagaatccgtgtccctaaccgtggaggagagagaagctctcggcggtatggactcccggttatttggctttgtacgattgcatgaggacggggctaggaccaaaactctcctcggcaaggcagtcagatgctatgagagtctcatactgaaagccgaggggaaagttgaaagtgactttttctgccagcttggccactttaacctgcttctggaggattattcaaaagccctctcagcatatcaacgatactatagtctgcaggctgattactggaaaaacgctgcctttctgtacggactgggattagtctacttttactacaacgcatttcattgggccataaaagcatttcaggatgtgctgtacgtggatcccagtttttgcagagcgaaggaaattcatctgcggctcggtctgatgtttaaggtgaataccgactacaagtcaagccttaaacacttccaactggcactcattgactgcaacccatgcacactttcaaacgccgagagcaagtacttctag

SEQ ID NO: 256486 - DNA, 3141 bp, Artificial Sequence
  derived and/or modified sequence
atgaaaagctgtgccgtgtccctcacaactgccgctgtggcattcggcgacgaggccaagaagatggccgaggggaaggcaagtagggagtcagaggaagagagcgtcagtctcacggtggaggaacgggaagcactcggaggtatggacagtaggctgttcggctttgtgagactgcacgaggacggggcacggaccaaaaccctcttaggaaaggccgtgaggtgttacgaatctctcatcctcaaagcagagggaaaagtcgaatcggacttcttttgtcagttgggccattttaacttgctgctggaggactacagtaaggcactctccgcgtatcaacgatattacagccttcaggctgattattggaagaatgccgcattcctctatggactcgggctggtatatttttactacaatgcatttcactgggcaatcaaggctttccaggacgtgctctacgtggaccctagtttctgcagggccaaggagatccacctccggctgggtctgatgtttaaagtgaataccgactacaaaagtagcctcaagcacttccagctggccttgatagactgcaatccttgcaccctctccaacgccgagatccaattccacatcgcccacttatatgaaacacagcgtaaatatcactccgcgaaggaagcttacgagcagctgttgcaaacggagaacctccccgcacaagtgaaggccacagtactccagcaacttgggtggatgcaccataacatggacctggtgggcgataaagccacaaaggagtcgtacgcgatccagtatctccagaaaagcctggaagccgatcccaattctggacagtcttggtactttttaggctccgtgctgtatcagcaacagaatcagcccatggacgctttacaagcttatatttgtgccgtccaacttgaccatggtcacgcagcagcctggatggatctgggtactctgtatgagagttgtaatcagccccaggacgccattaagtgttatctgaatgcggctcgatccaagcggtgcagtaacacatccaccctggcagcaagaatcaagttcttgcaaaacggaagcgacaattggaatgggggtcagagcctgagccaccatcccgtgcagcaggtgtactcgctctgcctgaccccacagaaactccaacatctggagcagttacgagctaatagagacaaccttaaccccgctcagaagcaccagctagaacaattagagtcccaattcgtactcatgcagcagatgcggcacaaggaggtggcacaggttcgcactaccggaatccacaatggggctatcaccgattcttcattgccaacaaattctgtctctaaccggcagccacacggagccttaactcgcgtttcctcagtgagccagccaggtgtcagacccgcatgcgttgagaagctcctctcgtctggagcattttcagctggctgtatcccttgcggtacctcaaaaattctcggttcgaccgacaccatcctgctggggagcaattgtatcgctggatccgaaagcaatggaaatgtaccctatctgcagcagaacacacacaccctgccccacaatcacacagacttgaactcctcaaccgaggagccttggcgcaaacaattgagtaatagcgcccaggggctccataaatcccagagcagttgtctgagcggtcccaacgaggaacagccattgttctcaacgggctcagcccagtaccaccaggctacttcgacaggaatcaagaaggctaacgagcacttgacactaccttcaaacagcgtgccccagggagacgccgactcacacctgagttgccatactgccacctcaggcggacagcagggaatcatgtttacaaaagagtctaagcctagtaaaaatcgcagccttgttcctgaaacaagcaggcatacgggagacacaagtaatggatgcgctgatgtaaaggggctgtccaaccatgtccatcagctcattgcagacgctgtatcgtcacccaatcacggcgatagtccaaatctgcttattgctgataatccacagttatcagcccttctgatagggaaggctaatggaaacgtaggtacagggacctgtgataaggtcaataatattcaccctgccgttcacacaaaaacggaccacagtgtggcctctagcccatccagtgcaatttcaactgccacccccagccctaagtctaccgaacagcggagcatcaattctgtaacgtccctgaattctcctcacagtggcctccacacggtgaatggtgagggcctgggtaagtctcagagctctaccaaggttgatctaccactggccagccacagaagcactagccagattctaccatccatgagcgtatctatctgcccttcttcgacagaggtacttaaggcctgtcggaatcccggtaagaatggactgtccaactcctgtattcttctggataaatgcccccctcctagaccacccacttcaccttatcccccactgccaaaagacaaactgaacccacccaccccatcgatatacctcgaaaataaacgggatgctttctttcctccactccaccagttttgtacaaacccaaaaaaccccgtgacagtgatacggggacttgctggggctctcaagctcgatttaggcctgttctccaccaagacactggtggaggccaataacgaacacatggtggaggtgcgtacacaactgctgcaacctgctgacgaaaactgggaccccacaggaaccaaaaaaatttggcggtgcgagagtaataggagccataccaccattgccaaatatgcccaataccaggcatccagtttccaggagagtctgagggcaggcatgcagtggtgcgatttgtcatctttacaaccccctccacctgggttcaaacggttctcccatctaagccttcccaatagctggaattaccgccacctcccatcttgtccaactaatttctgtatctttgtagaaacaggattccaccacgttggccaagcgtgtctagaactgctgacgtccggaggactgctggcttcagcatcgcagtctgctggcatcactggagtctctcaccacgcacgctag

SEQ ID NO: 256487 - DNA, 4325 bp, Artificial Sequence
  derived and/or modified sequence
gctcatcgtttgttgtttagataatatcatgaactgataaatgcagttgccacgttgattccctagggcctggcttaccgactgaggtcataagatattatgccttctctttagacttggtcagtggagaggaaatgggcaaagaaccagcctatggaggtgacaaggccttagggccaaaagtcttgagggtgaaggtttagggcctgcgcagcttccctgccatgccccgcaaggtctcgcattcgcaaggcttgtgacagtgggagcctcattacggactctcctaaagtccatggtgtcctcttttcgcatttgcgccccgtgggtgatgcccgatgccgcccttcccatcgctctcttccccttcaagcgtatcgcaactgcaaaaacacccagcacagacactccattttctatcttaatgcatttaactagcacaacctacaggttgttccatcccagagactacccttttctccatagacgtgaccatcaaccaaccagcggtcagaatcagtcagcctctgtcatgttcctaggtccttggcgaactggctgggcggggtcccagcagcctaggagtacagtggagcaatgcctgacgtaagtcaacaaagatcacgtgagacgaatcagtcgcctagattggctacaactaagtggttgggagcggggaggtcgcggcggctgcgtggggttcgcccgtgacacaattacaactttgtgctggtgctggcaaagtttgtgattttaagaaattctgctgtgctctccagcactgcgagcttctgccttccctgtagtttcccagatgtgatccaggtagccgagttccgctgcccgtgcttcggtagcttaagtctttgcctcagcttttttccttgcagccgctgaggaggcgataaaattggcgtcacagtctcaagcagcgattgaaggcgtcttttcaactactcgattaaggttgggtatcgtcgtgggacttggaaatttgttgtttccatgaaatcctgcgcagtgtcgctcactaccgccgctgttgccttcggtgatgaggcaaagaaaatggcggaaggaaaagcgagccgcgagagtgaagaggagtctgttagcctgacagtcgaggaaagggaggcgcttggtggcatggacagccgtctcttcgggttcgtgaggcttcatgaagatggcgccagaacgaagaccctactaggcaaggctgttcgctgctacgaatctttaatcttaaaagctgaaggaaaagtggagtctgacttcttttgccaattaggtcacttcaacctcttgttggaagattattcaaaagcattatctgcatatcagagatattacagtttacaggctgactactggaagaatgctgcgtttttatatggccttggtttggtctacttctactacaatgcatttcattgggcaattaaagcatttcaagatgtcctttatgttgaccccagcttttgtcgagccaaggaaattcatttacgacttgggctcatgttcaaagtgaacacagactacaagtctagtttaaagcattttcagttagccttgattgactgtaatccatgtactttgtccaatgctgaaattcaatttcatattgcccatttgtatgaaacccagaggaagtatcattctgcaaaggaggcatatgaacaacttttgcagacagaaaaccttcctgcacaagtaaaagcaactgtattgcaacagttaggttggatgcatcataatatggatctagtaggagacaaagccacaaaggaaagctatgctattcagtatctccaaaagtctttggaggcagatcctaattctggccaatcgtggtattttcttggaaggtgttattcaagtattgggaaagttcaggatgcctttatatcttacaggcaatctattgataaatcagaagcaagtgcagatacatggtgttcaataggtgtgttgtatcagcagcaaaatcagcctatggatgctttacaggcatatatttgtgctgtacaattggaccatgggcatgccgcagcctggatggacctaggtactctctatgaatcctgcaatcaacctcaagatgccattaaatgctacctaaatgcagctagaagcaaacgttgtagtaatacctctacgcttgctgcaagaattaaatttctacagaatggttctgataactggaatggtggccagagtctttcacatcatccagtacagcaagtttattcgttgtgtttgacaccacagaaattacagcacttggaacaactgcgagcaaatagagataatttaaatccagcacagaagcatcagctggaacagttagaaagtcagtttgtcttaatgcagcaaatgagacacaaagaagttgctcaggtacgaactactggaattcataacggggccataactgattcatcactgcctacaaactctgtctctaatcgacaaccacatggtgctctgaccagagtatctagcgtctctcagcctggagttcgccctgcttgtgttgaaaaacttttgtccagtggagctttttctgcaggctgtattccttgtggcacatcaaaaattctaggaagtacagacactatcttgctaggcagtaattgtatagcaggaagtgaaagtaatggaaatgtgccttacctgcagcaaaatacacacactctacctcataatcatacagacctgaacagcagcacagaagagccatggagaaaacagctatctaactccgctcaggggcttcataaaagtcagagttcatgtttgtcaggacctaatgaagaacaacctctgttttccactgggtcagcccagtatcaccaggcaactagcactggtattaagaaggcgaatgaacatctcactctgcctagtaattcagtaccacagggggatgctgacagtcacctctcctgtcatactgctacctcaggtggacaacaaggcattatgtttaccaaagagagcaagccttcaaaaaatagatccttggtgcctgaaacaagcaggcatactggagacacatctaatggctgtgctgatgtcaagggactttctaatcatgttcatcagttgatagcagatgctgtttccagtcctaaccatggagattcaccaaatttattaattgcagacaatcctcagctctctgctttgttgattggaaaagccaatggcaatgtgggtactggaacctgtgacaaagtgaataatattcacccagctgttcatacaaagactgatcattctgttgcctcttcaccctcttcagccatttccacagcaacaccttctcctaaatccactgagcagagaagcataaacagtgttaccagccttaacagtcctcacagtggattacacacagtcaatggagaggggctggggaagtcacagagctctacaaaagtagacctgcctttagctagccacagatctacttctcagatcttaccatcaatgtcagtgtctatatgccccagttcaacagaagttctgaaagcatgcaggaatccaggtaaaaatggcttgtctaatagctgcattttgttagataaatgtccacctccaagaccaccaacttcaccatacccacccttgccaaaggacaagttgaatccacccacacctagtatttacttggaaaataaacgtgatgctttctttcctccattacatcaattttgtacaaatccaaaaaaccctgttacagtaatacgtggccttgctggagctcttaaattagatcttggacttttctctaccaaaactttggtagaagctaacaatgaacatatggtagaagtgaggacacagttgctgcaaccagcagatgaaaactgggatcccactggaacaaagaaaatctggcgttgtgaaagcaatagatctcatactacaattgccaaatacgcacaataccaggcttcctccttccaggaatcattgagagctggaatgcaatggtgtgatctcagctcactgcagcctccgcctcctgggttcaagcgattctcccacctcagcctcccgaatagctggaattacaggcacctgccatcatgcccaactaatttttgtatttttgtagagacagggtttcaccatgttggccaggcttgtcttgaactcctgacctcaggtggtctgcttgcctcagcatcccaaagtgctgggattacaggtgtgagccaccatgcccggtaaacttttaaaaatgtaagcaaaattacagtatgtaaaacacacattgctaatggagaaataaagttcctactttacatcta

SEQ ID NO: 256488 - DNA, 1539 bp, Artificial Sequence
  derived and/or modified sequence
gcgtggggttcgcccgtgacacaattacaactttgtgctggtgctggcaaagtttgtgattttaagaaattctgctgtgctctccagcactgcgagcttctgccttccctgtagtttcccagatgtgatccaggtagccgagttccgctgcccgtgcttcggtagcttaagtctttgcctcagcttttttccttgcagccgctgaggaggcgataaaattggcgtcacagtctcaagcagcgattgaaggcgtcttttcaactactcgattaaggttgggtatcgtcgtgggacttggaaatttgttgtttccatgaaatcctgcgcagtgtcgctcactaccgccgctgttgccttcggtgatgaggcaaagaaaatggcggaaggaaaagcgagccgcgagagtgaagaggagtctgttagcctgacagtcgaggaaagggaggcgcttggtggcatggacagccgtctcttcgggttcgtgaggcttcatgaagatggcgccagaacgaagaccctactaggcaaggctgttcgctgctacgaatctttaatcttaaaagctgaaggaaaagtggagtctgacttcttttgccaattaggtcacttcaacctcttgttggaagattattcaaaagcattatctgcatatcagagatattacagtttacaggctgactactggaagaatgctgcgtttttatatggccttggtttggtctacttctactacaatgcatttcattgggcaattaaagcatttcaagatgtcctttatgttgaccccagcttttgtcgagccaaggaaattcatttacgacttgggctcatgttcaaagtgaacacagactacaagtctagtttaaagcattttcagttagccttgattgactgtaatccatgtactttgtccaatgctgaaagtaagtatttttaaatgaaatacttttgagtaaagaatattaatgatacctttttttctactgatacctttgtttctgttcattcttgagaagagaagtgagaaggcatgtgcctgattcagagagtttaaatcactggagttgagttgatttgggtactatttttcttgctcaaagacagtcagtattattatttgataactgtagaaatgattggtatgtcacagagcactaacaaatagtgattacctactttagtagtttttctccctttatggtgtctatgttttcatattaatgaattacttcaccttttaatattttaggatttgcacataccgtaagcttgactattttttgaaacttttttgtgtacttggtgatgttgcaaaaatcaaaagttttcaaagccaattttaaacaaaacctgaataagttaaaaatgtgtagtttaaaaaataaatactgttttttgaactctttcagatgaatgactacagttaatattttgggaaaaaaacatgtttaaaaagaatatgaaactttaaattatgtgattttcctttgtgataaaaatgttagaatattaaagaccttttatgtcaattttttacct

SEQ ID NO: 256489 - DNA, 3214 bp, Artificial Sequence
  derived and/or modified sequence
gtttccatgaaatcctgcgcagtgtcgctcactaccgccgctgttgccttcggtgatgaggcaaagaaaatggcggaaggaaaagcgagccgcgagagtgaagaggagtctgttagcctgacagtcgaggaaagggaggcgcttggtggcatggacagccgtctcttcgggttcgtgaggcttcatgaagatggcgccagaacgaagaccctactaggcaaggctgttcgctgctacgaatctttaatcttaaaagctgaaggaaaagtggagtctgacttcttttgccaattaggtcacttcaacctcttgttggaagattattcaaaagcattatctgcatatcagagatattacagtttacaggctgactactggaagaatgctgcgtttttatatggccttggtttggtctacttctactacaatgcatttcattgggcaattaaagcatttcaagatgtcctttatgttgaccccagcttttgtcgagccaaggaaattcatttacgacttgggctcatgttcaaagtgaacacagactacaagtctagtttaaagcattttcagttagccttgattgactgtaatccatgtactttgtccaatgctgaaattcaatttcatattgcccatttgtatgaaacccagaggaagtatcattctgcaaaggaggcatatgaacaacttttgcagacagaaaaccttcctgcacaagtaaaagcaactgtattgcaacagttaggttggatgcatcataatatggatctagtaggagacaaagccacaaaggaaagctatgctattcagtatctccaaaagtctttggaggcagatcctaattctggccaatcgtggtattttcttggaagtgtgttgtatcagcagcaaaatcagcctatggatgctttacaggcatatatttgtgctgtacaattggaccatgggcatgccgcagcctggatggacctaggtactctctatgaatcctgcaatcaacctcaagatgccattaaatgctacctaaatgcagctagaagcaaacgttgtagtaatacctctacgcttgctgcaagaattaaatttctacagaatggttctgataactggaatggtggccagagtctttcacatcatccagtacagcaagtttattcgttgtgtttgacaccacagaaattacagcacttggaacaactgcgagcaaatagagataatttaaatccagcacagaagcatcagctggaacagttagaaagtcagtttgtcttaatgcagcaaatgagacacaaagaagttgctcaggtacgaactactggaattcataacggggccataactgattcatcactgcctacaaactctgtctctaatcgacaaccacatggtgctctgaccagagtatctagcgtctctcagcctggagttcgccctgcttgtgttgaaaaacttttgtccagtggagctttttctgcaggctgtattccttgtggcacatcaaaaattctaggaagtacagacactatcttgctaggcagtaattgtatagcaggaagtgaaagtaatggaaatgtgccttacctgcagcaaaatacacacactctacctcataatcatacagacctgaacagcagcacagaagagccatggagaaaacagctatctaactccgctcaggggcttcataaaagtcagagttcatgtttgtcaggacctaatgaagaacaacctctgttttccactgggtcagcccagtatcaccaggcaactagcactggtattaagaaggcgaatgaacatctcactctgcctagtaattcagtaccacagggggatgctgacagtcacctctcctgtcatactgctacctcaggtggacaacaaggcattatgtttaccaaagagagcaagccttcaaaaaatagatccttggtgcctgaaacaagcaggcatactggagacacatctaatggctgtgctgatgtcaagggactttctaatcatgttcatcagttgatagcagatgctgtttccagtcctaaccatggagattcaccaaatttattaattgcagacaatcctcagctctctgctttgttgattggaaaagccaatggcaatgtgggtactggaacctgtgacaaagtgaataatattcacccagctgttcatacaaagactgatcattctgttgcctcttcaccctcttcagccatttccacagcaacaccttctcctaaatccactgagcagagaagcataaacagtgttaccagccttaacagtcctcacagtggattacacacagtcaatggagaggggctggggaagtcacagagctctacaaaagtagacctgcctttagctagccacagatctacttctcagatcttaccatcaatgtcagtgtctatatgccccagttcaacagaagttctgaaagcatgcaggaatccaggtaaaaatggcttgtctaatagctgcattttgttagataaatgtccacctccaagaccaccaacttcaccatacccacccttgccaaaggacaagttgaatccacccacacctagtatttacttggaaaataaacgtgatgctttctttcctccattacatcaattttgtacaaatccaaaaaaccctgttacagtaatacgtggccttgctggagctcttaaattagatcttggacttttctctaccaaaactttggtagaagctaacaatgaacatatggtagaagtgaggacacagttgctgcaaccagcagatgaaaactgggatcccactggaacaaagaaaatctggcgttgtgaaagcaatagatctcatactacaattgccaaatacgcacaataccaggcttcctccttccaggaatcattgagagctggaatgcaatggtgtgatctcagctcactgcagcctccgcctcctgggttcaagcgattctcccacctcagcctcccgaatagctggaattacaggcacctgccatcatgcccaactaatttttgtatttttgtagagacagggtttcaccatgttggccaggcttgtcttgaactcctgacctcaggtggtctgcttgcctcagcatcccaaagtgctgggattacaggtgtgagccaccatgcccggtaaacttttaaaaatgtaagcaaaattacagtatgtaaaacacacattgctaatggagaaataaagttcc

SEQ ID NO: 256490 - protein, 392 aa, Artificial Sequence [sequence omitted]

SEQ ID NO: 256491 - protein, 418 aa, Artificial Sequence
  derived and/or modified sequence
MAMASPAIGQRPYPLLLDPEPPRYLQSLSGPELPPPPPDRSSRLCVPAPLSTAPGAREGRSARRAARGNLEPPPRASRPARPLRPGLQQRLRRRPGAPRPRDVRSIFEQPQDPRVPAERGEGHCFAELVLPGGPGWCDLCGREVLRQALRCTNCKFTCHPECRSLIQLDCSQQEGLSRDRPSPESTLTVTFSQNVCKPVEETQRPPTLQEIKQKIDSYNTREKNCLGMKLSEDGTYTGFIKVHLKLRRPVTVPAGIRPQSIYDAIKEVNLAATTDKRTSFYLPLDAIKQLHISSTTTVSEVIQGLLKKFMVVDNPQKFALFKRIHKDGQVLFQKLSIADRPLYLRLLAGPDTEVLSFVLKENETGEVEWDAFSIPELQNFLTILEKEEQDKIQQVQKKYDKFRQKLEEALRESQGKPG

SEQ ID NO: 256492 - protein, 393 aa, Artificial Sequence
  derived and/or modified sequence
MAMASPAIGQRPYPLLLDPEPPRYLQSLSGPELPPPPPDRSSRLCVPAPLSTAPGAREGRSARRAARGNLEPPPRASRPARPLRPGLQQRLRRRPGAPRPRDVRSIFEQPQDPRVPAERGEGHCFAELVLPGGPGWCDLCGREVLRQALRCTNCKFTCHPECRSLIQLDCSQQEGLSRDRPSPESTLTVTFSQNVCKPVEETQRPPTLQEIKQKIDSYNTREKNCLGMKLSEDGTYTGFIKVHLKLRRPVTVPAGIRPQSIYDAIKEVNLAATTDKRTSFYLPLDAIKQLHISSTTTVSEVIQGLLKKFMVVDNPQKFALFKRIHKDGQVLFQKLSIADRPLYLRLLAGPDTEVLSFVLKENETGEVEWDAFSIPELQNFFLSSWCIQIYLYY

SEQ ID NO: 256493 - DNA, 1179 bp, Artificial Sequence
  derived and/or modified sequence
atggccatggccagccccgccatcggccagagaccctaccccctgctgctggaccccgagccccccagatacctgcagagcctgagcggccccgagctgcccccccccccccccgacagaagcagcagactgtgcgtgcccgcccccctgagcaccgcccccggcgccagagagggcagaagcgccagaagagccgccagaggcaacctggagcccccccccagagccagcagacccgccagacccctgagacccggcctgcagcagagactgagaagaagacccggcgcccccagacccagagacgtgagaagcatcttcgagcagccccaggaccccagagtgcccgccgagagaggcgagggccactgcttcgccgagctggtgctgcccggcggccccggctggtgcgacctgtgcggcagagaggtgctgagacaggccctgagatgcaccaactgcaagttcacctgccaccccgagtgcagaagcctgatccagctggactgcagccagcaggagggcctgagcagagacagacccagccccgagagcaccctgaccgtgaccttcagccagaacgtgtgcaagcccgtggaggagacccagagaccccccaccctgcaggagatcaagcagaagatcgacagctacaacaccagagagaagaactgcctgggcatgaagctgagcgaggacggcacctacaccggcttcatcaaggtgcacctgaagctgagaagacccgtgaccgtgcccgccggcatcagaccccagagcatctacgacgccatcaaggaggtgaacctggccgccaccaccgacaagagaaccagcttctacctgcccctggacgccatcaagcagctgcacatcagcagcaccaccaccgtgagcgaggtgatccagggcctgctgaagaagttcatggtggtggacaacccccagaagttcgccctgttcaagagaatccacaaggacggccaggtgctgttccagaagctgagcatcgccgacagacccctgtacctgagactgctggccggccccgacaccgaggtgctgagcttcgtgctgaaggagaacgagaccggcgaggtggagtgggacgccttcagcatccccgagctgcagaacttcctgagcagctggtgcatccagatctacctgtactactag

SEQ ID NO: 256494 - DNA, 1257 bp, Artificial Sequence
  derived and/or modified sequence
atggccatggccagccccgccatcggccagagaccctaccccctgctgctggaccccgagccccccagatacctgcagagcctgagcggccccgagctgcccccccccccccccgacagaagcagcagactgtgcgtgcccgcccccctgagcaccgcccccggcgccagagagggcagaagcgccagaagagccgccagaggcaacctggagcccccccccagagccagcagacccgccagacccctgagacccggcctgcagcagagactgagaagaagacccggcgcccccagacccagagacgtgagaagcatcttcgagcagccccaggaccccagagtgcccgccgagagaggcgagggccactgcttcgccgagctggtgctgcccggcggccccggctggtgcgacctgtgcggcagagaggtgctgagacaggccctgagatgcaccaactgcaagttcacctgccaccccgagtgcagaagcctgatccagctggactgcagccagcaggagggcctgagcagagacagacccagccccgagagcaccctgaccgtgaccttcagccagaacgtgtgcaagcccgtggaggagacccagagaccccccaccctgcaggagatcaagcagaagatcgacagctacaacaccagagagaagaactgcctgggcatgaagctgagcgaggacggcacctacaccggcttcatcaaggtgcacctgaagctgagaagacccgtgaccgtgcccgccggcatcagaccccagagcatctacgacgccatcaaggaggtgaacctggccgccaccaccgacaagagaaccagcttctacctgcccctggacgccatcaagcagctgcacatcagcagcaccaccaccgtgagcgaggtgatccagggcctgctgaagaagttcatggtggtggacaacccccagaagttcgccctgttcaagagaatccacaaggacggccaggtgctgttccagaagctgagcatcgccgacagacccctgtacctgagactgctggccggccccgacaccgaggtgctgagcttcgtgctgaaggagaacgagaccggcgaggtggagtgggacgccttcagcatccccgagctgcagaacttcctgaccatcctggagaaggaggagcaggacaagatccagcaggtgcagaagaagtacgacaagttcagacagaagctggaggaggccctgagagagagccagggcaagcccggctag

SEQ ID NO: 256495 - DNA, 1182 bp, Artificial Sequence
  derived and/or modified sequence
atggccatggccagccccgccatcggccagagaccctaccccctgctgctggaccccgagccccccagatacctgcagagcctgagcggccccgagctgcccccccccccccccgacagaagcagcagactgtgcgtgcccgcccccctgagcaccgcccccggcgccagagagggcagaagcgccagaagagccgccagaggcaacctggagcccccccccagagccagcagacccgccagacccctgagacccggcctgcagcagagactgagaagaagacccggcgcccccagacccagagacgtgagaagcatcttcgagcagccccaggaccccagagtgcccgccgagagaggcgagggccactgcttcgccgagctggtgctgcccggcggccccggctggtgcgacctgtgcggcagagaggtgctgagacaggccctgagatgcaccaactgcaagttcacctgccaccccgagtgcagaagcctgatccagctggactgcagccagcaggagggcctgagcagagacagacccagccccgagagcaccctgaccgtgaccttcagccagaacgtgtgcaagcccgtggaggagacccagagaccccccaccctgcaggagatcaagcagaagatcgacagctacaacaccagagagaagaactgcctgggcatgaagctgagcgaggacggcacctacaccggcttcatcaaggtgcacctgaagctgagaagacccgtgaccgtgcccgccggcatcagaccccagagcatctacgacgccatcaaggaggtgaacctggccgccaccaccgacaagagaaccagcttctacctgcccctggacgccatcaagcagctgcacatcagcagcaccaccaccgtgagcgaggtgatccagggcctgctgaagaagttcatggtggtggacaacccccagaagttcgccctgttcaagagaatccacaaggacggccaggtgctgttccagaagctgagcatcgccgacagacccctgtacctgagactgctggccggccccgacaccgaggtgctgagcttcgtgctgaaggagaacgagaccggcgaggtggagtgggacgccttcagcatccccgagctgcagaacttcttcctgagcagctggtgcatccagatctacctgtactactag

SEQ ID NO: 256496 - DNA, 1179 bp, Artificial Sequence
  derived and/or modified sequence
atggcaatggcgtcaccagccattggccagcgtccatatccgctgctgctggatccagaaccgcctcgatacctgcagtctctttccgggccagagctacctcctccaccccctgaccgttcttcccggctctgcgtgcccgctccactgagcacagctccaggcgccagagaggggcggtctgcccggagggccgccaggggaaacctggagcccccaccaagagcttcccggccagcacggcctctccgaccggggctgcagcagcggctgcgaagaagacccggtgcccctcgacctagggatgtgaggtctatatttgagcagccacaagaccccagagtaccagccgaacgtggtgaagggcactgtttcgccgagctggttctccctgggggacccggatggtgtgacctgtgcggcagagaagtgctccgacaagctctgcggtgtaccaactgcaaattcacctgtcaccctgaatgcaggtctctaatccagctggactgttcgcagcaggaaggactgagcagggatcgcccgtcccccgaatccactttgacggtgacattttcccagaacgtctgtaagccagttgaggaaactcagagaccccccaccctgcaggaaataaaacagaagatcgactcgtataacaccagggagaagaactgtctgggaatgaaattaagcgaagatggaacatatactggttttatcaaagtgcacttaaagctgcgacgacccgttactgtgccggctggcattagaccacagtcaatctacgatgcaattaaagaagtgaatcttgccgctactaccgataagcgaacaagtttttacctcccactggatgcaattaaacaacttcacataagttccactacaactgtgagtgaggtgattcaagggctcttgaaaaaattcatggtggtcgataacccacagaagtttgccctctttaagcggatccataaagacggccaagtcctgttccagaaattgtctatcgccgatcgccccctttacctgcgcctgctggcaggtcccgatacagaggtcctgtcttttgtcttaaaggagaacgaaactggagaagtcgagtgggatgcattttcaatccccgagctgcagaatttcttgtctagctggtgcattcaaatttatctctattactag

SEQ ID NO: 256497 - DNA, 1257 bp, Artificial Sequence
  derived and/or modified sequence
atggcaatggcaagcccagcaatcggccagcgcccttatccactgctgctggaccctgagccacctcggtatttacagagtctgagtgggcctgaactgccgcccccccctcccgatcgaagctcacgcctgtgcgttccagcaccactgtcaaccgctcccggcgcacgtgagggcagatctgctcggagagcggcacgcggcaatttggaacctccacctcgcgcctcccgcccggcaaggccactgcgccccgggctgcagcagagattgaggcggagaccaggggcaccccgaccccgcgacgtacgttccatctttgagcagcctcaggacccgcgcgtccccgcagagcgcggagagggccattgtttcgcagagctcgtactaccgggcggacccggctggtgtgatctctgcggtagagaggtgctgagacaggccctcaggtgcacgaactgtaaatttacttgtcacccagaatgtcggagcctgattcaacttgattgttcccaacaggagggcctgagcagggaccggccttcccccgagagtactttgacagtcaccttctcccaaaatgtatgtaagcctgtggaggagacccagcggccacctacactgcaagaaatcaagcagaagatagacagttacaacacgcgcgagaagaattgcctcggtatgaaattgtcagaggacggaacctacaccggcttcattaaggtccatcttaagttgcgacgcccggtgacagtaccagccggcattcgaccccagagcatttatgatgcaatcaaggaggtgaatcttgctgccacaaccgacaaaaggacttccttctaccttcctctggacgctatcaagcagctgcatatctcctctaccacaacagtcagcgaggtgattcagggcttgcttaaaaaatttatggtagtggataacccccagaagttcgcactttttaagagaatccacaaggatggccaggtcctttttcaaaaattgtccatcgctgatcggcctctctacctgaggctgcttgctggccccgatacagaagtgctgtcttttgtcctgaaggagaatgagacgggagaggtggagtgggacgccttttctatcccagagttgcaaaattttttgacaatcctggagaaggaggagcaggacaagattcagcaagtgcagaaaaagtatgataagtttaggcagaagctggaagaggctctgagggaatcacaggggaagcctggatag

SEQ ID NO: 256498 - DNA, 1182 bp, Artificial Sequence
  derived and/or modified sequence
atggccatggcctctccggccattgggcagcggccttaccccctcttattagacccagaaccaccaaggtacctgcagtccttgtccggacctgagctgcctcccccaccacccgatcggtccagccggctgtgtgtgcccgctccactttccaccgccccgggggctcgtgaggggagatcagccaggcgcgccgcccgtggaaatctcgaacctcccccccgcgcatcaaggcctgctagaccactcagacctggcctgcagcagcgtctgcggcgccggcctggggcaccgcgcccaagggacgtgagaagcatcttcgagcagcctcaggaccctcgcgtaccggccgaaaggggagaggggcactgtttcgcagagctcgtgctgcctggcggaccaggttggtgtgacctgtgtggtagggaggtcctgagacaggcgctgaggtgtactaactgcaagttcacttgtcatcctgagtgtagaagcctgattcagcttgactgttcacagcaagagggtttgagccgagatcggccgtcgccggagtccacgctcaccgtcacgtttagtcaaaacgtttgcaagcctgtggaggagacccagcggcctccaacactgcaagagataaagcagaaaattgactcttacaacacaagagaaaaaaactgcttgggtatgaaactaagtgaagatggcacttacactggattcatcaaagtccacctcaagctccgccggccagtgaccgttcccgcaggaatcaggccacagtctatctatgatgccatcaaggaggttaatttggctgcaaccacggataaacggaccagtttctatctgccattagacgccattaaacagctgcatatcagctccactacaacagtgtctgaggtcatccagggattgctcaagaagttcatggttgtggacaatcctcagaaattcgccttgttcaaacgcattcacaaagacgggcaggttttgtttcagaaactgagcattgcagatcggcccctgtatctgaggctgctggccggccccgataccgaagtacttagctttgtcctgaaggaaaatgagactggcgaagtggaatgggacgctttctccatcccagagctgcagaactttttcttgtcaagctggtgcatccagatttacctgtactactag

SEQ ID NO: 256499 - DNA, 1179 bp, Artificial Sequence
  derived and/or modified sequence
atggccatggccagccctgccatcggccagaggccctaccccctgctgctggaccctgagcccccacgctacctgcagagcctgagcggccctgagctgcccccacctcctccagacaggagcagccggctgtgtgtgcctgcccccctgagcacagcccctggggcccgggagggccgcagcgccaggagagctgcccggggcaacctggagcccccaccccgggccagcaggcctgcccggcccctgcggcccggcctgcagcagaggctgcggcggcggcctggggccccccggcccagagatgtgcgcagcatctttgagcagccccaggacccccgggtgcctgctgagcggggggagggccactgctttgctgagctggtgctgcccggcggccctggctggtgtgacctgtgtggccgggaggtgctgcggcaggccctgcgctgcaccaactgcaagttcacctgccacccagaatgtcgcagcctcatccagctggactgcagccagcaggagggcctgagccgggaccggcccagccctgagagcaccctgactgtgaccttcagccagaatgtgtgcaagcctgtggaggagacccagaggcctcccaccctgcaggagatcaagcagaagattgacagctacaacacccgggagaagaactgcctgggcatgaagctgtctgaagatggcacctacacaggcttcatcaaggtgcacctgaagctgcggcggcctgtgacagtgcctgctggcatccggccccagagcatctatgatgccatcaaggaggtgaacctggccgccaccacagacaagaggaccagcttctacctgcccctggatgccatcaagcagctgcacatcagcagcaccaccaccgtgtctgaggtgatccagggcctgctgaagaagttcatggtggtggacaacccccagaagtttgccctcttcaagaggatccacaaggatggccaggtgctcttccagaagctgagcattgctgaccggcccctgtacctgcggctgctggccggccctgacacagaggtgctgagctttgtgctgaaggaaaatgagaccggggaggtggagtgggatgccttcagcatccctgagctgcagaacttcctgagctcctggtgcatccagatctacctgtactactag

SEQ ID NO: 256500 - DNA, 1257 bp, Artificial Sequence
  derived and/or modified sequence
atggccatggccagccctgccatcggccagaggccctaccccctgctgctggaccctgagcccccacgctacctgcagagcctgagcggccctgagctgcccccacctcctccagacaggagcagccggctgtgtgtgcctgcccccctgagcacagcccctggggcccgggagggccgcagcgccaggagagctgcccggggcaacctggagcccccaccccgggccagcaggcctgcccggcccctgcggcccggcctgcagcagaggctgcggcggcggcctggggccccccggcccagagatgtgcgcagcatctttgagcagccccaggacccccgggtgcctgctgagcggggggagggccactgctttgctgagctggtgctgcccggcggccctggctggtgtgacctgtgtggccgggaggtgctgcggcaggccctgcgctgcaccaactgcaagttcacctgccacccagaatgtcgcagcctcatccagctggactgcagccagcaggagggcctgagccgggaccggcccagccctgagagcaccctgactgtgaccttcagccagaatgtgtgcaagcctgtggaggagacccagaggcctcccaccctgcaggagatcaagcagaagattgacagctacaacacccgggagaagaactgcctgggcatgaagctgtctgaagatggcacctacacaggcttcatcaaggtgcacctgaagctgcggcggcctgtgacagtgcctgctggcatccggccccagagcatctatgatgccatcaaggaggtgaacctggccgccaccacagacaagaggaccagcttctacctgcccctggatgccatcaagcagctgcacatcagcagcaccaccaccgtgtctgaggtgatccagggcctgctgaagaagttcatggtggtggacaacccccagaagtttgccctcttcaagaggatccacaaggatggccaggtgctcttccagaagctgagcattgctgaccggcccctgtacctgcggctgctggccggccctgacacagaggtgctgagctttgtgctgaaggaaaatgagaccggggaggtggagtgggatgccttcagcatccctgagctgcagaacttcctgaccatcctggagaaggaggagcaggacaagatccagcaggtgcagaagaagtatgacaagttccggcagaagctggaggaggccctgcgggagagccagggcaagccaggatag

SEQ ID NO: 256501 - DNA, 1182 bp, Artificial Sequence
  derived and/or modified sequence
atggccatggccagccctgccatcggccagaggccctaccccctgctgctggaccctgagcccccacgctacctgcagagcctgagcggccctgagctgcccccacctcctccagacaggagcagccggctgtgtgtgcctgcccccctgagcacagcccctggggcccgggagggccgcagcgccaggagagctgcccggggcaacctggagcccccaccccgggccagcaggcctgcccggcccctgcggcccggcctgcagcagaggctgcggcggcggcctggggccccccggcccagagatgtgcgcagcatctttgagcagccccaggacccccgggtgcctgctgagcggggggagggccactgctttgctgagctggtgctgcccggcggccctggctggtgtgacctgtgtggccgggaggtgctgcggcaggccctgcgctgcaccaactgcaagttcacctgccacccagaatgtcgcagcctcatccagctggactgcagccagcaggagggcctgagccgggaccggcccagccctgagagcaccctgactgtgaccttcagccagaatgtgtgcaagcctgtggaggagacccagaggcctcccaccctgcaggagatcaagcagaagattgacagctacaacacccgggagaagaactgcctgggcatgaagctgtctgaagatggcacctacacaggcttcatcaaggtgcacctgaagctgcggcggcctgtgacagtgcctgctggcatccggccccagagcatctatgatgccatcaaggaggtgaacctggccgccaccacagacaagaggaccagcttctacctgcccctggatgccatcaagcagctgcacatcagcagcaccaccaccgtgtctgaggtgatccagggcctgctgaagaagttcatggtggtggacaacccccagaagtttgccctcttcaagaggatccacaaggatggccaggtgctcttccagaagctgagcattgctgaccggcccctgtacctgcggctgctggccggccctgacacagaggtgctgagctttgtgctgaaggaaaatgagaccggggaggtggagtgggatgccttcagcatccctgagctgcagaacttcttcctgagctcctggtgcatccagatctacctgtactactag

SEQ ID NO: 256502 - DNA, 1179 bp, Artificial Sequence
  derived and/or modified sequence
atggccatggccagccccgccatcggccagcggccctaccccctgttgctagacccagaacccccacgttatctgcagtcactgtctggtccagaactacccccacccccccctgatcggagctcaagactgtgcgtacccgctcctttgtctacagcccctggcgcccgtgagggtcgctcagctagacgagcagccaggggaaatttggaaccccctccaagagcctcccgacctgccagacctctccgccctggattgcagcagcgtctccggcgccgcccaggcgcccccaggccgcgggatgtacgctctatctttgagcagcctcaggatccgcgggtccccgctgaaaggggtgaggggcattgcttcgccgaactcgttctgcccgggggtccggggtggtgtgatctgtgtggacgggaggtgcttcggcaagccctcagatgtactaattgcaaatttacttgtcaccccgagtgccgctcccttatacagcttgactgtagccagcaggagggtttgagccgtgatcggccgtcacctgaatccactcttacagtgacatttagccagaacgtgtgtaagcccgtcgaagagactcagcgccctccaactttgcaggagattaagcaaaagatagactcttacaatactagagagaagaactgtcttgggatgaaactgtcagaggatgggacgtatacaggtttcattaaagttcacctaaaactgaggcgccctgtgacggtccctgctggcataagacctcagagtatatacgatgctatcaaggaggtaaatttggcggccactacagataaaagaaccagcttttacctgccccttgacgcgattaagcagctacacatatcgtccacaaccaccgtgagcgaggtaattcaggggttacttaagaagtttatggtcgtagataacccacagaaattcgccctctttaagcgcatccacaaggacggccaggtcctattccaaaagttatctatcgccgatcggcccctttatttacgactcttggccgggcctgacaccgaagtgctgtcatttgtccttaaagagaatgaaaccggcgaagtggagtgggatgcattttcaatccctgagctacagaacttcttgtcttcttggtgcatacaaatttacttgtattattag

SEQ ID NO: 256503 - DNA, 1257 bp, Artificial Sequence
  derived and/or modified sequence
atggccatggccagccccgccatcggccagcggccctaccccctgctgctagatccagagcctcctcgctacctgcagagcttaagtgggccggagctcccccccccaccgccagatcgcagttctcggctgtgtgtccccgctcctcttagtaccgcaccaggcgccagagagggacgtagcgctcgcagagcagcacgcggtaacctggagccacctcccagggcctccaggccagcacggccgctcaggccgggtttgcagcaaaggctacgcaggagaccaggagctcctagaccccgagatgtgagatctatcttcgagcaaccccaggatcctagggtgcctgccgagagaggagaaggccactgcttcgctgagctggtgctacctgggggaccagggtggtgcgatctatgcggacgcgaggtgttgagacaggccctgcgctgtaccaattgtaaatttacttgccacccagaatgtcgcagcctgatccagttggattgtagccagcaggaaggtctgtcacgcgatcgaccgagccctgaatctacattgacagtgactttttcccagaacgtttgtaagccagttgaggagacccaacgaccacccacgcttcaggagattaagcagaaaattgactcctataacacacgcgaaaagaactgcctcggtatgaaactgtcagaagacggcacatacaccggcttcattaaggtgcatcttaagctccgtcgccccgtcacagtgcctgccggcattcgaccacaatccatttatgacgccatcaaggaggtgaacctcgccgcaactactgataagcggaccagtttttatttacctctcgatgccattaagcaactccatataagtagtactacaaccgtcagtgaagtcattcagggactgttgaagaagttcatggttgtggataaccctcagaagtttgctctgtttaagcgaattcacaaggatggccaggtgttgttccagaaactcagtattgcagaccggcctctctatctcagactcctcgccggacctgataccgaagtgctgtcgtttgtgttaaaagaaaatgagaccggcgaggtggagtgggacgccttttcaatccctgaactgcagaacttcctgaccatcctcgagaaggaggagcaggataagatacagcaggtccagaagaaatatgacaaattccggcagaaacttgaggaagccctgcgagaatctcagggcaaacccgggtag

SEQ ID NO: 256504 - DNA, 1182 bp, Artificial Sequence
  derived and/or modified sequence
atggccatggccagccccgccatcggccagcggccctaccccctgttgctggatcctgagccacctcggtacttacagtcactcagtggtccagagctgcctccaccaccacccgatcgctcatcaaggttgtgtgtacccgcaccactcagcacggcaccaggcgcacgcgagggacgcagcgcccgtagagctgcgcggggcaatctggagcctcccccccgggctagtagaccagcacgccctctccgccctggactccagcagaggttgcgcaggagacctggcgctcccaggcccagagacgttcgctccatttttgaacagccccaagacccacgcgtgccagctgaaaggggggagggacattgcttcgcagaactcgtgctgccgggtgggcctggctggtgtgacttgtgtggtagagaggtgctacgccaggcccttcggtgtaccaactgcaagtttacgtgccaccccgaatgtcgcagcctcattcagctggactgttcccaacaagaaggactctctcgcgatcggccttcccccgaaagtaccctgacagtcacttttagccaaaatgtctgcaagccagtggaagagacccagaggccgccaactctgcaggaaattaagcaaaaaattgattcgtataatacccgcgagaaaaactgcttgggcatgaagctgtctgaggacggcacctatacaggattcattaaagtgcacttgaagttgagaaggcctgttaccgtgcccgcgggtattagacctcagtcaatctatgacgccataaaggaggtcaacctggctgccaccacagataaacgcaccagcttttacctgccattagacgccatcaagcagcttcacatctcctctacaaccacagtatccgaggtgattcaagggctgctgaaaaagtttatggttgttgataaccctcagaagttcgccctattcaaacgaatccacaaggacggccaggttctttttcagaagctaagcattgcggatagacctctctacctcagactgttagccgggccagacactgaggttctctccttcgtgctcaaagagaatgagactggggaagtggagtgggatgccttctctatcccagaactgcaaaattttttcctctcttcttggtgtatacagatatatctgtattactag

SEQ ID NO: 256505 - DNA, 1179 bp, Artificial Sequence
  derived and/or modified sequence
atggctatggcatccccggcaattggccagcggccataccccctcctgctagacccagaacctcctaggtatcttcagtccttatccggcccagaactgccccctccaccacccgaccgaagctctcggctatgcgtccccgctcccctgagtacggcccctggagcccgagagggcagaagcgcgaggcgtgcagcccgaggcaacctggagcctcctccgagagcaagccgacccgctaggccattgcgccctggactgcagcagcgactgagacgtcgcccaggcgcacctagaccaagggatgtgcgaagcatttttgaacagccacaggacccgagagtgcccgcagagagaggggaggggcactgttttgccgagttggtcctgcctggaggacccggttggtgcgacttgtgcggaagagaagtcttaaggcaggctctgcggtgtactaactgtaagtttacttgccatcctgagtgccggtctctgatccagttggactgttcccagcaggaggggctgagtagagacaggccatcacctgagtctactctaacagttacctttagccagaatgtatgcaagcccgtggaggaaacacagcggcctccaaccctgcaggagatcaagcaaaagattgactcgtataacactagagagaagaattgcctcgggatgaagctcagcgaggatggaacctacactgggttcatcaaggtgcatctgaaactgagaaggcctgtgaccgtaccggctgggattaggcctcaatccatttacgacgcgatcaaggaggtcaacctggccgcaacgacagacaagcgcacatcattctacctgccacttgacgcaatcaagcaactgcatatatcctcaaccaccactgtgagcgaagtcatccaaggtctactcaaaaaattcatggttgtggataatcctcagaaatttgctctttttaaaagaatccacaaggacggacaggtgctattccagaagctgtccatcgcggatcggccactgtacttacgtctcttggcaggcccagacacagaggttctgtcattcgtactaaaggagaatgaaacgggagaggtcgaatgggacgccttttccatacccgagctacagaactttctgtctagttggtgtatacagatctatctgtactactag

SEQ ID NO: 256506 - DNA, 1257 bp, Artificial Sequence
  derived and/or modified sequence
atggccatggcttctcctgctatcggtcagcgaccctaccctctactcctggaccccgaaccaccccgttatctacagagcctgtctggccctgagttgccccctcctcctcccgatcgcagttctagactctgcgttcccgcacctttatcaacggccccaggagcccgtgagggacggtccgcccgtcgcgcagcccgtggaaatctggagcctcccccaagggcaagtaggcccgcacggcctcttaggcccggtcttcagcagaggttaaggcgaaggcccggtgcccctaggcctcgcgatgttcgctctatattcgagcaacctcaggaccctcgggtgcctgccgagaggggcgagggacactgcttcgcagagctggtgctgcctggtggcccaggctggtgtgatctgtgcggaagagaggtgctgcgccaggcgctgagatgcactaactgtaaatttacctgtcaccccgaatgtcggtccctgatccagcttgattgcagccagcaggaggggctgagtcgggaccggccttcccctgaaagcaccttgacagttaccttcagtcaaaacgtttgtaagcccgtagaagaaacccagcgtcctcctacactacaggaaattaagcagaagatcgattcttacaacacaagggaaaaaaactgcctgggaatgaagctgtcagaagatggaacgtacaccggttttattaaagtccatctcaagctgcgcagaccagtcaccgtcccagccggtatccggccacaaagtatctatgatgctatcaaagaagtgaacctcgccgctactactgacaaaaggacctctttttatctgcccctcgatgcaatcaaacagttgcacatatcaagcacaaccacagtgagcgaagtcatccagggcctgctcaagaaattcatggtggtggataacccacagaagttcgccctgtttaaacgaatccacaaggacggccaagtgctcttccaaaaactgtctattgctgaccggcctctgtacttgcggcttctcgcagggcctgacaccgaggtgctgagcttcgttctgaaagaaaacgaaactggggaggtcgagtgggatgctttcagtatccccgagctccaaaacttcctgactatactggagaaagaagaacaagacaagattcagcaggtgcagaaaaagtatgacaaatttcgtcagaaattggaggaagcgctcagggagtctcagggaaagccaggctag

SEQ ID NO: 256507 - DNA, 1182 bp, Artificial Sequence
  derived and/or modified sequence
atggcaatggcttctcctgcaatagggcagcgcccttatcctctgcttctcgaccctgaaccgcctcgctacctccagtctctgagtggcccagagttgccccctccaccccctgatcgctctagtaggttgtgtgtgcctgctcctcttagtacagccccaggagcaagagagggaaggtccgcgaggagagctgctaggggcaacctcgaacccccaccaagagcttctcgccctgccagacctttaagacctggactccagcagaggctccggaggcgcccaggcgctccgaggccacgggatgtacggtccattttcgagcagccccaggatcctagagtccctgctgagcgtggggagggacattgctttgccgagctggtgcttcccggagggccagggtggtgcgatctgtgtggacgcgaggtgttaaggcaggcactgcgctgcactaattgtaagttcacctgccatcccgaatgccgcagcctcatacagctggactgtagccagcaagagggactgtcacgggacaggccgtcaccagagagtacgctcacagttaccttttcacagaacgtctgtaagccagtggaagaaacccaaaggccacctaccttgcaagagattaaacagaaaatcgactcttacaatacacgggagaagaactgcctagggatgaaactctctgaggacggcacctacactggttttatcaaggtgcatttgaaacttaggagacctgtgacagtgcctgccggaattcgcccacagagtatttacgacgctataaaagaggtcaacctcgcagcaaccaccgataagaggacctcattttacctaccactggatgctatcaagcaactgcacattagttccaccacaacagtgagcgaagtgatacaggggttacttaagaagttcatggtcgtggacaatcctcagaagttcgctctattcaaacggatccataaagacggacaggtcctgtttcagaagctcagcatcgccgatcgtccgctttaccttcgtcttctagccggacccgataccgaagtgttaagttttgtcctaaaagaaaacgagacaggcgaggtcgagtgggacgctttctccatccctgagctgcagaatttctttctgagctcatggtgtatccagatctacctgtactattag

SEQ ID NO: 256508 - DNA, 3481 bp, Artificial Sequence
  derived and/or modified sequence
cgggagtagcgcagtcgccaaagccgccgctgccaaagctgccgccactagccgggcatggccatggcgtccccggccatcgggcagcgcccgtacccgctactattggaccccgagccgccgcgctatctacagagcctgagcggccccgagctaccgccgccgccccccgaccggtcctcgcgcctctgtgtcccggcgcccctctccactgcgcccggggcgcgcgaggggcgcagcgcccggagggctgcccgggggaacctggagcccccgccccgggcctcccgacccgctcgcccgctccggcctggtctgcagcagagactgcggcggcggcctggagcgccccgaccccgcgacgtgcggagcatcttcgagcagccgcaggatcccagagtcccggcggagcgaggcgaggggcactgcttcgccgagttggtgctgccgggcggccccggctggtgtgacctgtgcggacgagaggtgctgcggcaggcgctgcgctgcactaactgtaaattcacctgtcacccagaatgccgcagcctgatccagttggactgcagtcagcaggagggtttatcccgggacagaccctctccagaaagcaccctcaccgtgaccttcagccagaatgtctgtaaacctgtggaggagacacagcgcccgcccacactgcaggagatcaagcagaagatcgacagctacaacacgcgagagaagaactgcctgggcatgaaactgagtgaagacggcacctacacgggtttcatcaaagtgcatctgaaactccggcggcctgtgacggtgcctgctgggatccggccccagtccatctatgatgccatcaaggaggtgaacctggcggctaccacggacaagcggacatccttctacctgcccctagatgccatcaagcagctgcacatcagcagcaccaccaccgtcagtgaggtcatccaggggctgctcaagaagttcatggttgtggacaatccccagaagtttgcactttttaagcggatacacaaggacggacaagtgctcttccagaaactctccattgctgaccgccccctctacctgcgcctgcttgctgggcctgacacggaggtcctcagctttgtgctaaaggagaatgaaactggagaggtagagtgggatgccttctccatccctgaacttcagaacttcctctcctcctggtgcattcagatttatttgtattattaattattattttgcaacagacactttttctcaggacatctctggcaggtgcatttgtgcctgcccagcagttccagctgtggcaaaagtctcttccatggacaagtgtttgcatgggggttcagctgtgcccgcccccaggctgtgccccaccacagattctgccaaggatcagaactcatgtgaaacaaacagctgacgtcctctctcgatctgcaagcctttcaccaaccaaatagttgcctctctcgtcaccaaactggaacctcacaccagccggcaaaggaaggaagaaaggttttagagctgtgtgttctttctctggctttgattcttctttgagttctcttacttgccacgtacaggaccattatttatgagtgaaaagttgtagcacattccttttgcaggtctgagctaagcccctgaaagcagggtaatgctcataaaaggactgttcccgcggccccaaggtgcctgttgttcacacttaagggaagtttataaagctactggccccagatgctcagggtaaggagcaccaaagctgaggctggctcagagatctccagagaagctgcagcctgccctggccctggctctggccctggcccacattgcacatggaaacccaaaggcatatatctgcgtatgtgtggtacttagtcacatctttgtcaacaaactgttcgtttttaagttacaaatttgaatttaatgttgtcatcatcgtcatgtgtttccccaaagggaagccagtcattgaccatttaaaaagtctcctgctaagtatggaaatcagacagtaagagaaagccaaaaagcaatgcagagaaaggtgtccaagctgtcttcagccttccccagctaaagagcagaggagggcctgggctacttgggttccccatcggcctccagcactgcctccctcctcccactgcgactctgggatctccaggtgctgcccaaggagttgccttgattacagagaggggagcctccaattcggccaacttggagtcctttctgttttgaagcatgggccagacccggcactgcgctcggagagccggtgggcctggcctccccgtcgacctcagtgcctttttgttttcagagagaaataggagtagggcgagtttgcctgaagctctgctgctggcttctcctgccaggaagtgaacaatggcggcggtgtgggagacaaggccaggagagcccgcgttcagtatgggttgagggtcacagacctccctcccatctgggtgcctgagttttgactccaatcagtgataccagaccacattgacagggaggatcaaattcctgacttacatttgcactggcttcttgtttaggctgaatcctaaaataaattagtcaaaaaattccaacaagtagccaggactgcagagacactccagtgcagagggagaaggacttgtaattttcaaagcagggctggttttccaacccagcctctgagaaaccatttctttgctatcctctgccttcccaagtccctcttgggtcggttcaagcccaagcttgttcgtgtagcttcagaagttccctctctgacccaggctgagtccatactgcccctgatcccagaaggaatgctgacccctcgtcgtatgaactgtgcatagtctccagagcttcaaaggcaacacaagctcgcaactctaagatttttttaaaccacaaaaaccctggttagccatctcatgctcagccttatcacttccctccctttagaaactctctccctgctgtatattaaagggagcaggtggagagtcattttccttcgtcctgcatgtctctaacattaatagaaggcatggctcctgctgcaaccgctgtgaatgctgctgagaacctccctctatggggatggctattttatttttgagaaggaaaaaaaaagtcatgtatatatacacataaaggcatatagctatatataaagagataagggtgtttatgaaatgagaaaattattggacaattcagactttactaaagcacagttagacccaaggcctatgctgaggtctaaacctctgaaaaaagtatagtatcgagtacccgttccctcccagaggtgggagtaactgctggtagtgccttctttggttgtgttgctcagtgtgtaagtgtttgtttccaggatattttctttttaaatgtctttcttatatgggttttaaaaaaaagtaataaaagcctgttgcaaaaatga

SEQ ID NO: 256509 - DNA, 2048 bp, Artificial Sequence
  derived and/or modified sequence
cgggagtagcgcagtcgccaaagccgccgctgccaaagctgccgccactagccgggcatggccatggcgtccccggccatcgggcagcgcccgtacccgctactattggaccccgagccgccgcgctatctacagagcctgagcggccccgagctaccgccgccgccccccgaccggtcctcgcgcctctgtgtcccggcgcccctctccactgcgcccggggcgcgcgaggggcgcagcgcccggagggctgcccgggggaacctggagcccccgccccgggcctcccgacccgctcgcccgctccggcctggtctgcagcagagactgcggcggcggcctggagcgccccgaccccgcgacgtgcggagcatcttcgagcagccgcaggatcccagagtcccggcggagcgaggcgaggggcactgcttcgccgagttggtgctgccgggcggccccggctggtgtgacctgtgcggacgagaggtgctgcggcaggcgctgcgctgcactaactgtaaattcacctgtcacccagaatgccgcagcctgatccagttggactgcagtcagcaggagggtttatcccgggacagaccctctccagaaagcaccctcaccgtgaccttcagccagaatgtctgtaaacctgtggaggagacacagcgcccgcccacactgcaggagatcaagcagaagatcgacagctacaacacgcgagagaagaactgcctgggcatgaaactgagtgaagacggcacctacacgggtttcatcaaagtgcatctgaaactccggcggcctgtgacggtgcctgctgggatccggccccagtccatctatgatgccatcaaggaggtgaacctggcggctaccacggacaagcggacatccttctacctgcccctagatgccatcaagcagctgcacatcagcagcaccaccaccgtcagtgaggtcatccaggggctgctcaagaagttcatggttgtggacaatccccagaagtttgcactttttaagcggatacacaaggacggacaagtgctcttccagaaactctccattgctgaccgccccctctacctgcgcctgcttgctgggcctgacacggaggtcctcagctttgtgctaaaggagaatgaaactggagaggtagagtgggatgccttctccatccctgaacttcagaacttcctaacaatcctggaaaaagaggagcaggacaaaatccaacaagtgcaaaagaagtatgacaagtttaggcagaaactggaggaggccttaagagaatcccagggcaaacctgggtaaccggtcctgcttcctctcctcctggtgcattcagatttatttgtattattaattattattttgcaacagacactttttctcaggacatctctggcaggtgcatttgtgcctgcccagcagttccagctgtggcaaaagtctcttccatggacaagtgtttgcatgggggttcagctgtgcccgcccccaggctgtgccccaccacagattctgccaaggatcagaactcatgtgaaacaaacagctgacgtcctctctcgatctgcaagcctttcaccaaccaaatagttgcctctctcgtcaccaaactggaacctcacaccagccggcaaaggaaggaagaaaggttttagagctgtgtgttctttctctggctttgattcttctttgagttctcttacttgccacgtacaggaccattatttatgagtgaaaagttgtagcacattccttttgcaggtctgagctaagcccctgaaagcagggtaatgctcataaaaggactgttcccgcggccccaaggtgcctgttgttcacacttaagggaagtttataaagctactggccccagatgctcagggtaaggagcaccaaagctgaggctggctcagagatctccagagaagctgcagcctgccctggccctggctctggccctggcccacattgcacatggaaacccaaaggcatatatctgcgtatgtgtggtacttagtcacatctttgtcaacaaa

SEQ ID NO: 256510 - DNA, 1239 bp, Artificial Sequence
  derived and/or modified sequence
cgggagtagcgcagtcgccaaagccgccgctgccaaagctgccgccactagccgggcatggccatggcgtccccggccatcgggcagcgcccgtacccgctactattggaccccgagccgccgcgctatctacagagcctgagcggccccgagctaccgccgccgccccccgaccggtcctcgcgcctctgtgtcccggcgcccctctccactgcgcccggggcgcgcgaggggcgcagcgcccggagggctgcccgggggaacctggagcccccgccccgggcctcccgacccgctcgcccgctccggcctggtctgcagcagagactgcggcggcggcctggagcgccccgaccccgcgacgtgcggagcatcttcgagcagccgcaggatcccagagtcccggcggagcgaggcgaggggcactgcttcgccgagttggtgctgccgggcggccccggctggtgtgacctgtgcggacgagaggtgctgcggcaggcgctgcgctgcactaactgtaaattcacctgtcacccagaatgccgcagcctgatccagttggactgcagtcagcaggagggtttatcccgggacagaccctctccagaaagcaccctcaccgtgaccttcagccagaatgtctgtaaacctgtggaggagacacagcgcccgcccacactgcaggagatcaagcagaagatcgacagctacaacacgcgagagaagaactgcctgggcatgaaactgagtgaagacggcacctacacgggtttcatcaaagtgcatctgaaactccggcggcctgtgacggtgcctgctgggatccggccccagtccatctatgatgccatcaaggaggtgaacctggcggctaccacggacaagcggacatccttctacctgcccctagatgccatcaagcagctgcacatcagcagcaccaccaccgtcagtgaggtcatccaggggctgctcaagaagttcatggttgtggacaatccccagaagtttgcactttttaagcggatacacaaggacggacaagtgctcttccagaaactctccattgctgaccgccccctctacctgcgcctgcttgctgggcctgacacggaggtcctcagctttgtgctaaaggagaatgaaactggagaggtagagtgggatgccttctccatccctgaacttcagaacttcttcctctcctcctggtgcattcagatttatttgtattattaa

SEQ ID NO: 256511 - protein, 336 aa, Artificial Sequence
  derived and/or modified sequence
MAMASPAIGQRPYPLLLDPEPPRYLQSLSGPELPPPPPDRSSRLCVPAPLSTAPGAREGRSARRAARGNLEPPPRASRPARPLRPGLQQRLRRRPGAPRPRDVRSIFEQPQDPRVPAERGEGHCFAELVLPGGPGWCDLCGREVLRQALRCTNCKFTCHPECRSLIQLDCSQQEGLSRDRPSPESTLTVTFSQNVCKPVEETQRPPTLQEIKQKIDSYNTREKNCLGMKLSEDGTYTGFIKVHLKLRRPVTVPAGIRPQSIYDAIKEVNLAATTDKRTSFYLPLDAIKQLHISSTTTVSEVIQGLLKKFMVVDNPQKFALFKRIHKDGQVGCLLHP

SEQ ID NO: 256512 - DNA, 1011 bp, Artificial Sequence
  derived and/or modified sequence
atggccatggccagccccgccatcggccagagaccctaccccctgctgctggaccccgagccccccagatacctgcagagcctgagcggccccgagctgcccccccccccccccgacagaagcagcagactgtgcgtgcccgcccccctgagcaccgcccccggcgccagagagggcagaagcgccagaagagccgccagaggcaacctggagcccccccccagagccagcagacccgccagacccctgagacccggcctgcagcagagactgagaagaagacccggcgcccccagacccagagacgtgagaagcatcttcgagcagccccaggaccccagagtgcccgccgagagaggcgagggccactgcttcgccgagctggtgctgcccggcggccccggctggtgcgacctgtgcggcagagaggtgctgagacaggccctgagatgcaccaactgcaagttcacctgccaccccgagtgcagaagcctgatccagctggactgcagccagcaggagggcctgagcagagacagacccagccccgagagcaccctgaccgtgaccttcagccagaacgtgtgcaagcccgtggaggagacccagagaccccccaccctgcaggagatcaagcagaagatcgacagctacaacaccagagagaagaactgcctgggcatgaagctgagcgaggacggcacctacaccggcttcatcaaggtgcacctgaagctgagaagacccgtgaccgtgcccgccggcatcagaccccagagcatctacgacgccatcaaggaggtgaacctggccgccaccaccgacaagagaaccagcttctacctgcccctggacgccatcaagcagctgcacatcagcagcaccaccaccgtgagcgaggtgatccagggcctgctgaagaagttcatggtggtggacaacccccagaagttcgccctgttcaagagaatccacaaggacggccaggtgggctgcctgctgcacccctag

SEQ ID NO: 256513 - DNA, 1011 bp, Artificial Sequence
  derived and/or modified sequence
atggccatggcgagccccgccattgggcagcgcccataccccttgctgcttgaccctgagcctccaagatacttgcagagcctgagcggacctgagctgcctcccccccctcccgataggtcctcccgcctgtgtgtgcccgctcctttatctaccgcacctggggctcgagaagggaggtcagcgcggcgggctgcgcggggtaatcttgagcctccaccccgcgccagtcgccctgctcgcccccttaggccagggcttcagcagcggctgcgcaggcggccaggcgccccgagaccccgcgatgttcggagcatatttgaacagcctcaggatcctcgcgttcccgctgagaggggggaaggacattgttttgcggagctggtgctgcccgggggacccggctggtgtgatctttgcgggcgggaggtgctgcggcaggccctgcgatgtactaactgcaaattcacttgtcaccctgagtgtcgctcccttatccagctggattgctcccaacaagagggcctgagcagagaccggccctcccccgagtccactttgaccgtcacatttagtcagaacgtctgtaaaccagtggaagagacacagcggccgcccactctccaagaaattaagcagaagattgatagctacaatacgagggagaagaactgtctgggaatgaagctttccgaagatggaacctacactggattcatcaaagtccatctgaagttgaggcggccggttactgtgcccgccgggatccggcctcagtcaatctatgatgcaatcaaagaggtgaatctggcagccacaacagacaagagaaccagtttttacctcccgctggacgctatcaagcagctccacatttctagcacaaccaccgtatctgaggttatccagggcctcttgaaaaagttcatggttgtggataacccgcagaaatttgctctgttcaaaagaattcataaagatggccaggtgggttgcctgctgcacccgtag

SEQ ID NO: 256514 - DNA, 1011 bp, Artificial Sequence
  derived and/or modified sequence
atggccatggccagccctgccatcggccagaggccctaccccctgctgctggaccctgagcccccacgctacctgcagagcctgagcggccctgagctgcccccacctcctccagacaggagcagccggctgtgtgtgcctgcccccctgagcacagcccctggggcccgggagggccgcagcgccaggagagctgcccggggcaacctggagcccccaccccgggccagcaggcctgcccggcccctgcggcccggcctgcagcagaggctgcggcggcggcctggggccccccggcccagagatgtgcgcagcatctttgagcagccccaggacccccgggtgcctgctgagcggggggagggccactgctttgctgagctggtgctgcccggcggccctggctggtgtgacctgtgtggccgggaggtgctgcggcaggccctgcgctgcaccaactgcaagttcacctgccacccagaatgtcgcagcctcatccagctggactgcagccagcaggagggcctgagccgggaccggcccagccctgagagcaccctgactgtgaccttcagccagaatgtgtgcaagcctgtggaggagacccagaggcctcccaccctgcaggagatcaagcagaagattgacagctacaacacccgggagaagaactgcctgggcatgaagctgtctgaagatggcacctacacaggcttcatcaaggtgcacctgaagctgcggcggcctgtgacagtgcctgctggcatccggccccagagcatctatgatgccatcaaggaggtgaacctggccgccaccacagacaagaggaccagcttctacctgcccctggatgccatcaagcagctgcacatcagcagcaccaccaccgtgtctgaggtgatccagggcctgctgaagaagttcatggtggtggacaacccccagaagtttgccctcttcaagaggatccacaaggatggccaggtgggctgcctgctgcacccctag

SEQ ID NO: 256515 - DNA, 1011 bp, Artificial Sequence
  derived and/or modified sequence
atggccatggccagccccgccatcggccagcggccctaccccctgctgctggatcccgagcccccgcggtacctccagtccctttccgggccagaactccctccacctcctcccgacagatctagtagactgtgtgtgccggcaccgctgagcaccgctcccggcgcacgcgaaggacgatcagccagacgggcggctcggggaaacctcgagcctccccccagagcttcccgacccgcacggcccttgcgtcccggactccagcagagactgcgtagacgccccggagcccctcggccgcgggacgtgaggtccatattcgagcagccacaggatccccgagttcccgcagaacggggcgagggacactgtttcgctgagctggtgctaccaggcgggcccgggtggtgcgatctttgtggacgagaggtattgcgtcaggctttgcggtgtacaaattgcaagtttacctgtcaccccgaatgccgctccttaatccagctggactgcagccagcaagagggcctgagccgggaccggccaagtccagagagcacactgacagtcactttttcccagaacgtgtgcaagccagtagaggaaacccagcggcctccaaccctccaggaaatcaagcaaaagatagattcttacaatacccgcgagaagaactgccttggaatgaaattatccgaagacgggacgtatactgggttcatcaaggtgcacctcaaactgaggaggccagttacagtccctgccggtattagaccccagagcatctatgacgcgatcaaagaagttaacttggcggccaccactgacaaacgcactagtttttacctacctctggacgccataaaacagcttcacatttcatccaccactacagtcagcgaggtaatccagggtctgctgaaaaaattcatggttgttgataaccctcagaaattcgccctgtttaaacgtatccataaagacgggcaggtgggctgcctgctgcacccatag

SEQ ID NO: 256516 - DNA, 1011 bp, Artificial Sequence
  derived and/or modified sequence
atggccatggcatccccagcaatcggtcaacgcccttaccctctgttgttggacccagaacctccacgctacctccagtccctctctggtccagagttgccccctcccccaccagatagatcatcgaggctttgtgtgcccgctcctttatcaacagctcctggcgcaagagaggggagaagcgctcgaagagcggctagaggcaatcttgagcccccacccagagcctccaggcctgccagacccttaaggccaggcctccagcagaggctacgacggcgacccggtgcccctagaccaagagacgtcaggagtatttttgagcagccccaggatccacgcgtcccagccgagcgcggagagggccattgcttcgccgagctggtcctccccggaggacctgggtggtgcgatctctgcggacgggaagtcctgcgacaggccctgaggtgtactaactgcaagttcacctgccaccctgagtgcagaagtcttattcagctggactgctcacagcaggaaggcctgtcacgcgaccgtccctcacccgaatcaacccttactgtgacattctctcagaacgtctgtaagccggtggaggagacgcaacgccctcccacccttcaggagatcaaacagaaaattgatagctacaacacccgggagaaaaattgcctgggtatgaagctctccgaagacggcacttacactggcttcataaaagtccaccttaagcttcgacgccctgttactgtccccgctggtattcggccacagtcaatctatgacgcaataaaggaagtgaatctggccgctaccactgacaagcgaactagcttctatctacccctagatgcgattaagcagctgcacatatcctcaactactactgtctccgaggtgatccagggtttattaaaaaagtttatggtagtggacaatcctcaaaaatttgcactcttcaaacgcatccacaaggacggccaggtgggttgtctcttgcacccgtag

SEQ ID NO: 256517 - DNA, 1932 bp, Artificial Sequence
  derived and/or modified sequence
cgggagtagcgcagtcgccaaagccgccgctgccaaagctgccgccactagccgggcatggccatggcgtccccggccatcgggcagcgcccgtacccgctactattggaccccgagccgccgcgctatctacagagcctgagcggccccgagctaccgccgccgccccccgaccggtcctcgcgcctctgtgtcccggcgcccctctccactgcgcccggggcgcgcgaggggcgcagcgcccggagggctgcccgggggaacctggagcccccgccccgggcctcccgacccgctcgcccgctccggcctggtctgcagcagagactgcggcggcggcctggagcgccccgaccccgcgacgtgcggagcatcttcgagcagccgcaggatcccagagtcccggcggagcgaggcgaggggcactgcttcgccgagttggtgctgccgggcggccccggctggtgtgacctgtgcggacgagaggtgctgcggcaggcgctgcgctgcactaactgtaaattcacctgtcacccagaatgccgcagcctgatccagttggactgcagtcagcaggagggtttatcccgggacagaccctctccagaaagcaccctcaccgtgaccttcagccagaatgtctgtaaacctgtggaggagacacagcgcccgcccacactgcaggagatcaagcagaagatcgacagctacaacacgcgagagaagaactgcctgggcatgaaactgagtgaagacggcacctacacgggtttcatcaaagtgcatctgaaactccggcggcctgtgacggtgcctgctgggatccggccccagtccatctatgatgccatcaaggaggtgaacctggcggctaccacggacaagcggacatccttctacctgcccctagatgccatcaagcagctgcacatcagcagcaccaccaccgtcagtgaggtcatccaggggctgctcaagaagttcatggttgtggacaatccccagaagtttgcactttttaagcggatacacaaggacggacaagtgggatgccttctccatccctgaacttcagaacttcctaacaatcctggaaaaagaggagcaggacaaaatccaacaagtgcaaaagaagtatgacaagtttaggcagaaactggaggaggccttaagagaatcccagggcaaacctgggtaaccggtcctgcttcctctcctcctggtgcattcagatttatttgtattattaattattattttgcaacagacactttttctcaggacatctctggcaggtgcatttgtgcctgcccagcagttccagctgtggcaaaagtctcttccatggacaagtgtttgcatgggggttcagctgtgcccgcccccaggctgtgccccaccacagattctgccaaggatcagaactcatgtgaaacaaacagctgacgtcctctctcgatctgcaagcctttcaccaaccaaatagttgcctctctcgtcaccaaactggaacctcacaccagccggcaaaggaaggaagaaaggttttagagctgtgtgttctttctctggctttgattcttctttgagttctcttacttgccacgtacaggaccattatttatgagtgaaaagttgtagcacattccttttgcaggtctgagctaagcccctgaaagcagggtaatgctcataaaaggactgttcccgcggccccaaggtgcctgttgttcacacttaagggaagtttataaagctactggccccagatgctcagggtaaggagcaccaaagctgaggctggctcagagatctccagagaagctgcagcctgccctggccctggctctggccctggcccacattgcacatggaaacccaaaggcatatatctgcgtatgtgtggtacttagtcacatctttgtcaacaaa

SEQ ID NO: 256518 - protein, 265 aa, Artificial Sequence
  derived and/or modified sequence
MTVDSSMSSGYCSLDEELEDCFFTAKTTFFRNAQSKHLSKNVCKPVEETQRPPTLQEIKQKIDSYNTREKNCLGMKLSEDGTYTGFIKVHLKLRRPVTVPAGIRPQSIYDAIKEVNLAATTDKRTSFYLPLDAIKQLHISSTTTVSEVIQGLLKKFMVVDNPQKFALFKRIHKDGQVLFQKLSIADRPLYLRLLAGPDTEVLSFVLKENETGEVEWDAFSIPELQNFLTILEKEEQDKIQQVQKKYDKFRQKLEEALRESQGKPG

SEQ ID NO: 256519 - DNA, 798 bp, Artificial Sequence
  derived and/or modified sequence
atgaccgtggacagcagcatgagcagcggctactgcagcctggacgaggagctggaggactgcttcttcaccgccaagaccaccttcttcagaaacgcccagagcaagcacctgagcaagaacgtgtgcaagcccgtggaggagacccagagaccccccaccctgcaggagatcaagcagaagatcgacagctacaacaccagagagaagaactgcctgggcatgaagctgagcgaggacggcacctacaccggcttcatcaaggtgcacctgaagctgagaagacccgtgaccgtgcccgccggcatcagaccccagagcatctacgacgccatcaaggaggtgaacctggccgccaccaccgacaagagaaccagcttctacctgcccctggacgccatcaagcagctgcacatcagcagcaccaccaccgtgagcgaggtgatccagggcctgctgaagaagttcatggtggtggacaacccccagaagttcgccctgttcaagagaatccacaaggacggccaggtgctgttccagaagctgagcatcgccgacagacccctgtacctgagactgctggccggccccgacaccgaggtgctgagcttcgtgctgaaggagaacgagaccggcgaggtggagtgggacgccttcagcatccccgagctgcagaacttcctgaccatcctggagaaggaggagcaggacaagatccagcaggtgcagaagaagtacgacaagttcagacagaagctggaggaggccctgagagagagccagggcaagcccggctag

SEQ ID NO: 256520 - DNA, 798 bp, Artificial Sequence
  derived and/or modified sequence
atgacagtggactcctcgatgagcagtggatactgttcacttgacgaggagttggaggattgcttttttaccgccaaaactactttctttcgaaacgcacagtccaagcatctcagcaaaaacgtgtgtaagccagtggaggagacacagaggcccccaactttgcaggagatcaagcagaaaatcgactcatataacacgagggagaaaaactgtcttggcatgaaactgtctgaagatggaacatacaccgggttcatcaaggttcacctcaagctacggcggccagtgactgtccctgccggcatcaggccacagtccatatacgacgccattaaggaggtgaatcttgccgcaactacagataaacggacttcattctaccttccactggatgcaataaaacagctccacatttcctccacaacaaccgtcagcgaggtcatccaaggcttactgaaaaaatttatggtggtagataatccccagaagtttgccctgttcaaaaggatccataaggatgggcaggttctgttccaaaaacttagcatcgctgacagacctctatatcttcggctgcttgcaggccctgacacggaggtgctaagtttcgtcctcaaagagaatgagaccggcgaggtagaatgggacgccttttctatccccgaactgcagaattttctcacgattctcgaaaaagaggagcaagacaaaatccagcaagtgcagaagaagtacgacaagtttaggcagaagctggaggaggcattaagggagtcccaaggaaagccaggatag

SEQ ID NO: 256521 - DNA, 798 bp, Artificial Sequence
  derived and/or modified sequence
atgacagtggacagctccatgagcagcggctactgcagcctggatgaggagctggaggactgcttcttcaccgccaagaccaccttcttcagaaatgcccagagcaagcacctgagcaagaatgtgtgcaagcctgtggaggagacccagaggcctcccaccctgcaggagatcaagcagaagattgacagctacaacacccgggagaagaactgcctgggcatgaagctgtctgaagatggcacctacacaggcttcatcaaggtgcacctgaagctgcggcggcctgtgacagtgcctgctggcatccggccccagagcatctatgatgccatcaaggaggtgaacctggccgccaccacagacaagaggaccagcttctacctgcccctggatgccatcaagcagctgcacatcagcagcaccaccaccgtgtctgaggtgatccagggcctgctgaagaagttcatggtggtggacaacccccagaagtttgccctcttcaagaggatccacaaggatggccaggtgctcttccagaagctgagcattgctgaccggcccctgtacctgcggctgctggccggccctgacacagaggtgctgagctttgtgctgaaggaaaatgaaacaggagaggtggagtgggatgccttcagcatccctgagctgcagaacttcctgaccatcctggagaaggaggagcaggacaagatccagcaggtgcagaagaagtatgacaagttccggcagaagctggaggaggccctgcgggagagccagggcaagccaggatag

SEQ ID NO: 256522 - DNA, 798 bp, Artificial Sequence
  derived and/or modified sequence
atgaccgtggacagcagcatgagcagcggctactgcagcctggacgaagagctggaggattgtttctttacggcgaaaacaacttttttccgcaacgcgcaaagtaagcatttgtcaaagaacgtctgcaaacccgtggaggagacccagcgcccgcctactttgcaagagattaagcagaagattgattcttataatacaagagaaaagaattgcctcgggatgaagctcagcgaggatgggacctatacaggattcattaaggtccacctgaaactaagaagacctgttacggtgccggcaggcattagaccccagtctatttacgatgccattaaagaagtgaacctcgccgctaccactgataaaagaacttccttctatctccctctcgatgcaatcaaacaactccacatctcttcaacaactaccgtcagcgaagttatacaaggcttgttaaagaagtttatggttgtcgataaccctcagaagttcgctctgttcaaacggatccacaaagatggccaggtgctgttccaaaagctgagcattgccgacagacccctgtacctgagactgcttgcaggcccagacaccgaagtactgagtttcgttctaaaggagaacgaaacgggtgaagttgaatgggatgccttctctataccagaactgcaaaactttttaaccatattagaaaaagaggaacaggacaagatccagcaagttcagaagaagtacgacaaattccgtcagaaactcgaggaagctctgagggaaagtcaggggaagcccgggtag

SEQ ID NO: 256523 - DNA, 798 bp, Artificial Sequence
  derived and/or modified sequence
atgaccgttgacagctcgatgtcaagtggatactgttcactggatgaagagttggaggactgtttctttaccgccaagaccaccttctttaggaatgcccaatccaaacatcttagtaagaacgtgtgcaagcccgttgaagagacccagagaccccctacacttcaggagattaaacagaaaatcgacagttacaatacgcgagaaaaaaattgcctgggaatgaaactttcagaggacggcacctatacagggtttattaaggtgcacctcaagctacgaaggcccgtaacggtgcccgcaggcattcggcctcaaagcatatatgatgcaataaaagaggtcaatctagccgcaactaccgacaagcgtacctctttctacctcccacttgacgcaattaaacaactgcatatatcatcaaccacaacagtctccgaggtgatccagggtcttcttaaaaaatttatggtggttgataacccccagaaattcgccctctttaagcgaattcataaggatggccaagtgctgtttcagaagctttccatcgctgatagaccattatatttacgcctgctggccggaccagatactgaagtgctgtcatttgtcctgaaggagaacgaaactggggaggtggagtgggatgctttttcaatcccggagttgcagaatttcttaaccatcctcgagaaggaggaacaggacaaaatacagcaggtgcaaaaaaaatacgacaaattccgccagaagcttgaagaagctcttagggagtctcagggtaaaccaggctag

SEQ ID NO: 256524 - DNA, 3496 bp, Artificial Sequence
  derived and/or modified sequence
gaactgctttacgcgaggggcaggaaaggcgcgggaggcgggggaggtgcggagatggcgctctgcacggcggcggagggagggcgctggcgccggggacacgaaaccgcagagcccggacgagtcagggagtgaggcgcgagccgggcgcccggggctctgcaggcgcaggcggcgcggggacaggagcaggttaccgggccgcccgagcgctcgcaccccgctgaaagaaacgcaggcggcccgccggctctgcctggtccgctacccgaccagctcccggctcggggctcagagctaggggcttacgccaagcggagcccggggaggggtgcccacctccctccgccgcatcccaagcccggcccccttgatgcgctggcggcctcggccgggaactccggggtagatgaccgtggacagcagcatgagcagtgggtactgcagcctggacgaggaactggaagactgcttcttcactgctaagactacctttttcagaaatgcgcagagcaaacatctttcaaagaatgtctgtaaacctgtggaggagacacagcgcccgcccacactgcaggagatcaagcagaagatcgacagctacaacacgcgagagaagaactgcctgggcatgaaactgagtgaagacggcacctacacgggtttcatcaaagtgcatctgaaactccggcggcctgtgacggtgcctgctgggatccggccccagtccatctatgatgccatcaaggaggtgaacctggcggctaccacggacaagcggacatccttctacctgcccctagatgccatcaagcagctgcacatcagcagcaccaccaccgtcagtgaggtcatccaggggctgctcaagaagttcatggttgtggacaatccccagaagtttgcactttttaagcggatacacaaggacggacaagtgctcttccagaaactctccattgctgaccgccccctctacctgcgcctgcttgctgggcctgacacggaggtcctcagctttgtgctaaaggagaatgaaactggagaggtagagtgggatgccttctccatccctgaacttcagaacttcctaacaatcctggaaaaagaggagcaggacaaaatccaacaagtgcaaaagaagtatgacaagtttaggcagaaactggaggaggccttaagagaatcccagggcaaacctgggtaaccggtcctgcttcctctcctcctggtgcattcagatttatttgtattattaattattattttgcaacagacactttttctcaggacatctctggcaggtgcatttgtgcctgcccagcagttccagctgtggcaaaagtctcttccatggacaagtgtttgcatgggggttcagctgtgcccgcccccaggctgtgccccaccacagattctgccaaggatcagaactcatgtgaaacaaacagctgacgtcctctctcgatctgcaagcctttcaccaaccaaatagttgcctctctcgtcaccaaactggaacctcacaccagccggcaaaggaaggaagaaaggttttagagctgtgtgttctttctctggctttgattcttctttgagttctcttacttgccacgtacaggaccattatttatgagtgaaaagttgtagcacattccttttgcaggtctgagctaagcccctgaaagcagggtaatgctcataaaaggactgttcccgcggccccaaggtgcctgttgttcacacttaagggaagtttataaagctactggccccagatgctcagggtaaggagcaccaaagctgaggctggctcagagatctccagagaagctgcagcctgccctggccctggctctggccctggcccacattgcacatggaaacccaaaggcatatatctgcgtatgtgtggtacttagtcacatctttgtcaacaaactgttcgtttttaagttacaaatttgaatttaatgttgtcatcatcgtcatgtgtttccccaaagggaagccagtcattgaccatttaaaaagtctcctgctaagtatggaaatcagacagtaagagaaagccaaaaagcaatgcagagaaaggtgtccaagctgtcttcagccttccccagctaaagagcagaggagggcctgggctacttgggttccccatcggcctccagcactgcctccctcctcccactgcgactctgggatctccaggtgctgcccaaggagttgccttgattacagagaggggagcctccaattcggccaacttggagtcctttctgttttgaagcatgggccagacccggcactgcgctcggagagccggtgggcctggcctccccgtcgacctcagtgcctttttgttttcagagagaaataggagtagggcgagtttgcctgaagctctgctgctggcttctcctgccaggaagtgaacaatggcggcggtgtgggagacaaggccaggagagcccgcgttcagtatgggttgagggtcacagacctccctcccatctgggtgcctgagttttgactccaatcagtgataccagaccacattgacagggaggatcaaattcctgacttacatttgcactggcttcttgtttaggctgaatcctaaaataaattagtcaaaaaattccaacaagtagccaggactgcagagacactccagtgcagagggagaaggacttgtaattttcaaagcagggctggttttccaacccagcctctgagaaaccatttctttgctatcctctgccttcccaagtccctcttgggtcggttcaagcccaagcttgttcgtgtagcttcagaagttccctctctgacccaggctgagtccatactgcccctgatcccagaaggaatgctgacccctcgtcgtatgaactgtgcatagtctccagagcttcaaaggcaacacaagctcgcaactctaagatttttttaaaccacaaaaaccctggttagccatctcatgctcagccttatcacttccctccctttagaaactctctccctgctgtatattaaagggagcaggtggagagtcattttccttcgtcctgcatgtctctaacattaatagaaggcatggctcctgctgcaaccgctgtgaatgctgctgagaacctccctctatggggatggctattttatttttgagaaggaaaaaaaaagtcatgtatatatacacataaaggcatatagctatatataaagagataagggtgtttatgaaatgagaaaattattggacaattcagactttactaaagcacagttagacccaaggcctatgctgaggtctaaacctctgaaaaaagtatagtatcgagtacccgttccctcccagaggtgggagtaactgctggtagtgccttctttggttgtgttgctcagtgtgtaagtgtttgtttccaggatattttctttttaaatgtctttcttatatgggttttaaaaaaaagtaataaaagcctgttgc

SEQ ID NO: 256525 - protein, 176 aa, Artificial Sequence
  derived and/or modified sequence
MSDDDSRASTSSSSSSSSNQQTEKETNTPKKKESKVSMSKNSKLLSTSAKSAGPKGDNIYEWRSTILGPPGSVYEGGVFFLDITFTPEYPFKPPKVTFRTRIYHCNINSQGVICLDILKDNWSPALTISKVLLSICSLLTDCNPADPLVGSIATQYMTNRAEHDRMARQWTKRYAT

SEQ ID NO: 256526 - DNA, 531 bp, Artificial Sequence
  derived and/or modified sequence
atgagcgacgacgacagcagagccagcaccagcagcagcagcagcagcagcagcaaccagcagaccgagaaggagaccaacacccccaagaagaaggagagcaaggtgagcatgagcaagaacagcaagctgctgagcaccagcgccaagagcgccggccccaagggcgacaacatctacgagtggagaagcaccatcctgggcccccccggcagcgtgtacgagggcggcgtgttcttcctggacatcaccttcacccccgagtaccccttcaagccccccaaggtgaccttcagaaccagaatctaccactgcaacatcaacagccagggcgtgatctgcctggacatcctgaaggacaactggagccccgccctgaccatcagcaaggtgctgctgagcatctgcagcctgctgaccgactgcaaccccgccgaccccctggtgggcagcatcgccacccagtacatgaccaacagagccgagcacgacagaatggccagacagtggaccaagagatacgccacctag

SEQ ID NO: 256527 - DNA, 1398 bp, Artificial Sequence
  derived and/or modified sequence
taatagttgctgttgctgcacttccgcttctctcccagcgagagagagacacgagtggccaggcccagccgcagccgcagcagcagccgccgcggcggcacggaggagccagacacaaagagaggggctgtttgcggggtggggtggggggttcgctatgtcggatgacgattcgagggccagcaccagctcctcctcatcttcgtcttccaaccagcaaaccgagaaagaaacaaacacccccaagaagaaggagagtaaagtcagcatgagcaaaaactccaaactcctctccaccagcgccaagagtgctggtcccaaaggcgataacatctatgaatggagatcaaccattctagggcctccaggatccgtgtatgagggtggtgtattctttctcgatatcacttttacaccagaatatcccttcaagcctccaaaggttacatttcggacaagaatctatcattgtaatattaacagtcaaggtgttatttgcttggacatattgaaagataattggagtccagcactaaccatttctaaagtcctcctttctatctgctcacttcttacagactgtaatcctgccgaccccttggtgggaagtattgccactcagtatatgaccaacagagcagaacatgacagaatggccagacagtggaccaagagatacgctacataaattggggtttcacaattcttacattatttgtctgtcacagaagagagctgcttatgattttgaaggggtcagggagggtgggagttggtaaagagtagggtatttctataacagatattattcagtcttatttcctaagattttgttgtaacttaaggtatcttgctacagtagacagaattggtaatagcaacttttaaaattgtcattagttctgcaatattagctgaaatgtagtacagaaaagaatgtacatttagacatttgggttcagttgcttgtagtctgtaaatttaaaacagcttaatttggtacaggttacacatatggccatttatgtaaagtccctctaagactacatactttttgtttaaaacaaaattggaatttgttttcccttcttggaagggaacattgatatttaacagagtttttagagattgtcatctcatatatataaaatggacacgtggctataaaacaccatataagagatgagtagtgcgttttattttatatgccaatctactttgtttaaaaaaggtctgaatcaggacttgtgaaaacctgtagtgaaataccttaagctgttaactaactgtaaggcgtggaataggagttgctcagtggattggttctatgttgtggactacttaagtctgcatttgttactgtgctaataaacaatattaaaaaccacctaataaaca

SEQ ID NO: 256528 - DNA, 531 bp, Artificial Sequence
  derived and/or modified sequence
atgtccgatgatgacagtcgagcaagtacctcaagcagctcttccagctcctcaaatcagcagaccgagaaagaaacaaatacacccaagaagaaagagagcaaagtgtcaatgagcaaaaactctaaactgctgtccacatccgccaagtcagccgggccaaagggcgataatatatacgagtggcggtccacaatcctgggaccacccggttccgtgtatgaaggaggcgtgttctttttagatatcactttcaccccagagtacccctttaaaccaccaaaggtaacgtttcggacacgaatctatcactgtaacatcaactctcagggagtcatctgcctggatattctgaaggataattggagccctgctctcaccatcagtaaggtgctgttgagtatttgttctctactgacagactgcaacccagccgatcccttagtggggagcatcgctactcagtatatgaccaatcgtgctgaacatgacaggatggcccgccagtggaccaagaggtacgccacctag

SEQ ID NO: 256529 - DNA, 531 bp, Artificial Sequence
  derived and/or modified sequence
atgtctgatgatgacagccgggccagcaccagcagcagcagcagcagcagcagcaaccagcagacagagaaggagaccaacacccccaagaagaaggagagcaaggtgtccatgagcaagaacagcaagctgctgagcaccagcgccaagtctgctggccccaagggggacaacatctatgagtggaggagcaccatcctgggccccccaggctctgtgtatgagggcggcgtcttcttcctggacatcaccttcaccccagagtaccccttcaagccacccaaggtgaccttccgcacccgcatctaccactgcaacatcaacagccagggcgtcatctgcctggacatcctgaaggacaactggagccctgccctgaccatcagcaaggtgctgctgagcatctgcagcctgctgacagactgcaacccagctgaccccctggtgggcagcatcgccacccagtacatgaccaacagagctgagcatgacaggatggcccggcagtggaccaagagatatgccacctag

SEQ ID NO: 256530 - DNA, 531 bp, Artificial Sequence
  derived and/or modified sequence
atgagcgacgacgacagccgggccagcaccagcagcagcagcagcagcagttctaaccagcaaacggagaaagagaccaacacccctaagaagaaggagtcaaaggtttcaatgtctaagaattcaaagcttctctcaaccagcgccaaatccgccggtccaaaaggtgataatatatatgagtggaggtcgacaatattgggccctccaggctctgtatatgagggaggggtattttttctggatatcaccttcaccccagaatacccctttaaaccaccaaaggtaacttttcggacacgcatctatcattgtaacatcaactcacagggcgtaatatgtttagatatactcaaggataattggtccccagcactgacgattagtaaggttttgctgagtatctgttcccttctgaccgattgcaatcctgctgatccgctcgtcggatcaatagcaacccaatacatgacaaatcgcgcagagcatgaccgcatggcacgtcagtggaccaaacgatacgcaacatag

SEQ ID NO: 256531 - DNA, 531 bp, Artificial Sequence
  derived and/or modified sequence
atgagtgatgatgactctagagcctctacgtcgtcctcctctagtagctcctcgaatcaacagacagagaaggagactaacacaccaaagaagaaggagtctaaggtaagtatgtcaaagaattctaaactcttgagtactagtgcaaagtccgctggtccaaagggggataacatttacgaatggagatccacaatattggggcctcccggatctgtgtatgaaggcggagtgttttttctcgacataacctttacgcctgagtacccctttaagcccccaaaggtgacctttcgcacccggatataccattgtaatatcaacagccagggcgtcatctgtctggatatcctgaaggataattggagtccagcacttacaatttctaaagtgctgctatctatctgctctctccttactgattgcaaccccgcagatccactggtggggtccatcgctacgcagtacatgacgaacagagctgaacacgatcgcatggctaggcagtggacaaaacggtacgccacctag

SEQ ID NO: 256532 - protein, 441 aa, Artificial Sequence
  derived and/or modified sequence
MALFGALFLALLAGAHAEFPGCKIRVTSKALELVKQEGLRFLEQELETITIPDLRGKEGHFYYNISEVKVTELQLTSSELDFQPQQELMLQITNASLGLRFRRQLLYWFLKVYDFLSTFITSGMRFLLNQQICPVLYHAGTVLLNSLLDTVPVRSSVDELVGIDYSLMKDPVASTSNLDMDFRGAFFPLTERNWSLPNRAVEPQLQEEERMVYVAFSEFFFDSAMESYFRAGALQLLLVGDKVPHDLDMLLRATYFGSIVLLSPAVIDSPLKLELRVLAPPRCTIKPSGTTISVTASVTIALVPPDQPEVQLSSMTMDARLSAKMALRGKALRTQLDLRRFRIYSNHSALESLALIPLQAPLKTMLQIGVMPMLNERTWRGVQIPLPEGINFVHEVVTNHAGFLTIGADLHFAKGLREVIEKNRPADVRASTAPTPSTAAV

SEQ ID NO: 256533 - DNA, 1326 bp, Artificial Sequence
  derived and/or modified sequence
atggccctgtttggagcactgttcttagccctcttagccggagcacacgccgagttccctggatgcaagatcagggtaacttcgaaagccctggagctagtgaaacaggaaggattaagattcctggaacaagaactcgagactatcaccatccctgatctgcgagggaaggaaggtcacttctactacaatatctcagaagtcaaggtaacagagctccagctgacctcttctgaactcgacttccaaccacagcaggaacttatgttgcagattacaaacgcctctttggggctgagatttcgacggcaattgctttactggttcttaaaagtgtacgattttctgtccaccttcatcactagcgggatgagattcctcttgaaccagcaaatctgcccagtgttataccatgcaggaactgttttgttaaatagcctcttggacactgtgcccgtgcgtagtagcgtggatgaactggttggaatcgactacagtttaatgaaggatcccgtggcgtccacctcgaatctggacatggactttaggggggccttttttcctctaacagagagaaactggtctctcccaaaccgagccgtagagccgcagttgcaagaggaagaaaggatggtttacgtggcattctccgagttcttttttgacagtgcgatggagagctacttccgtgccggggctttacagctactgctggtaggggataaggtaccacacgacctggatatgctactccgagctacatatttcggcagcatcgtgctgttaagccccgcagtgatagactcccccctcaagctcgagctaagggtcctggcaccgccccgatgtacaatcaagccctctggcaccaccatctctgtgaccgcttcagttactatagccttagtgccccccgatcagcctgaggttcaactgtctagtatgacaatggatgctcgcctgtcagccaaaatggccctcaggggcaaagctctccgaacccaactggatctccggcggttccgaatctattcaaaccacagtgcccttgagtcactcgctctcatccctctccaggccccactgaagaccatgcttcaaattggcgtgatgcctatgctgaacgagcgtacgtggcgcggcgtgcagattccattgccggaaggaataaacttcgtgcatgaagtcgttactaatcacgcgggtttcctgacaattggcgcagaccttcatttcgccaagggcctgagggaggtcatcgagaagaaccgtccagccgacgtgcgcgcctccacggctcccaccccatccacagcagcagtgtag

SEQ ID NO: 256534 - DNA, 1326 bp, Artificial Sequence
  derived and/or modified sequence
atggccctgtttggagccctcttcctggccctgctggccggggcccatgctgagttccctggctgcaagatccgggtgaccagcaaggccctggagctggtgaagcaggagggcctgcgcttcctggagcaggagctggagaccatcaccatcccagacctgcggggcaaggagggccacttctactacaacatcagcgaggtgaaggtgacagagctgcagctgaccagcagcgagctggacttccagccccagcaggagctgatgctgcagatcaccaatgccagcctgggcctgcgcttccggcggcagctgctgtactggttcctgaaggtgtatgacttcctgagcaccttcatcaccagcggcatgaggttcctgctgaaccagcagatctgccctgtgctgtaccacgccggcaccgtgctgctgaacagcctgctggacacagtgcctgtgcgcagctctgtggatgagctggtgggcatcgactacagcctgatgaaggaccctgtggccagcaccagcaacctggacatggacttccggggggccttcttccccctgacagagaggaactggagcctgcccaacagagctgtggagccccagctgcaggaggaggagaggatggtgtatgtggccttcagcgagttcttctttgattctgccatggagagctacttccgggccggggccctgcagctgctgctggtgggggacaaggtgccccatgacctggacatgctgctgcgggccacctacttcggcagcatcgtgctgctgagccctgctgtgattgacagccccctgaagctggagctgcgggtgctggccccaccccgctgcaccatcaagcccagcggcaccaccatctctgtgacagcctctgtgaccatcgccctggtgcccccagaccagcctgaggtgcagctgagctccatgaccatggatgcccggctgagcgccaagatggccctgcggggcaaggccctgcggacccagctggacctgcggcgcttccgcatctacagcaaccacagcgccctggagagcctggccctgatccccctgcaggcccccctgaagaccatgctgcagatcggcgtgatgcccatgctgaatgaaagaacctggaggggcgtgcagatccccctgcctgagggcatcaactttgtgcatgaggtggtgaccaaccacgccggcttcctgaccatcggggctgacctgcactttgccaagggcctgcgggaggtgattgagaagaacagaccagcagatgtgcgggccagcacagcccccacccccagcacagctgctgtgtag

SEQ ID NO: 256535 - DNA, 1326 bp, Artificial Sequence
  derived and/or modified sequence
atggccctgttcggcgccctgttcctggccctgctggccggcgcccatgccgaattccccgggtgtaagatcagagtgacctccaaggcgctggagctggttaagcaggaaggcctaagatttctggagcaggagcttgaaacaatcacaatcccggatctgaggggaaaggaagggcatttctactacaacatttccgaagtgaaagtcacagagctgcagctcaccagcagcgagcttgactttcagcctcaacaggaactcatgctgcaaataactaatgccagtttgggcctccgttttcggagacagttactgtactggtttcttaaagtgtacgactttctctctactttcatcacgagcggcatgaggtttttgctgaatcagcaaatatgcccagtcctttatcacgctggtacagtgctgctgaatagtctgcttgacacagttcctgtccgatctagtgtggacgaactagtcggcatcgattattctctgatgaaggaccccgtggcctctacgtctaatctcgacatggattttcgtggcgccttcttccccttaacagaaaggaactggagcctgcctaaccgggccgtcgagcctcaactccaagaggaggagcggatggtatatgtcgccttcagtgagtttttcttcgactctgcgatggagagttacttccgtgctggcgcactacagctacttctggtcggagataaggtaccacacgatctggatatgctgctgagagctacttacttcggcagtattgtgttgctctccccagctgttattgatagcccactgaaactggaactgagagtccttgcacctccacgttgcacgattaagccgtccggtacaaccatcagtgtgactgctagtgtcacaatcgctttggtgccccctgaccagccagaagttcaactgtcttcaatgacgatggacgctaggttaagcgcaaaaatggcattgcggggcaaggctcttcggacacaactggatctgcggcgcttcaggatatattccaatcacagtgcactagagtcgttggcccttatccctctccaggccccactaaagaccatgctgcaaatcggagtaatgcccatgttaaacgaacgaacttggcgaggagttcagattccattacctgagggtattaacttcgttcacgaagtggtgactaatcatgccggttttctcacaattggtgccgatctgcatttcgccaagggtctgcgtgaagtgattgagaaaaacagaccagcagatgttagagcaagcactgccccgactccaagcactgccgccgtctag

SEQ ID NO: 256536 - DNA, 1592 bp, Artificial Sequence
  derived and/or modified sequence
agaccccgtcgcccggatcccctgagctgcccgccatcccacgtgaccgcgccgccccccagctccaccgctgagcccgctcgccatggccctcttcggggccctcttcctagcgctgctggcaggcgcacatgcagagttcccaggctgcaagatccgcgtcacctccaaggcgctggagctggtgaagcaggaggggctgcgctttctggagcaagagctggagactatcaccattccggacctgcggggcaaagaaggccacttctactacaacatctctgaggtgaaggtcacagagctgcaactgacatcttccgagctcgatttccagccacagcaggagctgatgcttcaaatcaccaatgcctccttggggctgcgcttccggagacagctgctctactggttcttgaaggtgtatgattttctctccacgttcatcacctcagggatgcgcttcctcctcaaccagcagatctgccctgtcctctaccacgcagggacggtcctgctcaactccctcctggacaccgtgcctgtgcgcagttctgtggacgagcttgttggcattgactattccctcatgaaggatcctgtggcttccaccagcaacctggacatggacttccggggggccttcttccccctgactgagaggaactggagcctccccaaccgggcagtggagccccagctgcaggaggaagagcggatggtgtatgtggccttctctgagttcttcttcgactctgccatggagagctacttccgggcgggggccctgcagctgttgctggtgggggacaaggtgccccacgacctggacatgctgctgagggccacctactttgggagcattgtcctgctgagcccagcagtgattgactccccattgaagctggagctgcgggtcctggccccaccgcgctgcaccatcaagccctctggcaccaccatctctgtcactgctagcgtcaccattgccctggtcccaccagaccagcctgaggtccagctgtccagcatgactatggacgcccgtctcagcgccaagatggctctccgggggaaggccctgcgcacgcagctggacctgcgcaggttccgaatctattccaaccattctgcactggagtcgctggctctgatcccattacaggcccctctgaagaccatgctgcagattggggtgatgcccatgctcaatgagcggacctggcgtggggtgcagatcccactacctgagggcatcaactttgtgcatgaggtggtgacgaaccatgcgggattcctcaccatcggggctgatctccactttgccaaagggctgcgagaggtgattgagaagaaccggcctgctgatgtcagggcgtccactgcccccacaccgtccacagcagctgtctgagccctcaatccccaagctggcagctgtcattcaggaccccaacccctctcagcccctcttttcccacattcatagcctgtagtgccccctctaacccccagtgccacagagaagacgggatttgaagctgtacccaatttaattccataatcaatctatcaattacagtccgtccaccacc

SEQ ID NO: 256537 - DNA, 1326 bp, Artificial Sequence
  derived and/or modified sequence
atggctctgtttggcgctctcttcttggctctgctggccggagctcacgcagaattccccggttgcaaaatccgggtgacatccaaagcactcgaactggtaaagcaggaggggctacgctttctcgaacaggagctggaaacaataaccattcctgatctccgcggtaaggaagggcacttctattacaatatcagcgaagtcaaggtaaccgagcttcagttaacaagttcagagttggattttcagcctcagcaagagctcatgttacagatcaccaacgcttctctgggcctgaggtttagaagacaattgttatactggtttctaaaggtatacgacttcctgtcaacgtttatcacgagcggcatgcgcttcttgcttaaccagcaaatatgccccgtgctttaccacgcgggaactgtcctgttaaactcccttttagatacagtgccggtccggagttcagttgatgaacttgtcggcatcgactactcattgatgaaagatcctgtggcttcaacttctaatctcgatatggacttccggggtgcattctttcccctgactgagagaaattggagccttcctaaccgggcagtggaaccacagctccaagaggaagagaggatggtttatgtagcctttagtgagtttttcttcgacagcgcaatggaatcttatttccgagctggagctctgcagctgttgctagtgggtgataaagtacctcatgacctggacatgcttctgcgggctacctactttggctctatcgtcctgttgtcacctgccgtcatcgacagtcccctcaaactggagttacgtgtcctggctcccccacggtgcacaatcaaaccttccgggaccaccatctcagttacagcctccgtaacaatcgctctggttcccccagaccagccggaggttcaattgtcatctatgactatggacgccagactgtctgccaaaatggcactccggggaaaggctttaagaacacagctagacctcaggcgatttcggatttactctaatcacagtgcactagagtcactggccctgatccctttgcaggcaccgctgaaaacaatgctccagatcggggtgatgcccatgctgaacgagcgaacctggcgcggtgtgcaaattccacttcccgaaggaattaacttcgtgcacgaagtagtcaccaatcacgcaggcttcctcaccattggggcagacttgcactttgccaaagggctgagagaagtgatagaaaaaaaccgtcccgctgacgtgcgcgcttcaacagcacccacacctagtactgccgcagtgtag

SEQ ID NO: 256538 - DNA, 1326 bp, Artificial Sequence
  derived and/or modified sequence
atggccctgttcggcgccctgttcctggccctgctggccggcgcccacgccgagttccccggctgcaagatcagagtgaccagcaaggccctggagctggtgaagcaggagggcctgagattcctggagcaggagctggagaccatcaccatccccgacctgagaggcaaggagggccacttctactacaacatcagcgaggtgaaggtgaccgagctgcagctgaccagcagcgagctggacttccagccccagcaggagctgatgctgcagatcaccaacgccagcctgggcctgagattcagaagacagctgctgtactggttcctgaaggtgtacgacttcctgagcaccttcatcaccagcggcatgagattcctgctgaaccagcagatctgccccgtgctgtaccacgccggcaccgtgctgctgaacagcctgctggacaccgtgcccgtgagaagcagcgtggacgagctggtgggcatcgactacagcctgatgaaggaccccgtggccagcaccagcaacctggacatggacttcagaggcgccttcttccccctgaccgagagaaactggagcctgcccaacagagccgtggagccccagctgcaggaggaggagagaatggtgtacgtggccttcagcgagttcttcttcgacagcgccatggagagctacttcagagccggcgccctgcagctgctgctggtgggcgacaaggtgccccacgacctggacatgctgctgagagccacctacttcggcagcatcgtgctgctgagccccgccgtgatcgacagccccctgaagctggagctgagagtgctggccccccccagatgcaccatcaagcccagcggcaccaccatcagcgtgaccgccagcgtgaccatcgccctggtgccccccgaccagcccgaggtgcagctgagcagcatgaccatggacgccagactgagcgccaagatggccctgagaggcaaggccctgagaacccagctggacctgagaagattcagaatctacagcaaccacagcgccctggagagcctggccctgatccccctgcaggcccccctgaagaccatgctgcagatcggcgtgatgcccatgctgaacgagagaacctggagaggcgtgcagatccccctgcccgagggcatcaacttcgtgcacgaggtggtgaccaaccacgccggcttcctgaccatcggcgccgacctgcacttcgccaagggcctgagagaggtgatcgagaagaacagacccgccgacgtgagagccagcaccgcccccacccccagcaccgccgccgtgtag

SEQ ID NO: 256539 - protein, 175 aa, Artificial Sequence
  derived and/or modified sequence
MGTWILFACLLGAAFAMPVLTPLKWYQSIRPPYPSYGYEPMGGWLHHQIIPVLSQQHPPTHTLQPHHHIPVVPAQQPVIPQQPMMPVPGQHSMTPIQHHQPNLPPPAQQPYQPQPVQPQPHQPMQPQPPVHPMQPLPPQPPLPPMFPMQPLPPMLPDLTLEAWPSTDKTKREEVD

SEQ ID NO: 256540 - DNA, 528 bp, Artificial Sequence
  derived and/or modified sequence
atgggcacctggatcctgttcgcctgcctgctgggcgccgccttcgccatgcccgtgctgacccccctgaagtggtaccagagcatcagacccccctaccccagctacggctacgagcccatgggcggctggctgcaccaccagatcatccccgtgctgagccagcagcacccccccacccacaccctgcagccccaccaccacatccccgtggtgcccgcccagcagcccgtgatcccccagcagcccatgatgcccgtgcccggccagcacagcatgacccccatccagcaccaccagcccaacctgcccccccccgcccagcagccctaccagccccagcccgtgcagccccagccccaccagcccatgcagccccagccccccgtgcaccccatgcagcccctgcccccccagccccccctgccccccatgttccccatgcagcccctgccccccatgctgcccgacctgaccctggaggcctggcccagcaccgacaagaccaagagagaggaggtggactag

SEQ ID NO: 256541 - DNA, 737 bp, Artificial Sequence
  derived and/or modified sequence
aaaggatcaagcatccctgagtttcaaacagaaacttgcactgaatacattcaaagaaccatcaagaaatggggacctggattttatttgcctgcctcctgggagcagcttttgccatgcctgtgcttacccctttgaagtggtaccagagcataaggccaccgtacccttcctatggttacgagcccatgggtggatggctgcaccaccaaatcatccccgtgctgtcccaacagcaccccccgactcacaccctgcagcctcatcaccacatcccagtggtgccagctcagcagcccgtgatcccccagcaaccaatgatgcccgttcctggccaacactccatgactccaatccaacaccaccagccaaacctccctccgcccgcccagcagccctaccagccccagcctgttcagccacagcctcaccagcccatgcagccccagccacctgtgcaccccatgcagcccctgccgccacagccacctctgcctccgatgttccccatgcagcccctgcctcccatgcttcctgatctgactctggaagcttggccatcaacagacaagaccaagcgggaggaagtggattaaaagatcagaagatgagaggggaatgaatacttcagatgctttcaggagtgacacaagaacacaatgatttttgcttataatcactttacttagcaaattctgtaactaaaaaagtaccattagcagacaataaaatgcatt

SEQ ID NO: 256542 - DNA, 528 bp, Artificial Sequence
  derived and/or modified sequence
atgggaacctggatcctatttgcctgccttttgggggccgccttcgctatgcccgtgcttacgcccctgaaatggtaccagagcatacgacccccctacccatcttatggctatgagccaatgggaggttggcttcaccaccagatcattccagtcttgtctcagcagcacccgccaacacacactcttcagccccatcaccacatacccgtggtccctgcccagcagccagtcataccacaacagcccatgatgcctgtgcccggccagcacagcatgacacccattcagcatcaccaacccaacctgccacctccagcacagcagccataccaacctcagcctgtacagccccaaccccatcaaccaatgcagccacagcccccagtacatcctatgcagccactcccaccacagccacctttaccgccaatgtttcccatgcagccactgccccctatgttgcccgatctcaccttggaagcatggccgtcaaccgacaaaactaaaagagaggaggttgactag

SEQ ID NO: 256543 - DNA, 528 bp, Artificial Sequence
  derived and/or modified sequence
atgggcacctggatcctgtttgcctgcctgctgggcgccgcctttgccatgcctgtgctgacccccctgaagtggtaccagagcatccggcccccctaccccagctatggctatgagcccatgggcggctggctgcaccaccagatcatccctgtgctgagccagcagcacccccccacccacaccctgcagccccaccaccacatccctgtggtgcctgcccagcagcctgtgatcccccagcagcccatgatgcctgtgcccggccagcacagcatgacccccatccagcaccaccagcccaacctgcccccaccagcccagcagccctaccagccccagcctgtgcagccccagccccaccagcccatgcagccccagccccctgtgcaccccatgcagcccctgcccccccagccccccctgccccccatgttccccatgcagcccctgccccccatgctgcctgacctgaccctggaggcctggcccagcacagacaagaccaagcgggaggaggtggactag

SEQ ID NO: 256544 - DNA, 528 bp, Artificial Sequence
  derived and/or modified sequence
atgggcacctggatcctgttcgcctgcctgctgggcgccgccttcgcgatgcccgtgctcactcccctgaaatggtatcagtccatccgcccaccctacccgagctacggctacgaacccatgggtgggtggctgcaccaccagatcattccagtcttgtctcaacagcatccacccactcatacattgcagcctcaccatcatatcccggtggtccccgctcaacaacctgtaattccccagcagcctatgatgcctgttccgggtcagcattccatgacgccgattcagcaccaccagcctaaccttccgcctcccgcccaacaaccctaccagccgcaacccgtccaaccgcagcctcaccagccaatgcagccgcaacctcctgtgcatccaatgcagcctttacctccccaaccccctctgccccctatgttcccaatgcagccactgccccctatgttgccggatcttacactggaggcctggccctccactgataagaccaaaagggaggaagtcgactag

SEQ ID NO: 256545 - DNA, 528 bp, Artificial Sequence
  derived and/or modified sequence
atggggacctggatattgtttgcctgcctgttgggagccgctttcgcaatgccggtcctgactccactaaagtggtaccagagcatccgcccaccgtatccatcatatggctacgagcctatgggaggttggctgcatcatcaaatcattcccgtgctgtcccaacaacacccccctactcataccttgcagccacaccatcacatccctgtggtccccgctcagcagcctgtgataccacagcagcccatgatgccagtcccaggacaacactctatgaccccgatccaacatcatcaacccaacctgccaccacccgctcagcaaccctaccagccccagcccgttcagcctcagcctcaccagccaatgcaacctcaacctcctgtgcaccccatgcagcccctacccccacagccccctttgcctcctatgtttccaatgcagccacttcccccaatgctgcctgacctcaccctcgaggcgtggccttccacggacaaaacaaagcgcgaagaggtggactag

SEQ ID NO: 256546 - DNA, 528 bp, Artificial Sequence
  derived and/or modified sequence
atggggacttggattctcttcgcctgtttactaggcgccgccttcgctatgccagtcctgactcctcttaagtggtatcagtccatccgaccaccttacccttcatacgggtatgagcccatgggtggttggctccaccatcagattattcctgtcctcagtcagcaacatccccctacccataccctacagccacaccaccacattccagttgttcccgcacagcagccagttattccccagcagccaatgatgcccgtacccggacagcatagcatgactcctatccagcaccatcagcctaacttgcccccccctgcacagcagccttatcaaccccaacccgtccagcctcagccccatcagccaatgcagccccaaccacctgtgcaccccatgcagccgttgccaccccagcccccccttcccccaatgttcccaatgcagccacttcccccgatgctgcccgacctgactctggaggcctggccttctactgacaagacaaaaagggaagaagtagactag

SEQ ID NO: 256547 - DNA, 528 bp, Artificial Sequence
  derived and/or modified sequence
atggggacatggatcctgtttgcatgcctgcttggggccgctttcgccatgccagtgctgacccccctcaagtggtaccagtctatacgacccccttatccatcatatggctacgaacccatgggcggatggctgcaccatcagataatccccgtactgtctcagcaacaccccccaacacacacacttcagccgcaccaccatattcccgtcgtgccagctcagcaacccgtgatcccccagcaacccatgatgcctgttccaggacagcattctatgacacctattcaacatcaccaacccaatctgccacccccagcccagcaaccatatcagccgcagcccgtgcagccccaaccacatcagccaatgcagccccaaccccccgtccatccaatgcaacccctaccaccccaacctccacttcccccaatgttccccatgcagcctttgccaccaatgctccctgacctgaccctcgaagcctggccctccactgacaaaaccaaacgtgaagaagtggactag

SEQ ID NO: 256548 - DNA, 630 bp, Artificial Sequence
  derived and/or modified sequence
atgctgagcagccagctgtgctgcgtgcacagcctgccccccaccgccaaccccgccgccctgtgcagcctggcccagcagatgttcaccaacatcagaagcccctgcagcggcccccagggcagccccggcctgcccagaagaacccacatccacctgtggccccacagcgcccacatgtacttcctggtgaccagcagcctgctgcccttccccctgatccagcccggctgcagcagaaccagattcaagaccctgtgcagcctgagacacaccagcgcccccaccgaggagggccacggccccgtgagaagaccctgcggcatgcactgcctgagccacctgccccaccccagaggcagaccccagggccaccccacccacatgagacccgccctgcagcaggccctgctgagccaccccagcctgctgctgccctggagaagcagccccgacagcgccgtgcaggtgggccccagcatgatcctgagaagaatccccatggccggccacctgtgcttcccccactggccccagctgctggacagcagagactgctgcacctacacctgcatcaacacccccgtgctgaacagccacatggtgcaggagggcgtgtgcggccagtag

SEQ ID NO: 256549 - RNA, 528 nt, Artificial Sequence
  derived and/or modified sequence
auggggacuuggauucucuucgccuguuuacuaggcgccgccuucgcuaugccaguccugacuccucuuaagugguaucaguccauccgaccaccuuacccuucauacggguaugagcccaugggugguuggcuccaccaucagauuauuccuguccucagucagcaacaucccccuacccauacccuacagccacaccaccacauuccaguuguucccgcacagcagccaguuauuccccagcagccaaugaugcccguacccggacagcauagcaugacuccuauccagcaccaucagccuaacuugccccccccugcacagcagccuuaucaaccccaacccguccagccucagccccaucagccaaugcagccccaaccaccugugcaccccaugcagccguugccaccccagcccccccuucccccaauguucccaaugcagccacuucccccgaugcugcccgaccugacucuggaggccuggccuucuacugacaagacaaaaagggaagaaguagacuag

SEQ ID NO: 256550 - RNA, 528 nt, Artificial Sequence
  derived and/or modified sequence
auggggacauggauccuguuugcaugccugcuuggggccgcuuucgccaugccagugcugaccccccucaagugguaccagucuauacgacccccuuauccaucauauggcuacgaacccaugggcggauggcugcaccaucagauaauccccguacugucucagcaacaccccccaacacacacacuucagccgcaccaccauauucccgucgugccagcucagcaacccgugaucccccagcaacccaugaugccuguuccaggacagcauucuaugacaccuauucaacaucaccaacccaaucugccacccccagcccagcaaccauaucagccgcagcccgugcagccccaaccacaucagccaaugcagccccaaccccccguccauccaaugcaaccccuaccaccccaaccuccacuucccccaauguuccccaugcagccuuugccaccaaugcucccugaccugacccucgaagccuggcccuccacugacaaaaccaaacgugaagaaguggacuag

SEQ ID NO: 256551 - protein, 183 aa, Artificial Sequence
  derived and/or modified sequence
MEFLWAPLLGLCCSLAAADRHTVFWNSSNPKFRNEDYTIHVQLNDYVDIICPHYEDHSVADAAMEQYILYLVEHEEYQLCQPQSKDQVRWQCNRPSAKHGPEKLSEKFQRFTPFTLGKEFKEGHSYYYISHSPQAHDNPQEKRLAADDPEVRVLHSIGHSAAPRLFPLAWTVLLLPLLLLQTP

SEQ ID NO: 256552 - DNA, 552 bp, Artificial Sequence
  derived and/or modified sequence
atggagttcctgtgggcccccctgctgggcctgtgctgcagcctggccgccgccgacagacacaccgtgttctggaacagcagcaaccccaagttcagaaacgaggactacaccatccacgtgcagctgaacgactacgtggacatcatctgcccccactacgaggaccacagcgtggccgacgccgccatggagcagtacatcctgtacctggtggagcacgaggagtaccagctgtgccagccccagagcaaggaccaggtgagatggcagtgcaacagacccagcgccaagcacggccccgagaagctgagcgagaagttccagagattcacccccttcaccctgggcaaggagttcaaggagggccacagctactactacatcagccacagcccccaggcccacgacaacccccaggagaagagactggccgccgacgaccccgaggtgagagtgctgcacagcatcggccacagcgccgcccccagactgttccccctggcctggaccgtgctgctgctgcccctgctgctgctgcagaccccctag

SEQ ID NO: 256553 - DNA, 1444 bp, Artificial Sequence
  derived and/or modified sequence
agatctgtgagcccagcgctgactgcgccgcggagaaagccagtgggaacccagacccataggagacccgcgtccccgctcggcctggccaggccccgcgctatggagttcctctgggcccctctcttgggtctgtgctgcagtctggccgctgctgatcgccacaccgtcttctggaacagttcaaatcccaagttccggaatgaggactacaccatacatgtgcagctgaatgactacgtggacatcatctgtccgcactatgaagatcactctgtggcagacgctgccatggagcagtacatactgtacctggtggagcatgaggagtaccagctgtgccagccccagtccaaggaccaagtccgctggcagtgcaaccggcccagtgccaagcatggcccggagaagctgtctgagaagttccagcgcttcacacctttcaccctgggcaaggagttcaaagaaggacacagctactactacatctctcacagtcctcaggcccatgacaatccacaggagaagagacttgcagcagatgacccagaggtgcgggttctacatagcatcggtcacagtgctgccccacgcctcttcccacttgcctggactgtgctgctccttccacttctgctgctgcaaaccccgtgaaggtgtatgccacacctggccttaaagagggacaggctgaagagagggacaggcactccaaacctgtcttggggccactttcagagcccccagccctgggaaccactcccaccacaggcataagctatcacctagcagcctcaaaacgggtcagtattaaggttttcaaccggaaggaggccaaccagcccgacagtgccatccccaccttcacctcggagggatggagaaagaagtggagacagtcctttcccaccattcctgcctttaagccaaagaaacaagctgtgcaggcatggtcccttaaggcacagtgggagctgagctggaaggggccacgtggatgggcaaagcttgtcaaagatgccccctccaggagagagccaggatgcccagatgaactgactgaaggaaaagcaagaaacagtttcttgcttggaagccaggtacaggagaggcagcatgcttgggctgacccagcatctcccagcaagacctcatctgtggagctgccacagagaagtttgtagccaggtactgcattctctcccatcctggggcagcactccccagagctgtgccagcaggggggctgtgccaacctgttcttagagtgtagctgtaagggcagtgcccatgtgtacattctgcctagagtgtagcctaaagggcagggcccacgtgtatagtatctgtatataagttgctgtgtgtctgtcctgatttctacaactggagtttttttatacaatgttctttgtctcaaaataaagcaatgtgttttttcgga

SEQ ID NO: 256554 - DNA, 552 bp, Artificial Sequence
  derived and/or modified sequence
atggagttcctgtgggccccacttctgggactttgctgctccttggcagccgccgatcggcataccgtgttttggaattctagtaatcctaaattcagaaatgaggactatacaatccacgtccagctcaacgactatgtggatattatctgtccccattacgaggaccattccgtcgccgatgccgctatggaacaatatatactgtatcttgtggaacatgaagagtaccagctctgtcagcctcagagcaaagaccaagttcggtggcagtgcaatagacccagcgctaagcacggacccgagaagttgtccgaaaaatttcagagatttaccccttttacgttgggtaaagaatttaaagaggggcattcctattattacataagccattctccccaggcacacgacaaccctcaggagaagagactggccgctgatgaccccgaagtgcgcgtcctgcattcaatcggccactccgctgcccccagactttttccgttggcctggacggtgctgctgttgcctttgctgcttttgcagaccccctag

SEQ ID NO: 256555 - DNA, 552 bp, Artificial Sequence
  derived and/or modified sequence
atggagttcctgtgggcccccctgctgggcctgtgctgcagcctggccgctgctgacagacacacagtgttctggaacagcagcaaccccaagttcagaaatgaagactacaccatccacgtgcagctgaatgactatgtggacatcatctgcccccactatgaggaccacagcgtggctgatgctgccatggagcagtacatcctgtacctggtggagcacgaggagtaccagctgtgccagccccagagcaaggaccaggtgcgctggcagtgcaaccggcccagcgccaagcacggccctgagaagctgtctgagaagttccagcgcttcacccccttcaccctgggcaaggagttcaaggagggccacagctactactacatcagccacagcccccaggcccatgacaacccccaggagaagaggctggccgcagatgatcctgaggtgcgggtgctgcacagcatcggccacagcgctgcccccaggctcttccccctggcctggacagtgctgctgctgcccctgctgctgctgcagaccccctag

SEQ ID NO: 256556 - DNA, 552 bp, Artificial Sequence
  derived and/or modified sequence
atggagttcctgtgggcccccctgctgggcctgtgctgcagcctggcagcagccgatagacataccgtattctggaatagttccaatccaaaattcaggaacgaagactatacaatccacgtgcagttgaacgactacgtggacattatttgtccccattatgaggaccatagtgtggcagatgctgccatggagcagtacatcctgtatttagtggaacacgaggaataccagttgtgtcagccacagagtaaggaccaagtccggtggcagtgtaacagacctagcgcgaaacatggtcctgaaaaattgtccgaaaaatttcagcgctttaccccttttactctgggcaaagaattcaaggagggccactcttactactacatatcccacagtccgcaagcgcatgacaatccccaggagaagcgcctggctgccgacgaccctgaggtacgcgtgctccactcaatcggacattcggcagctccgcgattatttccactcgcttggacggtgctcctgctgcccctcttgctgttgcagaccccctag

SEQ ID NO: 256557 - DNA, 552 bp, Artificial Sequence
  derived and/or modified sequence
atggagttcctgtgggcaccactgctgggactttgctgctccctggctgccgctgatcgccacaccgttttctggaacagttccaatccaaagttcaggaatgaggattacaccatccatgtacaactgaacgattatgtggacatcatttgtccacactacgaagatcatagtgtagccgatgctgcaatggaacagtacatcttatatctggtggagcacgaggaatatcagttgtgccaacctcaaagcaaggatcaggttagatggcagtgtaacaggcccagtgcaaagcacgggccagagaagctgagcgagaagttccaaaggtttactccttttacactgggcaaggagttcaaagagggtcattcgtattactacatttcccattcacctcaggcccacgataatccacaggaaaagagactggccgcagatgaccctgaagtgagggtgcttcacagcatagggcatagcgccgctccgcgtctctttcctctcgcatggactgtcctgctcctgccactgctgctgctccagacaccttag

SEQ ID NO: 256558 - protein, 447 aa, Artificial Sequence
  derived and/or modified sequence
MPMPTEGTPPPLSGTPIPVPAYFRHAEPGFSLKRPRGLSRSLPPPPPAKGSIPISRLFPPRTPGWHQLQPRRVSFRGEASETLQSPGYDPSRPESFFQQSFQRLSRLGHGSYGEVFKVRSKEDGRLYAVKRSMSPFRGPKDRARKLAEVGSHEKVGQHPCCVRLEQAWEEGGILYLQTELCGPSLQQHCEAWGASLPEAQVWGYLRDTLLALAHLHSQGLVHLDVKPANIFLGPRGRCKLGDFGLLVELGTAGAGEVQEGDPRYMAPELLQGSYGTAADVFSLGLTILEVACNMELPHGGEGWQQLRQGYLPPEFTAGLSSELRSVLVMMLEPDPKLRATAEALLALPVLRQPRAWGVLWCMAAEALSRGWALWQALLALLCWLWHGLAHPASWLQPLGPPATPPGSPPCSLLLDSSLSSNWDDDSLGPCVLKRTEGALECSQMEGL

SEQ ID NO: 256559 - protein, 480 aa, Artificial Sequence
  derived and/or modified sequence
MLERPPALAMPMPTEGTPPPLSGTPIPVPAYFRHAEPGFSLKRPRGLSRSLPPPPPAKGSIPISRLFPPRTPGWHQLQPRRVSFRGEASETLQSPGYDPSRPESFFQQSFQRLSRLGHGSYGEVFKVRSKEDGRLYAVKRSMSPFRGPKDRARKLAEVGSHEKVGQHPCCVRLEQAWEEGGILYLQTELCGPSLQQHCEAWGASLPEAQVWGYLRDTLLALAHLHSQGLVHLDVKPANIFLGPRGRCKLGDFGLLVELGTAGAGEVQEGDPRYMAPELLQGSYGTAADVFSLGLTILEVACNMELPHGGEGWQQLRQGYLPPEFTAGLSSELRSVLVMMLEPDPKLRATAEALLALPVLRQPRAWGVLWCMAAEALSRGWALWQALLALLCWLWHGLAHPASWLQPLGPPATPPGSPPCSLLLDSSLSSNWDDDSLGPGHPPCLACPPAGLHSPLRLSWPGLWGAPPPPGAGAHPGMPWT

SEQ ID NO: 256560 - DNA, 1344 bp, Artificial Sequence
  derived and/or modified sequence
atgcccatgcccaccgagggcacccccccccccctgagcggcacccccatccccgtgcccgcctacttcagacacgccgagcccggcttcagcctgaagagacccagaggcctgagcagaagcctgcccccccccccccccgccaagggcagcatccccatcagcagactgttcccccccagaacccccggctggcaccagctgcagcccagaagagtgagcttcagaggcgaggccagcgagaccctgcagagccccggctacgaccccagcagacccgagagcttcttccagcagagcttccagagactgagcagactgggccacggcagctacggcgaggtgttcaaggtgagaagcaaggaggacggcagactgtacgccgtgaagagaagcatgagccccttcagaggccccaaggacagagccagaaagctggccgaggtgggcagccacgagaaggtgggccagcacccctgctgcgtgagactggagcaggcctgggaggagggcggcatcctgtacctgcagaccgagctgtgcggccccagcctgcagcagcactgcgaggcctggggcgccagcctgcccgaggcccaggtgtggggctacctgagagacaccctgctggccctggcccacctgcacagccagggcctggtgcacctggacgtgaagcccgccaacatcttcctgggccccagaggcagatgcaagctgggcgacttcggcctgctggtggagctgggcaccgccggcgccggcgaggtgcaggagggcgaccccagatacatggcccccgagctgctgcagggcagctacggcaccgccgccgacgtgttcagcctgggcctgaccatcctggaggtggcctgcaacatggagctgccccacggcggcgagggctggcagcagctgagacagggctacctgccccccgagttcaccgccggcctgagcagcgagctgagaagcgtgctggtgatgatgctggagcccgaccccaagctgagagccaccgccgaggccctgctggccctgcccgtgctgagacagcccagagcctggggcgtgctgtggtgcatggccgccgaggccctgagcagaggctgggccctgtggcaggccctgctggccctgctgtgctggctgtggcacggcctggcccaccccgccagctggctgcagcccctgggcccccccgccaccccccccggcagccccccctgcagcctgctgctggacagcagcctgagcagcaactgggacgacgacagcctgggcccctgcgtgctgaagagaaccgagggcgccctggagtgcagccagatggagggcctgtag

SEQ ID NO: 256561 - DNA, 1443 bp, Artificial Sequence
  derived and/or modified sequence
atgctggagagaccccccgccctggccatgcccatgcccaccgagggcacccccccccccctgagcggcacccccatccccgtgcccgcctacttcagacacgccgagcccggcttcagcctgaagagacccagaggcctgagcagaagcctgcccccccccccccccgccaagggcagcatccccatcagcagactgttcccccccagaacccccggctggcaccagctgcagcccagaagagtgagcttcagaggcgaggccagcgagaccctgcagagccccggctacgaccccagcagacccgagagcttcttccagcagagcttccagagactgagcagactgggccacggcagctacggcgaggtgttcaaggtgagaagcaaggaggacggcagactgtacgccgtgaagagaagcatgagccccttcagaggccccaaggacagagccagaaagctggccgaggtgggcagccacgagaaggtgggccagcacccctgctgcgtgagactggagcaggcctgggaggagggcggcatcctgtacctgcagaccgagctgtgcggccccagcctgcagcagcactgcgaggcctggggcgccagcctgcccgaggcccaggtgtggggctacctgagagacaccctgctggccctggcccacctgcacagccagggcctggtgcacctggacgtgaagcccgccaacatcttcctgggccccagaggcagatgcaagctgggcgacttcggcctgctggtggagctgggcaccgccggcgccggcgaggtgcaggagggcgaccccagatacatggcccccgagctgctgcagggcagctacggcaccgccgccgacgtgttcagcctgggcctgaccatcctggaggtggcctgcaacatggagctgccccacggcggcgagggctggcagcagctgagacagggctacctgccccccgagttcaccgccggcctgagcagcgagctgagaagcgtgctggtgatgatgctggagcccgaccccaagctgagagccaccgccgaggccctgctggccctgcccgtgctgagacagcccagagcctggggcgtgctgtggtgcatggccgccgaggccctgagcagaggctgggccctgtggcaggccctgctggccctgctgtgctggctgtggcacggcctggcccaccccgccagctggctgcagcccctgggcccccccgccaccccccccggcagccccccctgcagcctgctgctggacagcagcctgagcagcaactgggacgacgacagcctgggccccggccaccccccctgcctggcctgcccccccgccggcctgcacagccccctgagactgagctggcccggcctgtggggcgccccccccccccccggcgccggcgcccaccccggcatgccctggacctag

SEQ ID NO: 256562 - DNA, 1344 bp, Artificial Sequence
  derived and/or modified sequence
atgccaatgcccaccgaagggaccccccccccgctgtcaggtacacccatccccgttccggcttatttccggcacgctgagcccggcttttccctgaagcgcccaagggggctttctcgttcgcttcctcctcctcctcccgctaaaggtagtatacctatttctaggctcttcccaccacgtacacccgggtggcaccagctgcaaccaaggagggtgagctttcgaggggaggcctccgagaccctgcaatctccagggtacgacccttccagacccgagtctttcttccagcaatcgttccagcgcttgagcaggctgggtcatggaagttatggcgaggtgttcaaggtccggagcaaagaggatgggaggctctacgcagtgaagcgatctatgtctccttttcggggacctaaggaccgagcacggaaactggcagaggttgggtcacacgaaaaggtcggacagcatccatgctgtgtgcggctggaacaagcctgggaagagggggggatcttgtaccttcagacggaactgtgcggtccatcccttcagcaacattgtgaggcctggggtgcttctctgccagaggcccaggtttggggatacttaagggacactctgctggccctcgcgcacctccatagccagggcctggttcaccttgacgtgaaaccagccaacatcttcctgggccctcggggcagatgtaagctgggtgattttggtctcctggtggagctcggaactgcaggagctggagaagttcaggaaggagatccacggtatatggcacccgagctgttgcagggctcctatgggacagccgctgatgtgttctcactcggtcttactattctggaagttgcatgtaatatggagttgccacatgggggcgaaggttggcagcagctgcggcaaggttacttgcctccggagttcacagccggcctttcatcagagcttcgatctgtgctggtcatgatgctcgagcctgaccccaaactgcgagcaaccgccgaagcactattagcccttcccgtcctgcggcagccccgagcctggggggtgctttggtgcatggccgccgaagccctttctcgagggtgggctctgtggcaagccctcttagcattgctctgttggctttggcatgggctggctcatccagcctcttggcttcaaccactgggaccacctgcaaccccccccgggagccctccctgctcattactgcttgattcctctctgtcatctaactgggacgacgatagtctgggcccttgcgttcttaaacggaccgagggggccctcgagtgcagccagatggagggcctctag

SEQ ID NO: 256563 - DNA, 1443 bp, Artificial Sequence
  derived and/or modified sequence
atgcttgagaggcccccggccctcgctatgcctatgccaacagagggcaccccgccccccttgagtgggacccccatccccgttccagcctactttagacacgcagagcccggattcagcctgaagagaccaagaggcctgtccagatcgttgcctccccctcctcctgcaaaggggtctattccaatcagcaggctctttcctccgaggacccccgggtggcatcagctgcagccccgcagagtgtcattcagaggtgaggcctccgagacactccagtccccaggctatgacccatctcgtcctgagtctttctttcagcaatcctttcaacggctgagtcggttgggtcatggatcctacggcgaggtcttcaaagtgaggtccaaagaggacggccgactctatgctgttaaaaggagcatgagccccttcagagggcctaaagaccgcgcacggaagcttgccgaggtgggctcccacgaaaaggtgggccaacacccttgttgtgtacgccttgaacaggcctgggaagagggcggtattttgtatctgcagaccgaactctgtgggccatctttgcagcaacactgcgaagcttggggcgcatccctacctgaggcacaggtttgggggtacttaagagatacactgttagctttggctcacctccattcccaagggctcgtacacctggacgtgaagcctgcaaatatattcctgggtccgcgaggcaggtgcaagctgggagactttgggctgctcgttgaactggggactgccggagccggagaagtccaagagggggacccgagatacatggcaccggagctactccagggctcttacggcaccgcagccgacgtgttcagtttgggactcacaatcttggaggttgcctgtaacatggagctaccacacggcggggaaggatggcaacagttgcgccaggggtacctgccaccagagtttacggcaggcctgtcttcggagcttaggagcgttctggtgatgatgcttgaacccgacccgaagcttagagctaccgcagaggccctgctcgccctgccagtgctcaggcagccccgtgcgtggggcgtcttgtggtgtatggccgcagaggcactgagccgcggttgggccttatggcaggcccttctcgcactgctctgttggttgtggcatggcctcgctcatcctgccagctggctgcagcccttaggacctcctgccacacctccgggcagccctccctgcagcctcctgctggacagcagtctaagctcaaactgggacgatgactccctgggcccaggccatccaccttgtctggcatgtcccccggccggacttcactcaccgctgaggctgtcctggccaggtctgtggggtgcaccaccacctcccggcgcgggagcccatcccggcatgccttggacatag

SEQ ID NO: 256564 - DNA, 1344 bp, Artificial Sequence
  derived and/or modified sequence
atgcccatgcccacagagggcaccccaccacccctgagcggcacccccatccctgtgcctgcctacttcagacatgctgagcccggcttcagcctgaagaggccccggggcctgagccgcagcctgcccccacctcctccagccaagggcagcatccccatcagccgcctcttcccccccaggaccccaggctggcaccagctgcagcccaggagagtgtccttccggggggaggccagcgagaccctgcagagccctggctatgaccccagcaggcctgagagcttcttccagcagagcttccagaggctgagccggctgggccacggcagctatggagaggtgttcaaggtgcgcagcaaggaggatggccgcctgtatgctgtgaagaggtccatgagccccttccggggccccaaggaccgggccaggaagctggccgaggtgggcagccatgagaaggtgggccagcacccctgctgcgtgcggctggagcaggcctgggaggagggcggcatcctgtacctgcagacagagctgtgtggccccagcctgcagcagcactgtgaggcctggggcgccagcctgcctgaggcccaggtgtggggctacctgcgggacaccctgctggccctggcccacctgcacagccagggcctggtgcacctggatgtgaagccagccaacatcttcctgggcccccggggccgctgcaagctgggggactttggcctgctggtggagctgggcacagctggggccggggaggtgcaggagggggacccccgctacatggcccctgagctgctgcagggcagctatggaacagctgctgatgtgttcagcctgggcctgaccatcctggaggtggcctgcaacatggagctgccccacggcggggagggctggcagcagctgcggcagggctacctgcccccagagttcaccgctggcctgagcagcgagctgcggtctgtgctggtgatgatgctggagccagaccccaagctgcgggccacagctgaggccctgctggccctgcctgtgctgcggcagccccgggcctggggcgtgctgtggtgcatggctgctgaggccctgagccggggctgggccctgtggcaggccctgctggccctgctgtgctggctgtggcacggcctggcccacccagcctcctggctgcagcccctgggccccccagccaccccacctggcagccccccctgcagcctgctgctggacagcagcctgagcagcaactgggatgatgacagcctgggcccctgtgtgctgaagaggacagaaggagccctggagtgcagccagatggagggcctgtag

SEQ ID NO: 256565 - DNA, 1443 bp, Artificial Sequence
  derived and/or modified sequence
atgctggagcggcccccagccctggccatgcccatgcccacagagggcaccccaccacccctgagcggcacccccatccctgtgcctgcctacttcagacatgctgagcccggcttcagcctgaagaggccccggggcctgagccgcagcctgcccccacctcctccagccaagggcagcatccccatcagccgcctcttcccccccaggaccccaggctggcaccagctgcagccccggcgggtgtccttccggggggaggccagcgagaccctgcagagccctggctatgaccccagcaggcctgagagcttcttccagcagagcttccagaggctgagccggctgggccacggcagctatggagaggtgttcaaggtgcgcagcaaagaagatggccgcctgtatgctgtgaagaggtccatgagccccttccggggccccaaggaccgggccaggaagctggccgaggtgggcagccatgagaaggtgggccagcacccctgctgcgtgcggctggagcaggcctgggaggagggcggcatcctgtacctgcagacagagctgtgtggccccagcctgcagcagcactgtgaggcctggggcgccagcctgcctgaggcccaggtgtggggctacctgcgggacaccctgctggccctggcccacctgcacagccagggcctggtgcacctggatgtgaagccagccaacatcttcctgggcccccggggccgctgcaagctgggggactttggcctgctggtggagctgggcacagctggagctggggaggtgcaggagggggacccccgctacatggcccctgagctgctgcagggcagctatggaacagctgctgatgtgttcagcctgggcctgaccatcctggaggtggcctgcaacatggagctgccccatggaggagagggctggcagcagctgcggcagggctacctgcccccagagttcaccgctggcctgagcagcgagctgcggtctgtgctggtgatgatgctggagccagaccccaagctgcgggccacagctgaggccctgctggccctgcctgtgctgcggcagccccgggcctggggcgtgctgtggtgcatggctgctgaggccctgagccggggctgggccctgtggcaggccctgctggccctgctgtgctggctgtggcacggcctggcccacccagcctcctggctgcagcccctgggccccccagccaccccacctggcagccccccctgcagcctgctgctggacagcagcctgagcagcaactgggatgatgacagcctgggccctggccaccccccctgcctggcctgccccccagctggcctgcacagccccctgcggctgtcctggccaggcctgtggggcgcccctcctcctcctggagctggggcccaccctggcatgccctggacctag

SEQ ID NO: 256566 - DNA, 1958 bp, Artificial Sequence
  derived and/or modified sequence
gttttggcacgacagttatgaaaaagaaagacacttgagggattccgggttttcactttggaattggagataagggatcgtgggcccgtgtagtctcggaagaggttgtgtagtttaggatcaaagagctggccgtgatgagggcagggatgcaggcgcagcccgtctgactccaaactgccttgctcttaacccgactgcaagaccctcaagaacacgggccccatggttttcctcttatgtttctatcatctctaaaatacaacagcctggtgggcagggcctcctgcactggccatgcccatgcccacggagggcaccccgccacctctgagtggcacccccatcccagtcccagcctacttccgccacgcagaacctggattctccctcaagaggcccagggggctcagccggagcctcccacctccgccccctgccaagggcagcattcccatcagccgcctcttccctcctcggaccccaggctggcaccagctgcagccccggcgggtgtcattccggggcgaggcctcagagactctgcagagccctgggtatgacccaagccggccagagtccttcttccagcagagcttccagaggctcagccgcctgggccatggctcctacggagaggtcttcaaggtgcgctccaaggaggacggccggctctatgcggtaaagcgttccatgtcaccattccggggccccaaggaccgggcccgcaagttggccgaggtgggcagccacgagaaggtggggcagcacccatgctgcgtgcggctggagcaggcctgggaggagggcggcatcctgtacctgcagacggagctgtgcgggcccagcctgcagcaacactgtgaggcctggggtgccagcctgcctgaggcccaggtctggggctacctgcgggacacgctgcttgccctggcccatctgcacagccagggcctggtgcaccttgatgtcaagcctgccaacatcttcctggggccccggggccgctgcaagctgggtgacttcggactgctggtggagctgggtacagcaggagctggtgaggtccaggagggagacccccgctacatggcccccgagctgctgcagggctcctatgggacagcagcggatgtgttcagtctgggcctcaccatcctggaagtggcatgcaacatggagctgccccacggtggggagggctggcagcagctgcgccagggctacctgccccctgagttcactgccggtctgtcttccgagctgcgttctgtccttgtcatgatgctggagccagaccccaagctgcgggccacggccgaggccctgctggcactgcctgtgttgaggcagccgcgggcctggggtgtgctgtggtgcatggcagcggaggccctgagccgagggtgggccctgtggcaggccctgcttgccctgctctgctggctctggcatgggctggctcaccctgccagctggctacagcccctgggcccgccagccaccccgcctggctcaccaccctgcagtttgctcctggacagcagcctctccagcaactgggatgacgacagcctaggtccatgtgttctgaaaaggacagagggggccttggagtgcagccagatggaaggactttgaaggctgtccaagtgctgctttcagagtgcaccaagtttttattgtccctgactgtggctccctgcctgtttgtcaggcgggagcctggagcctgcacagggacagagctggtttcatccggcactccctagccctggacaccctccttgtctcgcctgccctcctgcaggccttcactctcccctgaggctgtcctggcccggactgtggggagcacctccaccccccggagcaggtgcacacccagggatgccctggacctaagtgacatcaactcagagcctcctcggggctccttcccctcctttgagcctcgg

SEQ ID NO: 256567 - DNA, 1344 bp, Artificial Sequence
  derived and/or modified sequence
atgcccatgcccaccgagggcacccccccccccctgagcggcacccccatccccgttcctgcatacttcaggcacgcggagccaggttttagccttaagcgcccaagagggctctcgcgtagcctgccccctccaccccctgccaagggatctataccaatatctcgattgtttcccccccgaactcctgggtggcaccagctgcagcctcggcgcgtttcttttcgtggggaggcctcagaaacactgcaaagcccaggctacgacccttcccgtcctgagagctttttccagcagagtttccaaaggctaagcaggctgggacacggctcttacggggaggtcttcaaagtgcggtctaaggaggacggccggttatatgctgtaaaacgatctatgtctccattccgcggaccaaaagatcgtgcgcgcaagttggcagaagtgggttctcacgagaaggtggggcagcatccttgctgcgtcagactggaacaggcctgggaggaaggcgggatactgtacctgcaaacagaactgtgcggccctagtctgcagcagcattgcgaggcttggggcgctagtctgccggaagctcaggtgtggggctacctgcgtgatactctcctggcgctggcgcatctgcactctcaaggattggttcatctggacgtgaagccagctaatatctttctgggacctaggggcagatgcaaacttggggatttcggcctcctggtggagctgggaaccgccggcgcaggggaggttcaggagggcgatccgcgatacatggcccccgaactcttgcaaggctcctatggcactgctgcagatgtgttcagcctaggactgactattctagaggtggcatgcaatatggaattgccacatggtggagaaggttggcaacaactgaggcagggctatttgccccctgagttcacagctgggctgtcatccgagctcagatctgttttagttatgatgttagaacccgatcccaagcttcgtgcgacggccgaggcacttctagctctgcctgtactccggcaaccccgggcctggggggtgctctggtgcatggcagccgaagcactctcaagaggatgggccttgtggcaggccctgctggcactgttgtgttggctctggcacggcctggctcaccccgcaagttggctccagcccttggggcctccggcgacccccccaggatctccaccatgtagcctgttgctcgattccagtcttagttccaattgggacgacgattccctcgggccttgtgtgctgaaacgtactgaaggtgctctcgaatgcagtcaaatggaggggctgtag

SEQ ID NO: 256568 - DNA, 1443 bp, Artificial Sequence
  derived and/or modified sequence
atgctggagcggccccccgccctggccatgcccatgcccaccgagggcacccctccgcctctaagcggcacaccaatcccagttcccgcttacttccgacacgcggagccaggcttctcgctgaagcgccctcggggcctatctagaagcctccctcctcctccgcccgccaagggctctatacccatctcaaggctttttcctccacggacacctggctggcaccagttgcagcctcgtagagtgagctttcgaggagaggcctcggaaaccttgcaatcgcctggatatgatccctcccgccctgagtcatttttccaacaatccttccagcgtctgtcacggctgggacatgggagttatggtgaagttttcaaagtcaggtcaaaagaggacggccgtctgtatgctgtgaaaagatcgatgtcaccctttcgcggacctaaagatagagccaggaaactagcagaagtgggcagccacgagaaggtgggtcagcacccttgctgtgttcggctggagcaggcgtgggaggagggcggaatcttgtacctgcaaacggaattgtgtgggccatcactgcagcaacattgcgaagcctggggcgcctctttacctgaagcccaggtttggggctatctgagggatacgttactggccctcgcacacctgcactctcaggggctggtccacctggacgtgaaacctgccaatatatttctgggtccacgggggcggtgcaagctcggcgattttgggctgttggtggaactgggaaccgccggggccggagaggtgcaagaaggcgacccaaggtacatggccccggaattgctccaggggagctatggaacggctgcagacgtgtttagccttggcctaaccattcttgaggtcgcctgcaatatggagttaccccatggcggggagggatggcagcaacttcggcagggctacttgccacccgaattcactgccggcctgagctctgagttaaggtcagttctggtaatgatgctggaacctgaccctaaactccgggctaccgctgaggcactacttgccctgcccgttctcagacaacccagagcatggggcgtgctctggtgtatggccgccgaagcactttcgcgaggatgggctctatggcaggcgctgttagccctgttatgttggttgtggcatggtctcgcacaccctgcctcttggttgcagccattggggcctcctgcgacccccccgggctcccccccctgctctctattactggacagctcactctcctccaattgggacgacgatagcctcggccccggacacccaccttgcctggcttgtccccctgctgggctccactcccccctgaggctgagttggcctggtctatggggagcccctccgccccccggcgcaggagcccaccctggtatgccttggacctag

SEQ ID NO: 256569 - DNA, 1344 bp, Artificial Sequence
  derived and/or modified sequence
atgcccatgcctaccgaaggaaccccaccacctttatctgggactcctatccccgtgccggcatattttagacacgcagagcccggtttctctctaaaacgacctcgcggtttgtctaggtcactccctcctccaccacctgccaagggctctatcccaattagcaggctgttccctcccaggacaccagggtggcaccaactgcagccccgtagagttagtttccgtggtgaggccagtgaaacgcttcagtcacctggttatgacccgagccggccagagagcttttttcagcagtcatttcaaaggctcagtcgcctgggccacggtagctacggagaggttttcaaagtccggagtaaagaggacggcaggctgtatgctgtgaaaagatccatgagtcctttccgcggtcctaaagatagggcccgtaagctggctgaggtcggtagtcatgaaaaagtcggccaacatccttgctgtgtgcgcctggagcaggcctgggaagagggaggaatcctgtatctgcagacggaactgtgtggcccaagcctgcagcagcactgtgaagcttggggagccagcctccccgaggctcaggtatggggatatctgcgggatacgctcctcgccctggcccaccttcactcacagggcctcgtgcacctcgatgtgaagccagccaatatctttcttggaccacgcggacggtgcaagttaggggacttcggtctcctcgtggagctcggaacggctggcgctggggaggttcaagagggggatcccagatatatggcgcctgagctgctccaggggtcgtatggcactgccgctgatgtcttctcacttggccttacaatcctggaggtggcctgtaatatggagctccctcatggaggcgaggggtggcagcagttacggcagggctacctgccacccgagtttacggcgggattgtcgagcgaactgaggagcgtgctggtgatgatgctggagcctgatcctaaactgcgggctacagccgaagcactgctagcgttacccgtgctgcgccagcccagagcttggggggtcttatggtgtatggcagccgaggccctctcacgcggttgggccctgtggcaagccctcctggccttgctgtgttggttatggcatgggctggcgcaccctgcaagctggctgcagcctctggggccacctgctactccacctggaagcccgccttgttcgctgctgttggatagttctctgagttccaattgggatgatgattcactcggtccttgtgtattaaagcgtacagagggggctcttgaatgctcccagatggaaggcttgtag

SEQ ID NO: 256570 - DNA, 1443 bp, Artificial Sequence
  derived and/or modified sequence
atgctcgagagacctcccgctttagccatgccaatgccaaccgagggcacacccccacctcttagtggaacgcccattccagtgcccgcttatttcagacacgccgaacccggtttctccctgaagcgcccacgcggactgtcacggagcctaccgcctccccctcccgctaaagggagcatccctatttcaaggctgtttccaccaagaacaccaggctggcaccagctgcagccaaggagggttagttttcgcggagaagcatccgaaaccctccagtctccaggatatgatccatcacggccagagtcatttttccagcagagcttccagaggctttctagactgggccatggcagctacggcgaagtcttcaaggtgagaagtaaagaggatggcagactttacgcagtgaaacgaagtatgagccccttccggggtcccaaagacagagccagaaaactggccgaagtcggaagtcacgaaaaggttggccagcatccttgttgtgtgcgcttggaacaggcatgggaggagggcggaattctgtatctgcagaccgagctgtgcgggccatctttgcagcagcactgtgaggcttggggggcttcgctgccagaggcccaggtctggggctacctacgcgatacgttgctggccctggcacatcttcactcccagggtcttgtccacctggacgtgaagccagccaatattttcctgggccctagggggaggtgtaagcttggcgacttcggactgttggtggagctgggcactgcaggcgctggcgaggtacaagagggggacccacgctacatggctcctgaacttctccaggggtcatacggaacagctgccgatgtgttttctctggggcttacgattttagaagtcgcctgtaatatggaactcccgcacgggggagaagggtggcaacagctgcgccaggggtacctgccccctgaatttactgcaggactgagtagtgagttacgatctgtgttggtcatgatgttagagcccgatccgaagctgcgggcaactgctgaggcgttgctggcacttcctgtactgagacagcccagagcttggggcgtgctctggtgtatggctgccgaggccctgtctagaggctgggccttgtggcaggctctcctcgcactcctatgttggctctggcatgggctggcacatcccgctagttggctacaacccctcggtccacccgctactccgcctggaagccctccatgcagtttactcctagatagctccttgagtagcaattgggacgatgacagcctgggtcccggtcacccgccttgcctcgcttgtccccctgcaggactgcactcacctctcaggcttagctggcccggactgtggggggcaccacctcctccaggagctggagcacacccaggtatgccttggacctag

SEQ ID NO: 256571 - DNA, 2141 bp, Artificial Sequence
  derived and/or modified sequence
tggaatttttggcgcgagcagctccgcgcgcgttcacgggccgttccccctcacgggagtcctccgcccgggcgtccggaacagtcgacggcagactccggcccgctgagccacccgaggggtcccgtggcctccgcggacccggaatctgggccctcgcggacccgcgccccgcccagtcgccccagggcttccccacacccacggagtgaagtcagccgcggccctgcctgggaggaacttaccgtctaccgggaaaggtggccagcagatgtgtcgggcctggtgagagggtgaggcgagacggcccgatcgcccagggccccggaagctgcggaggtcacccccgcctggccttagctcagggacaccctggattcacgtgggagcccctgctcctgcctcccccgtcccaccactgaggctgttgggccaggccagtcatgctagaacggcctcctgcactggccatgcccatgcccacggagggcaccccgccacctctgagtggcacccccatcccagtcccagcctacttccgccacgcagaacctggattctccctcaagaggcccagggggctcagccggagcctcccacctccgccccctgccaagggcagcattcccatcagccgcctcttccctcctcggaccccaggctggcaccagctgcagccccggcgggtgtcattccggggcgaggcctcagagactctgcagagccctgggtatgacccaagccggccagagtccttcttccagcagagcttccagaggctcagccgcctgggccatggctcctacggagaggtcttcaaggtgcgctccaaggaggacggccggctctatgcggtaaagcgttccatgtcaccattccggggccccaaggaccgggcccgcaagttggccgaggtgggcagccacgagaaggtggggcagcacccatgctgcgtgcggctggagcaggcctgggaggagggcggcatcctgtacctgcagacggagctgtgcgggcccagcctgcagcaacactgtgaggcctggggtgccagcctgcctgaggcccaggtctggggctacctgcgggacacgctgcttgccctggcccatctgcacagccagggcctggtgcaccttgatgtcaagcctgccaacatcttcctggggccccggggccgctgcaagctgggtgacttcggactgctggtggagctgggtacagcaggagctggtgaggtccaggagggagacccccgctacatggcccccgagctgctgcagggctcctatgggacagcagcggatgtgttcagtctgggcctcaccatcctggaagtggcatgcaacatggagctgccccacggtggggagggctggcagcagctgcgccagggctacctgccccctgagttcactgccggtctgtcttccgagctgcgttctgtccttgtcatgatgctggagccagaccccaagctgcgggccacggccgaggccctgctggcactgcctgtgttgaggcagccgcgggcctggggtgtgctgtggtgcatggcagcggaggccctgagccgagggtgggccctgtggcaggccctgcttgccctgctctgctggctctggcatgggctggctcaccctgccagctggctacagcccctgggcccgccagccaccccgcctggctcaccaccctgcagtttgctcctggacagcagcctctccagcaactgggatgacgacagcctaggccctggacaccctccttgtctcgcctgccctcctgcaggccttcactctcccctgaggctgtcctggcccggactgtggggagcacctccaccccccggagcaggtgcacacccagggatgccctggacctaagtgacatcaactcagagcctcctcggggctccttcccctcctttgagcctcggaacctcctcagcctgtttgaggacaccctagacccaacctgagccccagactctgcctctgcacttttaaccttttatcctgtgtctctcccgtcgcccttgaaagctggggcccctcgggaactcccatggtcttctctgcctggccgtgtctaataaaaagtatttgaaccttgggagcacccaagcttgctcatgtggc

SEQ ID NO: 256572 - DNA, 414 bp, Artificial Sequence
  derived and/or modified sequence
atgaacgaggagaacttcttcgagtgggaggccctgatcatgggccccgaggacacctgcttcgagttcggcgtgttccccgccatcctgagcttccccctggactaccccctgagcccccccaagatgagattcacctgcgagatgttccaccccaacatctaccccgacggcagagtgtgcatcagcatcctgcacgcccccggcgacgaccccatgggctacgagagcagcgccgagagatggagccccgtgcagagcgtggagaagatcctgctgagcgtggtgagcatgctggccgagcccaacgacgagagcggcgccaacgtggacgccagcaagatgtggagagacgacagagagcagttctacaagatcgccaagcagatcgtgcagaagagcctgggcctgtag

SEQ ID NO: 256573 - DNA, 414 bp, Artificial Sequence
  derived and/or modified sequence
atgaacgaggagaatttcttcgaatgggaggccctcattatggggcctgaggacacgtgtttcgagtttggggtcttcccagccatccttagcttcccattggattatccactgagcccacccaaaatgcgctttacctgcgaaatgtttcaccctaatatttaccctgatggcagagtatgcatttccatactgcacgccccaggcgacgaccctatggggtacgaatctagcgcagaacgctggtcgccagtgcagtcggtggaaaagatactgctgagtgtggtgtctatgctggccgagcccaatgacgaaagtggcgccaatgtcgatgcctctaaaatgtggagagatgaccgggaacagttctacaagattgcgaagcaaattgtgcagaagtctttgggcctgtag

SEQ ID NO: 256574 - DNA, 414 bp, Artificial Sequence
  derived and/or modified sequence
atgaatgaggagaacttctttgagtgggaggccctgatcatgggccctgaggacacctgctttgaatttggagtcttccctgccatcctgtccttccccctggactaccccctgagcccccccaagatgaggttcacctgtgagatgttccaccccaacatctacccagatggccgggtgtgcatcagcatcctgcacgcccctggagatgaccccatgggctatgagagcagcgctgagcgctggagccctgtgcagagcgtggagaagatcctgctgtctgtggtgtccatgctggccgagcccaatgatgagagcggggccaacgtggatgccagcaagatgtggagagatgaccgggagcagttctacaagatcgccaagcagatcgtgcagaagagcctgggcctgtag

SEQ ID NO: 256575 - DNA, 414 bp, Artificial Sequence
  derived and/or modified sequence
atgaacgaggagaacttcttcgagtgggaggccctgatcatgggccctgaggacacatgcttcgagttcggggttttccccgctatcttatctttcccactggactatccgcttagtccacccaagatgcgcttcacctgtgagatgtttcacccaaacatttaccccgacgggagggtctgtatctctattctacacgccccaggagatgaccctatgggctacgaaagctccgccgagcggtggagccctgttcaaagcgtcgaaaagatccttctgtccgtcgtctctatgctcgcagaacccaatgacgagtcaggggcaaacgttgatgcctccaaaatgtggagagacgatagggaacagttttacaaaatcgcaaagcagatcgtgcagaagagcttaggcctttag

SEQ ID NO: 256576 - DNA, 414 bp, Artificial Sequence
  derived and/or modified sequence
atgaatgaagagaattttttcgagtgggaggcgctgataatgggcccagaagacacatgcttcgaattcggcgtcttcccggcaatcctaagttttccactcgattaccccttgtctccacccaaaatgcgcttcacatgtgagatgttccaccccaacatttacccagatggtagggtatgcatctctatcctgcacgcccctggagacgatcctatgggatacgagagctctgctgagaggtggtctccagtgcagtccgtggagaagatcctgcttagtgtggtgtcaatgcttgcggagccaaatgacgaatccggagcaaacgtggacgcctccaagatgtggcgcgatgacagggagcagttctacaaaatcgcgaaacaaatcgtccagaagtctctgggtctttag

SEQ ID NO: 256577 - protein, 207 aa, Artificial Sequence
  derived and/or modified sequence
MRLLPLLRTVLWAAFLGSPLRGGSSLRHVVYWNSSNPRLLRGDAVVELGLNDYLDIVCPHYEGPGPPEGPETFALYMVDWPGYESCQAEGPRAYKRWVCSLPFGHVQFSEKIQRFTPFSLGFEFLPGETYYYISVPTPESSGQCLRLQVSVCCKERRARVLPRSPGGGGIPAACTGGANSDRQDGALMGEIRGSEVTLAGACPLITG

SEQ ID NO: 256578 - DNA, 624 bp, Artificial Sequence
  derived and/or modified sequence
atgagactgcttcctcttctgaggaccgtgttatgggctgcatttctggggagccctctccgggggggatcttcactcaggcatgttgtttactggaacagtagtaacccgaggctgttaagaggcgatgccgtggtcgagctgggacttaacgattatcttgacatcgtttgcccccattacgagggtccagggcccccagaaggtccagagacttttgcactgtacatggtggactggcctggatatgaaagctgccaggctgagggccctcgcgcctataaaagatgggtttgtagtctccccttcggccacgtacagttctccgagaagatccaaagattcactccattttctctagggtttgagttccttccgggcgaaacttattactatatttcagttcctacacccgagtcttccggccagtgtcttcgactgcaggttagtgtttgttgcaaggaaaggcgggctcgcgtactgcctcgcagtcctggaggggggggtatccccgccgcctgcactggtggtgcgaacagtgatcgtcaggacggcgccctcatgggtgaaattagaggatccgaagtcaccttggcaggagcctgtcctctgattacaggctag

SEQ ID NO: 256579 - DNA, 624 bp, Artificial Sequence
  derived and/or modified sequence
atgaggctgctgcccctgctgaggacagtgctgtgggccgccttcctgggcagccccctgcggggcggcagcagcctgcggcacgtggtgtactggaacagcagcaacccccggctgctgcggggagatgctgtggtggagctgggcctgaatgactacctggacatcgtgtgcccccactatgagggccctggccccccagagggccctgagacctttgccctgtacatggtggactggccaggctatgagagctgccaggccgagggcccccgggcctacaagcgctgggtgtgcagcctgccctttggacatgtgcagttcagcgagaagatccagcgcttcacccccttcagcctgggctttgagttcctgcccggggagacctactactacatctctgtgcccaccccagagagcagcggccagtgcctgcggctgcaggtgtctgtgtgctgcaaggagcggcgggcccgggtgctgcccaggagccctgggggcggcggcatcccagctgcctgcacaggaggagccaacagcgaccggcaggatggagccctgatgggagagatccggggcagcgaggtgaccctggccggggcctgccccctcatcaccggctag

SEQ ID NO: 256580 - DNA, 624 bp, Artificial Sequence
  derived and/or modified sequence
atgcggctgctgcccctgctgcggaccgtgctgtgggccgccttccttggatctcccctccgtggcggctcaagcctgcgacacgtggtgtattggaactctagcaaccctcgtttactgcggggggatgccgttgtggagcttggcttgaatgactatttggacatcgtctgccctcattacgaaggccctggcccaccagaaggtccagaaaccttcgcactatatatggtggattggcccggctatgaatcttgccaggcagagggcccaagggcatacaagcgttgggtctgtagcctgccattcggtcacgtccagttttccgaaaaaatccagagatttaccccctttagccttggctttgagtttctccccggagagacctattattacatctcagtacctactcctgagagctccggtcagtgtctgagattacaggttagtgtctgctgcaaggagcgaagggcgcgtgtcctgccacggagtccagggggtggcggtattcctgcggcttgtactggcggtgccaacagtgatcggcaggatggtgccttaatgggagagatcagagggtccgaggtcacccttgccggtgcatgcccactgatcactgggtag

SEQ ID NO: 256581 - DNA, 624 bp, Artificial Sequence
  derived and/or modified sequence
atgaggttgctgccactccttcgcaccgtgctgtgggctgcttttctgggctcccccctcagaggtggcagcagccttcgccacgtcgtctattggaatagcagtaacccaagactgctcaggggagacgcagtggtggaactgggtctgaatgactatttggacatcgtctgtccgcattacgagggcccaggcccacccgagggccctgagacatttgccctttacatggtcgattggccaggatacgagtcctgccaagctgagggacctagagcttacaaaaggtgggtttgcagtttgcctttcggtcacgtacagtttagtgagaaaatacaaagattcacgcctttctctttagggtttgagtttctgcccggagagacctattactatattagcgtgcccaccccggagagttcgggacaatgcctgcgactgcaggtgtccgtgtgttgtaaggagaggagggcacgagtcctaccacgcagtcctggaggaggagggattcctgccgcttgtactggaggcgctaactcagatcggcaggatggggctctgatgggggagatccggggttcggaagtgacactggctggggcttgccctctgattaccggctag

SEQ ID NO: 256582 - DNA, 624 bp, Artificial Sequence
  derived and/or modified sequence
atgagactgctgcccctgctgagaaccgtgctgtgggccgccttcctgggcagccccctgagaggcggcagcagcctgagacacgtggtgtactggaacagcagcaaccccagactgctgagaggcgacgccgtggtggagctgggcctgaacgactacctggacatcgtgtgcccccactacgagggccccggcccccccgagggccccgagaccttcgccctgtacatggtggactggcccggctacgagagctgccaggccgagggccccagagcctacaagagatgggtgtgcagcctgcccttcggccacgtgcagttcagcgagaagatccagagattcacccccttcagcctgggcttcgagttcctgcccggcgagacctactactacatcagcgtgcccacccccgagagcagcggccagtgcctgagactgcaggtgagcgtgtgctgcaaggagagaagagccagagtgctgcccagaagccccggcggcggcggcatccccgccgcctgcaccggcggcgccaacagcgacagacaggacggcgccctgatgggcgagatcagaggcagcgaggtgaccctggccggcgcctgccccctgatcaccggctag

SEQ ID NO: 256583 - DNA, 1052 bp, Artificial Sequence
  derived and/or modified sequence
ctctcctcgactgtgaagcgggccgggacctgccaggccagaccaaaccggacctcgggggcgatgcggctgctgcccctgctgcggactgtcctctgggccgcgttcctcggctcccctctgcgcgggggctccagcctccgccacgtagtctactggaactccagtaaccccaggttgcttcgaggagacgccgtggtggagctgggcctcaacgattacctagacattgtctgcccccactacgaaggcccagggccccctgagggccccgagacgtttgctttgtacatggtggactggccaggctatgagtcctgccaggcagagggcccccgggcctacaagcgctgggtgtgctccctgccctttggccatgttcaattctcagagaagattcagcgcttcacacccttctccctcggctttgagttcttacctggagagacttactactacatctcggtgcccactccagagagttctggccagtgcttgaggctccaggtgtctgtctgctgcaaggagaggagagccagagtcctcccaagatcccctggaggaggagggatccctgctgcctgcactgggggtgccaattcagaccgacaagatggagcattgatgggggagatcagagggtctgaggtgactcttgcaggagcctgtcccctcatcacaggctaaagaagagcagtagacagccctggacactctgaagcagaggcaagacaaacacaggcgctttgcaggctgctctgagggtctcagcccatcccccaggaggactgggatttggtatgatcaaatcctcaagccagctgggggcccaggctgaagacctggggacaggtcgattgctggaccagggcaaagaagaagccctgccatctgtgccctgtgggccttttccctggggcagcaccttgccctccccaggggatcactcacttgtcttctatgaagacggactcttcatgaggttgaatttcatgccagtttgtatttttataagtatctagaccaaaccttcaataaaccactcatctttt

SEQ ID NO: 256584 - protein, 193 aa, Artificial Sequence
  derived and/or modified sequence
MRLLPLLRTVLWAAFLGSPLRGGSSLRHVVYWNSSNPRLLRGDAVVELGLNDYLDIVCPHYEGPGPPEGPETFALYMVDWPGYESCQAEGPRAYKRWVCSLPFGHVQFSEKIQRFTPFSLGFEFLPGETYYYISVPTPESSGQCLRLQVSVCCKERNLPSHPKEPESSQDPLEEEGSLLPALGVPIQTDKMEH

SEQ ID NO: 256585 - DNA, 582 bp, Artificial Sequence
  derived and/or modified sequence
atgcgattgctgcctctccttaggaccgtgctatgggcagccttcttgggctcacctctgaggggagggtcttcattaagacatgtagtgtattggaattcatcaaatcccaggcttctgagaggagacgccgtagtggagcttggtctgaatgattatttagacatagtctgccctcattacgagggtcctggtccaccagagggtcccgaaactttcgcgctgtacatggtcgactggccaggttacgaaagctgtcaggccgagggcccccgagcctacaagcgctgggtgtgcagtctccctttcggccacgtgcagttctccgagaagatccagcggttcacccctttttctctagggtttgaattcttgcctggagagacctactattatatatctgttcccacaccagagagctccggacagtgtttacgcttgcaggtgtccgtgtgctgcaaggaaagaaacctgccgtctcaccccaaagagcctgagagctctcaagatccccttgaagaggaggggagcctcctgcctgcattaggcgtgccaatacagaccgacaagatggagcactag

SEQ ID NO: 256586 - DNA, 582 bp, Artificial Sequence
  derived and/or modified sequence
atgaggctgctgcccctgctgaggacagtgctgtgggccgccttcctgggcagccccctgcggggcggcagcagcctgcggcacgtggtgtactggaacagcagcaacccccggctgctgcggggagatgctgtggtggagctgggcctgaatgactacctggacatcgtgtgcccccactatgagggccctggccccccagagggccctgagacctttgccctgtacatggtggactggccaggctatgagagctgccaggccgagggcccccgggcctacaagcgctgggtgtgcagcctgccctttggacatgtgcagttcagcgagaagatccagcgcttcacccccttcagcctgggctttgagttcctgcccggggagacctactactacatctctgtgcccaccccagagagcagcggccagtgcctgcggctgcaggtgtctgtgtgctgcaaggagaggaacctgcccagccaccccaaggagcctgagagcagccaggaccccctggaggaggagggcagcctgctgcctgccctgggcgtgcccatccagacagacaagatggagcactag

SEQ ID NO: 256587 - DNA, 582 bp, Artificial Sequence
  derived and/or modified sequence
atgcggctgctgcccctgctgcggaccgtgctgtgggccgccttcctgggttctccccttagaggaggatcaagtctgcgacacgtcgtgtattggaactcatctaaccctcgattgctgagaggagatgccgtcgttgaactggggcttaacgactacctagatattgtctgtccccactacgaagggcctggtcctccggaaggtcctgagactttcgcactgtatatggttgactggccaggctacgaatcttgccaagccgagggcccgagagcatataagcgttgggtgtgctccttacctttcggccatgtgcagttctctgaaaaaattcagaggtttactccgttcagcttaggatttgaattcctccccggtgaaacttactattatatctcggtgcccacacccgagtcgagcgggcagtgcctgcggctccaggtcagcgtgtgctgcaaggagaggaacttgcctagccacccgaaggagcctgagtcgtcccaggacccactagaggaggaaggttcactgctccctgcccttggggtcccaattcagaccgataaaatggagcactag

SEQ ID NO: 256588 - DNA, 582 bp, Artificial Sequence
  derived and/or modified sequence
atgagactgctgcctctcttgcgcaccgtgctatgggcagctttcctcggtagccccctcaggggcggttctagcctgcgacacgttgtgtactggaattcatctaatcccagactgctacggggtgacgcagtcgtcgagctgggactgaacgattaccttgatattgtgtgtcctcactacgaaggaccgggtccaccggagggtccggaaactttcgctctgtatatggttgactggccgggttacgagtcttgccaggccgaagggcctcgagcatataagagatgggtgtgttcgctaccctttggccacgtgcaattctccgagaagattcagcggttcactcccttctctctggggttcgagtttttgccaggtgagacctattactacatttcagtcccaacccctgaatcttccggccagtgtttgcggttgcaggtctctgtctgttgcaaggaacgtaaccttcctagtcatcctaaggagcccgagtcaagtcaggaccccctcgaagaggaaggctcccttttgccagcgctcggggtcccaattcaaaccgacaagatggaacattag

SEQ ID NO: 256589 - DNA, 582 bp, Artificial Sequence
  derived and/or modified sequence
atgagactgctgcccctgctgagaaccgtgctgtgggccgccttcctgggcagccccctgagaggcggcagcagcctgagacacgtggtgtactggaacagcagcaaccccagactgctgagaggcgacgccgtggtggagctgggcctgaacgactacctggacatcgtgtgcccccactacgagggccccggcccccccgagggccccgagaccttcgccctgtacatggtggactggcccggctacgagagctgccaggccgagggccccagagcctacaagagatgggtgtgcagcctgcccttcggccacgtgcagttcagcgagaagatccagagattcacccccttcagcctgggcttcgagttcctgcccggcgagacctactactacatcagcgtgcccacccccgagagcagcggccagtgcctgagactgcaggtgagcgtgtgctgcaaggagagaaacctgcccagccaccccaaggagcccgagagcagccaggaccccctggaggaggagggcagcctgctgcccgccctgggcgtgcccatccagaccgacaagatggagcactag

SEQ ID NO: 256590 - DNA, 1096 bp, Artificial Sequence
  derived and/or modified sequence
cttccctcttcactttgtacctttctctcctcgactgtgaagcgggccgggacctgccaggccagaccaaaccggacctcgggggcgatgcggctgctgcccctgctgcggactgtcctctgggccgcgttcctcggctcccctctgcgcgggggctccagcctccgccacgtagtctactggaactccagtaaccccaggttgcttcgaggagacgccgtggtggagctgggcctcaacgattacctagacattgtctgcccccactacgaaggcccagggccccctgagggccccgagacgtttgctttgtacatggtggactggccaggctatgagtcctgccaggcagagggcccccgggcctacaagcgctgggtgtgctccctgccctttggccatgttcaattctcagagaagattcagcgcttcacacccttctccctcggctttgagttcttacctggagagacttactactacatctcggtgcccactccagagagttctggccagtgcttgaggctccaggtgtctgtctgctgcaaggagaggaaccttccctctcatcccaaggagccagagtcctcccaagatcccctggaggaggagggatccctgctgcctgcactgggggtgccaattcagaccgacaagatggagcattgatgggggagatcagagggtctgaggtgactcttgcaggagcctgtcccctcatcacaggctaaagaagagcagtagacagccctggacactctgaagcagaggcaagacaaacacaggcgctttgcaggctgctctgagggtctcagcccatcccccaggaggactgggatttggtatgatcaaatcctcaagccagctgggggcccaggctgaagacctggggacaggtcgattgctggaccagggcaaagaagaagccctgccatctgtgccctgtgggccttttccctggggcagcaccttgccctccccaggggatcactcacttgtcttctatgaagacggactcttcatgaggttgaatttcatgccagtttgtatttttataagtatctagaccaaaccttcaataaaccactcatctttt

SEQ ID NO: 256591 - protein, 688 aa, Artificial Sequence
  derived and/or modified sequence
MSVNSEKSSSSERPEPQQKAPLVPPPPPPPPPPPPPLPDPTPPEPEEEILGSDDEEQEDPADYCKGGYHPVKIGDLFNGRYHVIRKLGWGHFSTVWLCWDMQGKRFVAMKVVKSAQHYTETALDEIKLLKCVRESDPSDPNKDMVVQLIDDFKISGMNGIHVCMVFEVLGHHLLKWIIKSNYQGLPVRCVKSIIRQVLQGLDYLHSKCKIIHTDIKPENILMCVDDAYVRRMAAEATEWQKAGAPPPSGSAVSTAPQQKPIGKISKNKKKKLKKKQKRQAELLEKRLQEIEELEREAERKIIEENITSAAPSNDQDGEYCPEVKLKTTGLEEAAEAETAKDNGEAEDQEEKEDAEKENIEKDEDDVDQELANIDPTWIESPKTNGHIENGPFSLEQQLDDEDDDEEDCPNPEEYNLDEPNAESDYTYSSSYEQFNGELPNGRHKIPESQFPEFSTSLFSGSLEPVACGSVLSEGSPLTEQEESSPSHDRSRTVSASSTGDLPKAKTRAADLLVNPLDPRNADKIRVKIADLGNACWVHKHFTEDIQTRQYRSIEVLIGAGYSTPADIWSTACMAFELATGDYLFEPHSGEDYSRDEDHIAHIIELLGSIPRHFALSGKYSREFFNRRGELRHITKLKPWSLFDVLVEKYGWPHEDAAQFTDFLIPMLEMVPEKRASAGECLRHPWLNS

SEQ ID NO: 256592 - DNA, 483 bp, Artificial Sequence
  derived and/or modified sequence
atgagcgtgaacagcgagaagagcagcagcagcgagagacccgagccccagcagaaggcccccctggtgcccccccccccccccccccccccccccccccccccccccctgcccgaccccaccccccccgagcccgaggaggagatcctgggcagcgacgacgaggagcaggaggaccccgccgactactgcaagggcggctaccaccccgtgaagatcggcgacctgttcaacggcagataccacgtgatcagaaagctgggctggggccacttcagcaccgtgtggctgtgctgggacatgcagggcaagagattcgtggccatgaaggtggtgaagagcgcccagcactacaccgagaccgccctggacgagatcaagctgctgaagtgcgtgagagagagcgaccccagcgaccccaacaaggacatggtggtgcagctgatcgacgacttcaagatcagcggcatgaacggcatctag

SEQ ID NO: 256593 - DNA, 483 bp, Artificial Sequence
  derived and/or modified sequence
atgtccgtgaacagcgaaaagtcttcaagtagtgagcgacctgagccgcaacagaaggccccactggtgcctcctcctcccccccctccaccgccccctcctcctcccttacctgaccccaccccccctgaacctgaagaggaaattttaggctcagatgacgaggagcaggaggatcctgcggactactgtaagggcgggtatcacccggtaaagattggagacctgtttaatggcagataccatgtgattcggaagctgggctggggtcacttcagtacagtatggctctgttgggacatgcagggcaagaggttcgtggccatgaaagtggtaaaaagcgctcagcactacactgaaaccgctctggacgagatcaagctcctaaagtgcgtgcgcgaaagcgatccctccgacccgaacaaggacatggtggtgcaattaatagatgactttaaaatctccggtatgaatggaatatag

SEQ ID NO: 256594 - DNA, 483 bp, Artificial Sequence
  derived and/or modified sequence
atgtctgtgaacagcgagaagagcagcagcagcgagaggcctgagccccagcagaaggcccccctggtgcccccacctcctcctcctcctcctcctcctcctccacccctgcctgaccccaccccacctgagcctgaggaggagatcctgggcagtgatgatgaggagcaggaggaccctgctgactactgcaagggcggctaccaccctgtgaagattggagacctcttcaacggccgctaccacgtgatcaggaagctgggctggggccacttcagcacagtgtggctgtgctgggacatgcagggcaagagatttgtggccatgaaggtggtgaagagcgcccagcactacacagaaacagccctggatgagatcaagctgctgaagtgtgtgcgggagagtgaccccagcgaccccaacaaggacatggtggtgcagctgattgatgacttcaagatcagcggcatgaatggcatctag

SEQ ID NO: 256595 - DNA, 483 bp, Artificial Sequence
  derived and/or modified sequence
atgagcgtgaacagcgagaagagcagcagcagcgagcggcccgagccgcagcagaaagctccactcgttcccccaccacccccaccaccacctcctcctcccccccccttaccggaccctactcccccggagcccgaagaggaaatcctgggctccgacgatgaagaacaggaggatccagctgactactgtaagggggggtaccacccggtgaaaattggcgatctgttcaatggcagataccacgtgatccggaagctgggatggggtcacttttctacagtttggctgtgttgggacatgcaaggaaagcgctttgttgccatgaaggtggtcaaatctgctcagcattacaccgaaaccgctcttgatgagatcaaattgttgaaatgtgttcgggaaagtgacccctctgatcccaacaaggacatggttgtccagcttatcgacgacttcaaaattagtggtatgaacggcatctag

SEQ ID NO: 256596 - DNA, 483 bp, Artificial Sequence
  derived and/or modified sequence
atgtcagtgaactcggaaaagtcttcttcaagcgaacgacccgagcctcagcaaaaggccccacttgtacccccaccacctccgccacccccacctccgccacctccgctgcctgatcccactcctcctgagcctgaagaagaaattctggggagcgatgacgaggagcaggaagatcctgcagattactgtaaaggcggttaccatccggtgaaaataggcgacctgtttaacggcaggtaccatgtgatcaggaagcttggctgggggcattttagtaccgtctggttgtgctgggatatgcagggaaagcgctttgtcgcgatgaaagttgtgaagtcagcccagcactacactgagacagccctcgatgaaataaagcttctgaagtgtgttcgggagtccgatccttctgatcctaataaagacatggtggtgcagttaattgatgactttaaaatttctggtatgaatggcatatag

SEQ ID NO: 256597 - protein, 699 aa, Artificial Sequence
  derived and/or modified sequence
MSSRKVLAIQARKRRPKREKHPKKPEPQQKAPLVPPPPPPPPPPPPPLPDPTPPEPEEEILGSDDEEQEDPADYCKGGYHPVKIGDLFNGRYHVIRKLGWGHFSTVWLCWDMQGKRFVAMKVVKSAQHYTETALDEIKLLKCVRESDPSDPNKDMVVQLIDDFKISGMNGIHVCMVFEVLGHHLLKWIIKSNYQGLPVRCVKSIIRQVLQGLDYLHSKCKIIHTDIKPENILMCVDDAYVRRMAAEATEWQKAGAPPPSGSAVSTAPQQKPIGKISKNKKKKLKKKQKRQAELLEKRLQEIEELEREAERKIIEENITSAAPSNDQDGEYCPEVKLKTTGLEEAAEAETAKDNGEAEDQEEKEDAEKENIEKDEDDVDQELANIDPTWIESPKTNGHIENGPFSLEQQLDDEDDDEEDCPNPEEYNLDEPNAESDYTYSSSYEQFNGELPNGRHKIPESQFPEFSTSLFSGSLEPVACGSVLSEGSPLTEQEESSPSHDRSRTVSASSTGDLPKAKTRAADLLVNPLDPRNADKIRVKIADLGNACWVHKHFTEDIQTRQYRSIEVLIGAGYSTPADIWSTACMAFELATGDYLFEPHSGEDYSRDEDHIAHIIELLGSIPRHFALSGKYSREFFNRRGELRHITKLKPWSLFDVLVEKYGWPHEDAAQFTDFLIPMLEMVPEKRASAGECLRHPWLNS

SEQ ID NO: 256598 - protein, 152 aa, Artificial Sequence
  derived and/or modified sequence
MSSPSPGKRRMDTDVVKLIESKHEVTILGGLNEFVVKFYGPQGTPYEGGVWKVRVDLPDKYPFKSPSIDLTNIFESFLPQLLAYPNPIDPLNGDAAAMYLHRPEEYKQKIKEYIQKYATEEALKEQEEGTGDSSSESSMSDFSEDEAQDMEL

SEQ ID NO: 256599 - DNA, 459 bp, Artificial Sequence
  derived and/or modified sequence
atgagcagccccagccccggcaagagaagaatggacaccgacgtggtgaagctgatcgagagcaagcacgaggtgaccatcctgggcggcctgaacgagttcgtggtgaagttctacggcccccagggcaccccctacgagggcggcgtgtggaaggtgagagtggacctgcccgacaagtaccccttcaagagccccagcatcgacctgaccaacatcttcgagagcttcctgccccagctgctggcctaccccaaccccatcgaccccctgaacggcgacgccgccgccatgtacctgcacagacccgaggagtacaagcagaagatcaaggagtacatccagaagtacgccaccgaggaggccctgaaggagcaggaggagggcaccggcgacagcagcagcgagagcagcatgagcgacttcagcgaggacgaggcccaggacatggagctgtag

SEQ ID NO: 256600 - DNA, 459 bp, Artificial Sequence
  derived and/or modified sequence
atgtcctccccatcgcctggcaaaaggaggatggatacggatgttgtgaaactcatcgaaagcaagcatgaggtgactattttgggcgggctgaacgaattcgtggtcaaattctatggcccgcagggaacgccttacgagggcggagtgtggaaggtgagggtcgacctgcccgacaagtatcctttcaagagcccgtctatcgacttgactaacatctttgagtcattcctccctcagctgctggcctatcccaatcctatagaccctctcaacggggacgccgcagctatgtacctccaccgccctgaagagtacaaacagaagatcaaagagtatattcagaaatatgcgacggaagaggctctgaaagagcaggaagagggcacaggagactccagctcagagtcttcaatgtccgatttcagcgaggacgaagctcaggacatggagctctag

SEQ ID NO: 256601 - DNA, 459 bp, Artificial Sequence
  derived and/or modified sequence
atgagcagccccagccctgggaagaggaggatggacacagatgtggtgaagctgattgagagcaagcatgaggtgaccatcctgggcggcctgaatgaatttgtggtgaagttctacggcccccagggcaccccctatgagggcggcgtgtggaaggtgcgggtggacctgcctgacaagtaccccttcaagagccccagcattgacctgaccaacatctttgagagcttcctgccccagctgctggcctaccccaaccccatcgaccccctgaatggagatgctgctgccatgtacctgcacaggcctgaggagtacaagcagaagatcaaggagtacatccagaagtatgccacagaggaggccctgaaggagcaggaggagggcaccggggacagcagcagcgagagctccatgtctgacttctctgaagatgaggcccaggacatggagctgtag

SEQ ID NO: 256602 - DNA, 459 bp, Artificial Sequence
  derived and/or modified sequence
atgagcagccccagccccggcaagcggcggatggacaccgacgtggtgaaactcattgagtctaagcacgaagtcaccatcctcggtggtttgaatgagtttgtcgtaaaattttatggaccgcagggtactccttacgaaggcggagtgtggaaggtaagagtggacctcccggataaatatccctttaaatctccctccattgacctaaccaatatctttgagtccttcctgccgcagctactggcttacccaaatccaatcgatccgctcaatggtgatgccgccgctatgtacctacaccggcccgaggagtacaagcagaaaataaaggagtacattcaaaagtatgctacagaggaagccctcaaggaacaggaagagggcacaggggactcctcgtctgagtctagcatgagtgactttagtgaagatgaggcccaggacatggagctgtag

SEQ ID NO: 256603 - DNA, 459 bp, Artificial Sequence
  derived and/or modified sequence
atgagctcaccctcccccggtaagcgaaggatggacactgatgtcgtaaagttaatcgagtcaaaacatgaggtcactatactcgggggactgaatgagttcgtggtgaagttctatggtcctcagggcacaccgtacgaagggggagtgtggaaggtgcgcgtggatctgccagataagtatcctttcaagtctcccagtatagaccttacaaacatcttcgagtcttttctgccccaattgctcgcgtatccaaatcctattgatccattgaatggagacgctgctgccatgtacctacatagaccagaggaatataagcagaagatcaaggagtacatccagaagtacgctacagaagaggcactcaaggaacaagaggaaggaaccggcgactcctccagcgagagtagcatgtcagacttctccgaggacgaagcacaggacatggaactgtag

SEQ ID NO: 256604 - DNA, 535 bp, Artificial Sequence
  derived and/or modified sequence
ccgcgggctcctcagagccggggccccgggcccgtgacagacgggccgaggaagggagagaggcggcggcgacaccatgtcatctcccagtccgggcaagaggcggatggacacggacgtggtcaagctcatcgagagtaaacatgaggttacgatcctgggaggacttaatgaatttgtagtgaagttttatggaccacaaggaacaccatatgaaggcggagtatggaaagttagagtggacctacctgataaataccctttcaaatctccatctatagatcttaccaatatatttgagtccttcctgcctcagttattggcctatcctaaccccatagatcctctcaatggtgacgctgcagccatgtacctccaccgaccagaagaatacaagcagaaaattaaagagtacatccagaaatacgccacggaggaggcgctgaaagaacaggaagagggtaccggggacagctcatcggagagctctatgtctgacttttccgaagatgaggcccaggatatggagttgtag

SEQ ID NO: 256605 - protein, 631 aa, Artificial Sequence
  derived and/or modified sequence
MSHWAPEWKRAEANPRDLGASWDVRGSRGSGWSGPFGHQGPRAAGSREPPLCFKIKNNMVGVVIGYSGSKIKDLQHSTNTKIQIINGESEAKVRIFGNREMKAKAKAAIETLIRKQESYNSESSVDNAASQTPIGRNLGRNDIVGEAEPLSNWDRIRAAVVECEKRKWADLPPVKKNFYIESKATSCMSEMQVINWRKENFNITCDDLKSGEKRLIPKPTCRFKDAFQQYPDLLKSIIRVGIVKPTPIQSQAWPIILQGIDLIVVAQTGTGKTLSYLMPGFIHLDSQPISREQRNGPGMLVLTPTRELALHVEAECSKYSYKGLKSICIYGGRNRNGQIEDISKGVDIIIATPGRLNDLQMNNSVNLRSITYLVIDEADKMLDMEFEPQIRKILLDVRPDRQTVMTSATWPDTVRQLALSYLKDPMIVYVGNLNLVAVNTVKQNIIVTTEKEKRALTQEFVENMSPNDKVIMFVSQKHIADDLSSDFNIQGISAESLHGNSEQSDQERAVEDFKSGNIKILITTDIVSRGLDLNDVTHVYNYDFPRNIDVYVHRVGYIGRTGKTGTSVTLITQRDSKMAGELIKILDRANQSVPEDLVVMAEQYKLNQQKRHRETRSRKPGQRRKEFYFLS

SEQ ID NO: 256606 - DNA, 1896 bp, Artificial Sequence
  derived and/or modified sequence
atgtcacattgggcgcccgaatggaagagagcagaggcgaatcctagggacctgggggcctcttgggacgttagaggaagccgtggctctggctggagtggcccctttggccatcagggcccacgcgcggctgggagccgcgagccaccactgtgtttcaagatcaagaacaacatggtcggagtcgtgataggctactcaggcagcaaaatcaaagatctccagcatagtaccaacaccaagatccaaatcataaacggcgagtcagaagctaaagtgcggattttcggcaatagagaaatgaaagcaaaggctaaggccgccattgagaccctcattcgaaagcaagagtcatataatagcgagagttctgttgataatgcagcctctcagacgcctattgggcggaacctgggccgcaacgatattgttggagaagctgagcccctctctaactgggatcgaattagagctgccgtggttgaatgcgagaagcgcaagtgggctgacctgccacctgtgaaaaagaatttttacatcgaaagcaaagctacaagctgcatgagtgagatgcaagtgataaactggagaaaggaaaatttcaacattacctgcgatgacctcaagtctggggaaaagcggctgatacctaaacccacttgtcggttcaaagacgcatttcagcagtatcccgacctgctgaagtccatcatcagggtggggatcgtgaagcccactcctattcagagccaggcctggcccattattttgcaggggattgatttaattgttgtggcccaaaccgggactggtaagaccctgtcgtatttgatgcctggctttatacaccttgacagccagcctatttcgagagagcaaagaaacggccctgggatgttggtacttacgcccaccagggaactggctttgcacgtcgaagcagaatgctctaagtactcttataaaggcctgaagtctatctgtatctatggcggcaggaaccggaatggacagattgaagacatttctaagggagtagatatcattattgcaacccccggcaggttgaacgatttgcagatgaataactctgtgaacttgcgcagtataacttaccttgtgatagatgaggccgacaaaatgcttgatatggaatttgagcctcagattcggaaaatccttctggatgtgcgcccagatcgacagactgtaatgacttctgccacctggccagacactgtccgacagcttgcgctgagctacctcaaggacccaatgatagtgtacgttggcaacctcaacctcgtagccgtaaacaccgtgaaacagaacattatcgtgaccaccgaaaaggaaaaacgagccctgacacaggaatttgtggagaacatgagccccaatgacaaggtgatcatgtttgtcagccagaaacatattgccgatgacttgagctcagactttaacatccagggtatctccgctgagtccctccatggtaacagcgaacagtccgaccaagagagagctgtggaagattttaagtctggcaatataaagatcctcataacgaccgatatcgtttcccgtggactggatctgaatgacgtcacacatgtctacaactacgattttccccgtaatatagacgtgtacgtccaccgagtcggctacattggtagaacagggaaaacaggaacatctgtgacacttatcactcagagggattccaagatggcaggcgaactgatcaagattctcgatagggcaaatcagagcgtgcctgaagacctcgtggtgatggctgagcagtataagctcaatcaacaaaagcgccatcgggagacaagatcacggaagcctggccaacggagaaaagagttttactttctgagctag

SEQ ID NO: 256607 - DNA, 1896 bp, Artificial Sequence
  derived and/or modified sequence
atgagccactgggcccctgagtggaagagagctgaggccaacccccgggacctgggcgcctcctgggatgtgcggggcagccggggcagcggctggagcggccccttcggccaccagggccccagggctgctggcagccgggagccccccctgtgcttcaagatcaagaacaacatggtgggcgtggtgattggctacagcggcagcaagatcaaggacctgcagcacagcaccaacaccaagatccagatcatcaacggggagagcgaggccaaggtgcgcatcttcggcaaccgggagatgaaggccaaggccaaggccgccatcgagaccctcatcaggaagcaggagagctacaacagcgagagctctgtggacaatgctgccagccagacccccatcggcaggaacctgggcagaaatgacatcgtgggggaggccgagcccctgagcaactgggaccgcatccgggctgctgtggtggagtgtgagaagaggaagtgggccgacctgccccctgtgaagaagaacttctacatcgagagcaaggccaccagctgcatgtctgagatgcaggtgatcaactggaggaaagaaaacttcaacatcacctgtgatgacctgaagagcggggagaagaggctcatccccaagcccacctgccgcttcaaggatgccttccagcagtacccagacctgctgaagagcatcatccgggtgggcatcgtgaagcccacccccatccagagccaggcctggcccatcatcctgcagggcatcgacctgattgtggtggcccagacaggcaccgggaagaccctgagctacctgatgcctggcttcatccacctggacagccagcccatcagccgggagcagagaaatggacctggcatgctggtgctgacccccacccgggagctggccctgcacgtggaggctgaatgttccaagtacagctacaagggcctgaagagcatctgcatctacggcggcaggaacagaaatggccagatcgaggacatcagcaagggcgtggacatcatcatcgccaccccaggccgcctgaatgacctgcagatgaacaacagcgtgaacctgcggagcatcacctacctggtgattgatgaggccgacaagatgctggacatggagtttgagccccagatcaggaagatcctgctggatgtgcggccagaccggcagacagtgatgaccagcgccacctggccagacacagtgcggcagctggccctgagctacctgaaggaccccatgattgtgtatgtgggcaacctgaacctggtggccgtgaacacagtgaagcagaacatcatcgtgaccacagagaaggagaagagggccctgacccaggagtttgtggagaacatgagccccaatgacaaggtgatcatgtttgtgtcccagaagcacatcgcagatgacctgagcagtgacttcaacatccagggcatctctgctgagagcctgcacggcaacagcgagcagagcgaccaggagagagctgtggaggacttcaagagcggcaacatcaagatcctgatcaccacagacatcgtgtcccggggcctggacctgaatgatgtgacccacgtgtacaactatgacttccccaggaacattgatgtgtatgtgcaccgggtgggctacatcggccgcacaggcaagacaggcacctctgtgaccctcatcacccagagggacagcaagatggccggggagctgatcaagatcctggaccgggccaaccagagcgtgcctgaggacctggtggtgatggccgagcagtacaagctgaaccagcagaagaggcaccgggagaccaggagcaggaagccaggccagaggaggaaggagttctacttcctgtcctag

SEQ ID NO: 256608 - DNA, 1896 bp, Artificial Sequence
  derived and/or modified sequence
atgagccactgggcccccgagtggaagcgggccgaggccaacccccgggatctcggggcttcttgggatgtgcggggctctaggggttccggctggagtggaccctttggccaccagggtccccgggccgctgggtcccgcgagccaccactctgctttaaaataaaaaataacatggtcggagttgtcataggctattcagggtcgaagatcaaggatttgcagcattcaactaataccaagatccagatcatcaatggagaatccgaggcgaaggtccggatctttgggaacagggaaatgaaggctaaagccaaagccgcgattgaaaccctgatccgcaagcaggagtcgtataactccgaatcgtctgtagataatgctgcctcacagactcccattggccgcaacctcgggcgaaatgatatcgtcggggaggccgagcctctttcgaactgggacaggattcgcgctgccgtggtagagtgcgagaaaagaaagtgggcggacctccccccagtgaagaaaaacttttatatcgagtccaaggccacatcttgcatgtccgaaatgcaggtgataaactggcgtaaggaaaactttaatatcacctgcgacgacctcaagagcggagagaagcggcttattcctaagcctacttgtagattcaaagatgcttttcagcagtacccagatctgttgaagtccattattcgcgtcgggatcgttaaaccaacacctattcagagccaggcttggccgattatcttacagggcattgatcttattgtcgtcgctcagaccggaacaggaaagactctctcctacctgatgcctggcttcatccatctcgacagccagcctatctcccgtgaacagagaaacgggccagggatgctggttctcacccccaccagggagttggcccttcacgtggaggccgagtgttcaaaatatagctacaagggtctgaagtcgatctgcatttacggtgggcgtaatcggaacgggcagattgaggacatctcgaaaggtgtggacattatcattgctacaccaggaaggcttaacgacttacagatgaacaatagcgtgaatttaaggtcgatcacctatctcgttatcgacgaggcagacaagatgctcgacatggaattcgagccacaaatccgtaaaatcctcctagatgtgagaccagaccgccagaccgtgatgacatccgccacttggcctgacacggttagacaacttgccctcagctacctgaaggaccctatgattgtttatgtaggaaacctaaatctggtggctgtgaataccgttaagcagaacattatcgtcacaaccgagaaagagaaacgagcactgactcaggaattcgtggaaaacatgtctccaaatgacaaagtgattatgtttgtgtctcagaagcacatcgccgatgatctaagttccgacttcaacatccaagggatttcagccgagtccctacacgggaactcggaacagtccgaccaggagagggctgtcgaggatttcaagtcagggaatatcaagattctcattaccaccgacattgtctcacggggactggatttgaacgacgtaacacacgtttataactatgattttccacgaaacatcgacgtctatgtgcatagagtcggctacattgggcggaccgggaaaacgggcacatccgtaactctcataacgcagcgggattcaaagatggcaggagagctaataaaaatactagatcgggccaatcagagcgtgcccgaggacttggtggttatggccgagcagtacaaattgaatcagcagaagcggcacagggagactcggagccggaaacctggtcagaggcgtaaagaattctacttcttgtcttag

SEQ ID NO: 256609 - DNA, 1896 bp, Artificial Sequence
  derived and/or modified sequence
atgtctcactgggcccctgagtggaagagagctgaggctaatccaagagacctgggcgctagttgggatgtgcggggaagtcgagggtccggctggtcagggccttttggacatcagggtccgcgagccgctggaagtcgagaaccccctctttgttttaagataaaaaacaacatggtgggagttgtgatcggctattccggaagtaaaataaaggacctccagcacagcactaacactaagattcagataattaacggggagtctgaggctaaggttagaattttcggtaacagggagatgaaagctaaagctaaagcagctattgaaactctgatccgcaaacaagaatcctataatagtgaaagcagtgtggacaatgccgctagtcagaccccgattgggaggaaccttggcagaaacgacatcgtcggcgaggcagaaccactgagtaactgggatagaatccgcgctgctgtcgtggagtgtgaaaaaaggaaatgggccgatcttccacccgtgaaaaagaacttttacatcgagagtaaggccactagctgcatgagtgagatgcaggtcattaactggcgtaaggaaaactttaacatcacatgtgatgacctaaagtcaggcgagaagagacttatacccaagcccacttgccggttcaaggacgccttccagcaataccccgacctattgaagtcgattattcgcgtcgggattgtgaagcccacccccatccagtcacaggcctggccaatcattcttcaggggattgatctcatcgtcgtggcccagacagggaccggcaaaacactgtcttacctgatgcccggattcatacatctggactctcaacctatctcgcgggagcaacgcaatggccctggcatgctggtgctgacgcctacaagggaactcgccctgcacgtggaggcagaatgctcaaaatatagctacaaggggctgaagtcaatctgtatctatggagggaggaacaggaatgggcagatcgaggacatttctaagggcgtggacatcattatcgccactcccggaaggctcaacgacctccagatgaacaacagcgttaacctaagatccataacatatctggtgatcgatgaagctgacaagatgctggatatggaattcgagccccagatcagaaagatcttgttggacgtgcgcccagatcgccagacagtgatgacttccgctacttggccagacacagtaaggcagctggctctgtcttacctaaaagaccctatgattgtttacgtcgggaatctgaatctcgtcgctgtcaacacggtcaaacagaacatcatcgtgaccactgaaaaagagaaacgagcactcacacaggagtttgttgagaatatgtcaccaaacgacaaagtcattatgtttgtgagccagaaacatattgccgatgatctctccagcgactttaatatccagggcatcagcgccgagtcgctccatgggaatagcgagcaatcggatcaggaaagggcagtggaagacttcaagtctggtaatattaaaatattgatcacgaccgacatcgtatcacggggactggacctgaatgatgtaactcacgtctataactacgatttcccaaggaatattgatgtgtacgtgcaccgagttggctacatcggtagaaccggcaaaaccggtacctcagtcacccttatcacacagcgagattccaagatggcgggagaactgatcaaaatcttggaccgtgcaaatcagtccgtgcctgaagatctggtggtgatggctgagcagtataaactgaatcaacagaagcgccatcgggaaacacgctcccgcaaaccaggccagagaaggaaagagttttactttctcagctag

SEQ ID NO: 256610 - DNA, 2118 bp, Artificial Sequence
  derived and/or modified sequence
gcagaaggtgacgggaaacaggccgcagacctgaacttccaaccgtatgtaggcgagaagccggtgccgatactcccactatcccacaatgtcccactgggccccagagtggaagagggcggaggctaatccaagagaccttggggccagctgggatgtcaggggcagcagaggcagtggctggagtggccccttcggccatcagggaccgagagcagcaggctcccgtgaaccaccactctgctttaaaataaagaacaatatggttggtgtggtcattggttacagtggatcaaaaataaaagatctacaacattcgacaaacactaaaatacagatcataaacggggaatctgaagcaaaagtcagaatttttggcaatagggaaatgaaagcaaaggccaaagcggctatagaaacacttattagaaaacaagaaagctacaactcagaatccagtgtggataatgctgcatcccaaacccctattggaagaaatctaggcagaaatgacattgttggagaagctgagccattgtcaaattgggatcgcattagggcagcagtcgtggagtgcgaaaagagaaaatgggcagatctaccaccagttaagaaaaacttttacatagaatccaaagcaacaagctgcatgtctgaaatgcaggtgattaactggagaaaggaaaatttcaacataacgtgtgatgacttgaaaagtggtgaaaagcgtctcattccaaaaccaacttgcaggtttaaagacgcttttcagcaataccctgatcttctgaaaagcataataagggtagggattgtaaagccaacgccaattcagtcacaggcatggccaattattctacaaggaatagatcttatagtagttgcacaaaccggaacagggaaaacattgtcctatctaatgcctgggtttattcatcttgattctcaaccaatatctagagagcaaaggaatgggcctgggatgctagtccttacacccactagagagttggctcttcacgtggaagctgaatgttcaaagtattcatataaaggtctcaaaagcatttgcatatatggtggtagaaacagaaatggacaaatagaagacattagcaaaggtgtagatatcattattgcaactcctgggaggctgaatgacctacaaatgaataactctgtcaacctaagaagcataacctacttggttatagatgaggcagataaaatgctggatatggaatttgaaccccagataaggaagattttattagatgtgcgcccagaccgacagactgttatgacaagtgcaacttggccagatactgtacgtcaactagcactttcttatttgaaagatcctatgattgtttatgttggtaatctgaatctagtggctgtaaatacagtgaagcaaaatataattgttaccacagaaaaagaaaaacgagctctcacccaagaattcgtagagaacatgtcacccaacgacaaagtcatcatgtttgtcagccaaaaacatattgctgatgacttgtcaagcgacttcaatatccaaggcatatctgcagaatcattacatggcaacagtgaacagagtgatcaagagcgagcagtagaggactttaaaagcggaaacataaagatactgattacaactgatatagtatcccgaggtcttgatcttaatgatgtcacacatgtatataattatgatttcccaaggaatattgacgtatatgtacacagagtagggtacattggacggacaggaaagactggcacatcagttaccctcatcactcagagagattcgaaaatggccggtgaattgattaaaattctggacagagcaaatcagagtgttccggaagatcttgtagtaatggctgagcaatacaagttaaatcaacaaaagaggcacagagaaacacgatcaagaaaacctggacaaagacgcaaggagttttattttttaagttgaaaagttgtaccaggctactggaagattccaggcatgttaaagatatgcagtattgaatatatgtaaggaagtattggaaacatactagccatttgaagacataactaattcttaaataatactgctaaactttc

SEQ ID NO: 256611 - DNA, 1896 bp, Artificial Sequence
  derived and/or modified sequence
atgagccactgggcccccgagtggaagagagccgaggccaaccccagagacctgggcgccagctgggacgtgagaggcagcagaggcagcggctggagcggccccttcggccaccagggccccagagccgccggcagcagagagccccccctgtgcttcaagatcaagaacaacatggtgggcgtggtgatcggctacagcggcagcaagatcaaggacctgcagcacagcaccaacaccaagatccagatcatcaacggcgagagcgaggccaaggtgagaatcttcggcaacagagagatgaaggccaaggccaaggccgccatcgagaccctgatcagaaagcaggagagctacaacagcgagagcagcgtggacaacgccgccagccagacccccatcggcagaaacctgggcagaaacgacatcgtgggcgaggccgagcccctgagcaactgggacagaatcagagccgccgtggtggagtgcgagaagagaaagtgggccgacctgccccccgtgaagaagaacttctacatcgagagcaaggccaccagctgcatgagcgagatgcaggtgatcaactggagaaaggagaacttcaacatcacctgcgacgacctgaagagcggcgagaagagactgatccccaagcccacctgcagattcaaggacgccttccagcagtaccccgacctgctgaagagcatcatcagagtgggcatcgtgaagcccacccccatccagagccaggcctggcccatcatcctgcagggcatcgacctgatcgtggtggcccagaccggcaccggcaagaccctgagctacctgatgcccggcttcatccacctggacagccagcccatcagcagagagcagagaaacggccccggcatgctggtgctgacccccaccagagagctggccctgcacgtggaggccgagtgcagcaagtacagctacaagggcctgaagagcatctgcatctacggcggcagaaacagaaacggccagatcgaggacatcagcaagggcgtggacatcatcatcgccacccccggcagactgaacgacctgcagatgaacaacagcgtgaacctgagaagcatcacctacctggtgatcgacgaggccgacaagatgctggacatggagttcgagccccagatcagaaagatcctgctggacgtgagacccgacagacagaccgtgatgaccagcgccacctggcccgacaccgtgagacagctggccctgagctacctgaaggaccccatgatcgtgtacgtgggcaacctgaacctggtggccgtgaacaccgtgaagcagaacatcatcgtgaccaccgagaaggagaagagagccctgacccaggagttcgtggagaacatgagccccaacgacaaggtgatcatgttcgtgagccagaagcacatcgccgacgacctgagcagcgacttcaacatccagggcatcagcgccgagagcctgcacggcaacagcgagcagagcgaccaggagagagccgtggaggacttcaagagcggcaacatcaagatcctgatcaccaccgacatcgtgagcagaggcctggacctgaacgacgtgacccacgtgtacaactacgacttccccagaaacatcgacgtgtacgtgcacagagtgggctacatcggcagaaccggcaagaccggcaccagcgtgaccctgatcacccagagagacagcaagatggccggcgagctgatcaagatcctggacagagccaaccagagcgtgcccgaggacctggtggtgatggccgagcagtacaagctgaaccagcagaagagacacagagagaccagaagcagaaagcccggccagagaagaaaggagttctacttcctgagctag

SEQ ID NO: 256612 - protein, 466 aa, Artificial Sequence [sequence omitted]

SEQ ID NO: 256613 - protein, 490 aa, Artificial Sequence
  derived and/or modified sequence
MLAATCNKIGSPSPSPSSLSDSSSSFGKGFHPWKRSSSSSSASCNVVGSSLSSFGVSGASRNGGSSSAAAAAAAAAAAAAALVSDSFSCGGSPGSSAFSLTSSSAAAAAAAAAAAASSSPFANDYSVFQAPGVSGGSGGGGGGGGGGSSAHSQDGSHQPVFISKVHTSVDGLQGIYPRVGMAHPYESWFKPSHPGLGAAGEVGSAGASSWWDVGAGWIDVQNPNSAAALPGSLHPAAGGLQTSLHSPLGGYNSDYSGLSHSAFSSGASSHLLSPAGQHLMDGFKPVLPGSYPDSAPSPLAGAGGSMLSAGPSAPLGGSPRSSARRYSGRATCDCPNCQEAERLGPAGASLRRKGLHSCHIPGCGKVYGKTSHLKAHLRWHTGERPFVCNWLFCGKRFTRSDELQRHLRTHTGEKRFACPVCNKRFMRSDHLSKHVKTHSGGGGGGGSAGSGSGGKKGSDTDSEHSAAGSPPCHSPELLQPPEPGHRNGLE

SEQ ID NO: 256614 - protein, 508 aa, Artificial Sequence
  derived and/or modified sequence
MATSLLGEEPRLGSTPLAMLAATCNKIGSPSPSPSSLSDSSSSFGKGFHPWKRSSSSSSASCNVVGSSLSSFGVSGASRNGGSSSAAAAAAAAAAAAAALVSDSFSCGGSPGSSAFSLTSSSAAAAAAAAAAAASSSPFANDYSVFQAPGVSGGSGGGGGGGGGGSSAHSQDGSHQPVFISKVHTSVDGLQGIYPRVGMAHPYESWFKPSHPGLGAAGEVGSAGASSWWDVGAGWIDVQNPNSAAALPGSLHPAAGGLQTSLHSPLGGYNSDYSGLSHSAFSSGASSHLLSPAGQHLMDGFKPVLPGSYPDSAPSPLAGAGGSMLSAGPSAPLGGSPRSSARRYSGRATCDCPNCQEAERLGPAGASLRRKGLHSCHIPGCGKVYGKTSHLKAHLRWHTGERPFVCNWLFCGKRFTRSDELQRHLRTHTGEKRFACPVCNKRFMRSDHLSKHVKTHSGGGGGGGSAGSGSGGKKGSDTDSEHSAAGSPPCHSPELLQPPEPGHRNGLE

SEQ ID NO: 256615 - DNA, 1527 bp, Artificial Sequence
  derived and/or modified sequence
atggccaccagcctgctgggcgaggagcccagactgggcagcacccccctggccatgctggccgccacctgcaacaagatcggcagccccagccccagccccagcagcctgagcgacagcagcagcagcttcggcaagggcttccacccctggaagagaagcagcagcagcagcagcgccagctgcaacgtggtgggcagcagcctgagcagcttcggcgtgagcggcgccagcagaaacggcggcagcagcagcgccgccgccgccgccgccgccgccgccgccgccgccgccgccctggtgagcgacagcttcagctgcggcggcagccccggcagcagcgccttcagcctgaccagcagcagcgccgccgccgccgccgccgccgccgccgccgccgccagcagcagccccttcgccaacgactacagcgtgttccaggcccccggcgtgagcggcggcagcggcggcggcggcggcggcggcggcggcggcagcagcgcccacagccaggacggcagccaccagcccgtgttcatcagcaaggtgcacaccagcgtggacggcctgcagggcatctaccccagagtgggcatggcccacccctacgagagctggttcaagcccagccaccccggcctgggcgccgccggcgaggtgggcagcgccggcgccagcagctggtgggacgtgggcgccggctggatcgacgtgcagaaccccaacagcgccgccgccctgcccggcagcctgcaccccgccgccggcggcctgcagaccagcctgcacagccccctgggcggctacaacagcgactacagcggcctgagccacagcgccttcagcagcggcgccagcagccacctgctgagccccgccggccagcacctgatggacggcttcaagcccgtgctgcccggcagctaccccgacagcgcccccagccccctggccggcgccggcggcagcatgctgagcgccggccccagcgcccccctgggcggcagccccagaagcagcgccagaagatacagcggcagagccacctgcgactgccccaactgccaggaggccgagagactgggccccgccggcgccagcctgagaagaaagggcctgcacagctgccacatccccggctgcggcaaggtgtacggcaagaccagccacctgaaggcccacctgagatggcacaccggcgagagacccttcgtgtgcaactggctgttctgcggcaagagattcaccagaagcgacgagctgcagagacacctgagaacccacaccggcgagaagagattcgcctgccccgtgtgcaacaagagattcatgagaagcgaccacctgagcaagcacgtgaagacccacagcggcggcggcggcggcggcggcagcgccggcagcggcagcggcggcaagaagggcagcgacaccgacagcgagcacagcgccgccggcagccccccctgccacagccccgagctgctgcagccccccgagcccggccacagaaacggcctggagtag

SEQ ID NO: 256616 - DNA, 1527 bp, Artificial Sequence
  derived and/or modified sequence
atggcaactagtctgctaggggaagaacctcgcctgggctcaacccctctggctatgctggccgccacttgcaataagattggcagcccaagcccttccccaagctcattgagcgactcttcgtcttcgtttggaaagggcttccatccgtggaaaagatcttctagtagctcatccgcatcatgtaatgtggttggcagtagcctctcgtcctttggcgtttcaggagcatcacgcaacggcggtagttccagcgccgccgctgccgcagcagcagccgcagcagctgccgcggcgctagtgtcagacagcttcagctgtggcggcagcccagggtcctctgctttcagtttaacctcctcgagtgctgcggcagcagcagccgccgctgcagcggccgcttcttctagccccttcgctaatgattactccgtgttccaggcccctggtgtttccggcgggtctggcggcggcgggggaggaggcggcggcggcagctccgcccacagtcaggatggaagccatcagccggtctttattagtaaagtgcatacttccgtggacggcttacagggaatctaccccagagtgggtatggcccacccctatgagtcctggtttaagccatcccaccccggtctaggggccgccggagaagtgggcagtgccggagcttcttcctggtgggacgtcggcgccgggtggattgatgtccagaaccctaacagcgccgccgccctgccggggtccctccatcccgcggctggcggcctgcaaacctccctgcacagcccactgggaggatacaatagcgattactcagggctgtctcattccgccttctctagcggcgcctctagtcatctgctttcacccgccgggcaacatctgatggacgggttcaagccagttttgcctggttcctatccggactcagccccctctcccctcgccggcgcaggcgggtctatgctgtccgcgggcccatccgccccgctgggggggtcccccagaagctctgcgaggaggtactcgggccgcgccacttgcgactgtcctaactgtcaagaggccgaaaggctaggcccagccggtgccagcctacggcggaaggggctccattcgtgccatattcctggttgcgggaaagtttatggaaagacctctcacctaaaggctcaccttcggtggcacaccggggagaggccttttgtttgcaattggcttttctgtggcaaacgctttactcgctccgatgagctgcagcggcatctccgtacacatacgggtgagaagcgctttgcatgtcccgtttgcaacaagcggttcatgcgatctgatcacctgtctaagcatgtcaagacacacagcggtggcggcggaggcggcggcagcgcaggctctggtagcggcggcaaaaaaggctcagatacagattcagagcacagcgccgctggatctcctccatgtcatagcccggagctactgcagccccccgaaccaggacataggaacggactggaatag

SEQ ID NO: 256617 - DNA, 1527 bp, Artificial Sequence
  derived and/or modified sequence
atggccaccagcctgctgggggaggagccccggctgggcagcacccccctggccatgctggccgccacctgcaacaagattggcagccccagccccagccccagcagcctgagtgacagcagcagcagctttgggaagggcttccacccctggaagaggagcagcagcagcagcagcgccagctgcaatgtggtgggcagcagcctgagcagctttggagtgtctggggccagcagaaatggaggcagcagcagcgctgctgctgctgctgctgctgctgctgctgctgctgctgccctggtgtctgacagcttcagctgtggcggcagccctggcagcagcgccttcagcctgaccagcagcagcgctgctgctgctgctgctgctgctgctgctgctgccagcagcagcccctttgccaatgactacagcgtcttccaggcccctggggtgtctgggggcagcggcggcggcggcggcggcggcggcggcggcagcagcgcccacagccaggacggcagccaccagcctgtgttcatcagcaaggtgcacacctctgtggatggcctgcagggcatctacccccgggtgggcatggcccacccctatgaatcctggttcaagcccagccaccctggcctgggcgctgctggggaggtgggcagcgctggggccagctcctggtgggatgtgggcgccggctggattgatgtgcagaaccccaacagcgctgctgccctgcccggcagcctgcaccctgctgctgggggcctgcagaccagcctgcacagccccctgggcggctacaacagcgactacagcggcctgagccacagcgccttcagcagcggggccagcagccacctgctgagccctgctggccagcacctgatggatggcttcaagcctgtgctgcccggcagctacccagacagcgcccccagccccctggccggggccggcggctccatgctgtctgctggccccagcgcccccctgggcggcagccccaggagcagcgcccggcgctacagcggccgggccacctgtgactgccccaactgccaggaggccgagcggctgggccctgctggggccagcctgcggaggaagggcctgcacagctgccacatccctggctgcggcaaggtgtatggcaagaccagccacctgaaggcccacctgcgctggcacactggagagcggccctttgtgtgcaactggctgttctgtgggaagcgcttcaccaggagtgatgagctgcagaggcacctgcggacccacactggagagaagagatttgcctgccctgtgtgcaacaagcgcttcatgagaagtgaccacctgagcaagcacgtgaagacccacagcggcggcggcggcggcggcggcagcgctggcagcggcagcggcggcaagaagggcagtgacacagacagcgagcacagcgctgctggcagccccccctgccacagccctgagctgctgcagcccccagagcccggccacagaaatggcctggagtag

SEQ ID NO: 256618 - DNA, 1527 bp, Artificial Sequence
  derived and/or modified sequence
atggccaccagcctgctgggcgaggagccccggctgggcagcacccctctggccatgctggctgctacctgtaacaaaatcggctctccctcaccatctccctcttcactctcagattccagttcatccttcggcaagggcttccatccttggaagagatcctcatcaagctcgagtgcaagctgtaatgtagtgggaagcagcctttcgtccttcggagtgagcggggcctcgcgtaatggaggaagcagttccgctgcagcagcggcggctgctgcggccgcggccgcagccgcgctggtgagcgattctttcagctgcggtgggtctccggggagctcggcattctctctgacttcatcttccgcggctgctgcagccgcagctgcggcggcagctgcctcatcaagtccattcgctaatgactatagtgtgttccaagctcccggagtttcaggcggatcagggggcgggggcggaggtggcggaggaggatcctccgcacacagccaggacggctctcaccagccagtttttattagcaaagtccacaccagcgttgatggcctgcagggcatttatcccagagttggcatggcacatccgtatgagtcctggtttaagcctagccatccgggactgggagccgccggcgaagttggatcagccggagcaagcagctggtgggacgtgggcgcaggatggatagatgtgcagaaccccaatagcgccgcagccctcccgggatctctccatcctgctgcaggggggctgcagacaagcctgcattctccgctgggcggttataacagcgattatagcgggttgagtcattctgccttctcatccggagcctccagccacctgctgtcccccgccggccagcacctcatggatgggttcaagcctgtgcttccaggatcttaccctgacagcgccccatcccctctcgctggggccggcggctccatgttgtctgctggtccttctgcccccttgggcgggagtcccagatcctccgcaagacggtactccggcagagccacatgtgattgtcccaactgccaggaggccgaacggctcggtccagctggcgcaagcctgcgccggaagggcctccatagctgtcatattcccggctgcggcaaggtgtacgggaaaacatctcatctgaaagctcatctgcgatggcacactggcgaacgcccttttgtgtgcaactggttgttttgcggtaagagattcaccagaagcgatgagctccagcggcacctgcggacccacacgggtgaaaaacgtttcgcttgtcccgtttgcaacaagcgatttatgcggagtgaccatctcagtaagcacgtgaaaactcatagcgggggcggaggggggggaggaagcgctgggagcggtagcggcgggaaaaagggctcagacaccgacagcgagcatagcgcggctggctctccaccttgccacagcccagaattactgcagccacccgaacccggacatcgcaatggccttgaatag

SEQ ID NO: 256619 - DNA, 1527 bp, Artificial Sequence
  derived and/or modified sequence
atggcgacatcgctgctgggagaggagccccgtctcggctcaacaccactggctatgctggcagcaacatgcaacaaaatcggctcgccaagtccttccccttcctctctgtcagacagttctagctccttcggcaagggatttcacccctggaagcggtcatcttcctcctcctcagcatcctgcaacgtcgtgggctcttctcttagctcctttggtgtaagcggtgccagccgcaacggaggcagctcaagcgccgctgccgctgcagctgctgcagccgctgctgctgccgcattggtcagtgactcttttagctgtggaggatctccaggttcaagcgccttttccctgactagtagctctgcagcggcagcggcagcagccgcagcggctgccgcttcatcgagccctttcgctaacgattacagcgtttttcaagcgcctggtgtttccggaggatccggcggtggtggcggagggggaggtgggggatctagtgcacattcacaggacggatctcaccaacctgtgtttatatccaaggtccatacatctgtcgacggcttacagggcatctatcccagagtcggtatggcgcacccctacgaatcctggtttaagccctcccaccccggtcttggtgcagctggtgaagtgggtagcgccggagcgagctcctggtgggatgtcggtgctggctggattgacgttcaaaatccaaactccgcagcagccctccccggatcgctgcatcccgctgcaggcggactccagacatccctgcatagtccattaggaggttataactctgactattctgggctttctcattcagcctttagcagtggagcaagttcacacctgcttagtccagcaggtcagcacctcatggacggcttcaagcccgtgctcccgggtagttacccagattcagccccatcacctttagccggtgcgggaggatcaatgctgtctgcgggaccctctgctcctctcggtggcagcccaagaagttccgcaaggcgttactcagggagggccacctgcgattgtcctaattgccaagaagcggaaagacttgggccagccggtgcatctctgcgccgtaagggactacattcttgccatatccctggatgtgggaaagtgtacggcaagacttcccacctgaaagctcacctgagatggcataccggcgagcgcccatttgtgtgtaactggctgttttgcgggaaacgatttacgcgctcagacgagttgcagcggcatctccgcacgcatacaggagaaaagaggttcgcctgcccagtgtgcaacaaaagatttatgagaagtgatcatctgagcaagcatgtcaagactcactctggtgggggaggcggaggcggatcagccggtagcggaagtggtggtaaaaaagggtctgacacagacagtgagcactctgccgcaggcagtcccccttgtcactcacccgaactgctccaaccacctgagccaggccatcgtaatgggctggagtag

SEQ ID NO: 256620 - DNA, 1714 bp, Artificial Sequence
  derived and/or modified sequence
attgtattgcacacctctaaaaaaaacactgcctctgatttatcaatataaaaaagatcctctgagaggaggagggcacttttgtgtgatggcaacttcacttctagggcgtggtgcttgctcccgaatcagacgccggcagccaaacttgtcccctcctgtagagtaggaagcggccgggcgccggggctgttgggggtgccaggaagaaccgaggttgggatcgactcctctggccatgcttgccgctacctgtaataagataggcagccccagcccgtctccctcctccctctcggacagctcttcttccttcggcaaaggcttccacccctggaaacgctcctcgtcctcttcttccgccagctgcaacgtagtgggttccagtctctcaagcttcggcgtgtccggggcctccaggaacggcggctcgtcctcggcggctgcggcggccgcggcagcagccgcggctgccgcggccctggtgtccgactcgttcagctgcggcggctcgcctggctccagcgccttctccctcacctccagcagcgccgcagccgccgccgccgccgccgcagccgccgcctccagctcgcccttcgccaacgactactctgttttccaggcccccggagtttccgggggcagcggcggcggcggcgggggcggcggcggcggctcctccgcgcactcgcaggacggctcccaccagccggtgttcatctccaaggtgcacacctctgtggacgggctgcagggcatctacccgcgggtgggcatggcgcacccgtacgagtcgtggtttaagccctcgcacccgggcctgggtgctgcgggcgaggtgggctcggccggcgcctccagctggtgggacgtgggggccggctggatcgacgtgcagaacccgaacagcgcggctgcgctgcccggctcgctgcaccctgccgccggggggctccaaacctcgctgcactcgccgctcggaggctacaactcggattactcgggcctgagtcactcggccttcagcagcggcgcctcctcgcacctgctcagccccgccgggcagcacctcatggacggcttcaagccagtgctacccggctcctacccggactcggccccgtcgccgctggccggcgcggggggctccatgttgagcgctgggccttcggcgccgctggggggctccccgcgctcctcagctcgccgctactccggccgcgccacctgcgactgccccaactgccaggaggcagagcggctgggccctgccggggcgagcttgcggcgcaagggcctgcacagctgccacatcccgggctgcggcaaggtgtacggcaagacttcgcacctcaaggcgcacctgcgctggcacacgggcgagcggcccttcgtgtgcaactggcttttctgcggcaagcgcttcacgcgctccgacgagctgcagcggcacctgcggacccacaccggcgagaagcgcttcgcctgtccagtttgcaacaagcgcttcatgcgcagcgaccacctcagcaagcacgtgaagacgcacagtggcggcggcggcggcggcggctcggcgggctcgggcagcggcggcaagaagggcagcgacaccgacagcgagcacagcgccgcgggcagcccgccctgccactccccagagctgctgcagccccccgagcccgggcaccgcaacggcctagagtgacgc

SEQ ID NO: 256621 - DNA, 1618 bp, Artificial Sequence
  derived and/or modified sequence
attgtattgcacacctctaaaaaaaacactgcctctgatttatcaatataaaaaagatcctctgagaggaggagggcacttttgtgtgatggcaacttcacttctaggggaagaaccgaggttgggatcgactcctctggccatgcttgccgctacctgtaataagataggcagccccagcccgtctccctcctccctctcggacagctcttcttccttcggcaaaggcttccacccctggaaacgctcctcgtcctcttcttccgccagctgcaacgtagtgggttccagtctctcaagcttcggcgtgtccggggcctccaggaacggcggctcgtcctcggcggctgcggcggccgcggcagcagccgcggctgccgcggccctggtgtccgactcgttcagctgcggcggctcgcctggctccagcgccttctccctcacctccagcagcgccgcagccgccgccgccgccgccgcagccgccgcctccagctcgcccttcgccaacgactactctgttttccaggcccccggagtttccgggggcagcggcggcggcggcgggggcggcggcggcggctcctccgcgcactcgcaggacggctcccaccagccggtgttcatctccaaggtgcacacctctgtggacgggctgcagggcatctacccgcgggtgggcatggcgcacccgtacgagtcgtggtttaagccctcgcacccgggcctgggtgctgcgggcgaggtgggctcggccggcgcctccagctggtgggacgtgggggccggctggatcgacgtgcagaacccgaacagcgcggctgcgctgcccggctcgctgcaccctgccgccggggggctccaaacctcgctgcactcgccgctcggaggctacaactcggattactcgggcctgagtcactcggccttcagcagcggcgcctcctcgcacctgctcagccccgccgggcagcacctcatggacggcttcaagccagtgctacccggctcctacccggactcggccccgtcgccgctggccggcgcggggggctccatgttgagcgctgggccttcggcgccgctggggggctccccgcgctcctcagctcgccgctactccggccgcgccacctgcgactgccccaactgccaggaggcagagcggctgggccctgccggggcgagcttgcggcgcaagggcctgcacagctgccacatcccgggctgcggcaaggtgtacggcaagacttcgcacctcaaggcgcacctgcgctggcacacgggcgagcggcccttcgtgtgcaactggcttttctgcggcaagcgcttcacgcgctccgacgagctgcagcggcacctgcggacccacaccggcgagaagcgcttcgcctgtccagtttgcaacaagcgcttcatgcgcagcgaccacctcagcaagcacgtgaagacgcacagtggcggcggcggcggcggcggctcggcgggctcgggcagcggcggcaagaagggcagcgacaccgacagcgagcacagcgccgcgggcagcccgccctgccactccccagagctgctgcagccccccgagcccgggcaccgcaacggcctagagtgacgc

SEQ ID NO: 256622 - protein, 1655 aa, Artificial Sequence
  derived and/or modified sequence
MLKCIPLWRCNRHVESVDKRHCSLQAVPEEIYRYSRSLEELLLDANQLRELPKPFFRLLNLRKLGLSDNEIQRLPPEVANFMQLVELDVSRNDIPEIPESIKFCKALEIADFSGNPLSRLPDGFTQLRSLAHLALNDVSLQALPGDVGNLANLVTLELRENLLKSLPASLSFLVKLEQLDLGGNDLEVLPDTLGALPNLRELWLDRNQLSALPPELGNLRRLVCLDVSENRLEELPAELGGLVLLTDLLLSQNLLRRLPDGIGQLKQLSILKVDQNRLCEVTEAIGDCENLSELILTENLLMALPRSLGKLTKLTNLNVDRNHLEALPPEIGGCVALSVLSLRDNRLAVLPPELAHTTELHVLDVAGNRLQSLPFALTHLNLKALWLAENQAQPMLRFQTEDDARTGEKVLTCYLLPQQPPPSLEDAGQQGSLSETWSDAPPSRVSVIQFLEAPIGDEDAEEAAAEKRGLQRRATPHPSELKVMKRSIEGRRSEACPCQPDSGSPLPAEEEKRLSAESGLSEDSRPSASTVSEAEPEGPSAEAQGGSQQEATTAGGEEDAEEDYQEPTVHFAEDALLPGDDREIEEGQPEAPWTLPGGRQRLIRKDTPHYKKHFKISKLPQPEAVVALLQGMQPDGEGPVAPGGWHNGPHAPWAPRAQKEEEEEEEGSPQEEEVEEEEENRAEEEEASTEEEDKEGAVVSAPSVKGVSFDQANNLLIEPARIEEEELTLTILRQTGGLGISIAGGKGSTPYKGDDEGIFISRVSEEGPAARAGVRVGDKLLEVNGVALQGAEHHEAVEALRGAGTAVQMRVWRERMVEPENAVTITPLRPEDDYSPRERRGGGLRLPLLPPESPGPLRQRHVACLARSERGLGFSIAGGKGSTPYRAGDAGIFVSRIAEGGAAHRAGTLQVGDRVLSINGVDVTEARHDHAVSLLTAASPTIALLLEREAGGPLPPSPLPHSSPPTAAVATTSITTATPGVPGLPSLAPSLLAAALEGPYPVEEIRLPRAGGPLGLSIVGGSDHSSHPFGVQEPGVFISKVLPRGLAARSGLRVGDRILAVNGQDVRDATHQEAVSALLRPCLELSLLVRRDPAPPGLRELCIQKAPGERLGISIRGGARGHAGNPRDPTDEGIFISKVSPTGAAGRDGRLRVGLRLLEVNQQSLLGLTHGEAVQLLRSVGDTLTVLVCDGFEASTDAALEVSPGVIANPFAAGIGHRNSLESISSIDRELSPEGPGKEKELPGQTLHWGPEATEAAGRGLQPLKLDYRALAAVPSAGSVQRVPSGAAGGKMAESPCSPSGQQPPSPPSPDELPANVKQAYRAFAAVPTSHPPEDAPAQPPTPGPAASPEQLSFRERQKYFELEVRVPQAEGPPKRVSLVGADDLRKMQEEEARKLQQKRAQMLREAAEAGAEARLALDGETLGEEEQEDEQPPWASPSPTSRQSPASPPPLGGGAPVRTAKAERRHQERLRVQSPEPPAPERALSPAELRALEAEKRALWRAARMKSLEQDALRAQMVLSRSQEGRGTRGPLERLAEAPSPAPTPSPTPVEDLGPQTSTSPGRLPLSGKKFDYRAFAALPSSRPVYDIQSPDFAEELRSLEPSPSPGPQEEDGEVALVLLGRPSPGAVGPEDVALCSSRRPVRPGRRGLGPVPS

SEQ ID NO: 256623 - DNA, 4968 bp, Artificial Sequence
  derived and/or modified sequence
atgctgaaatgcatacccttgtggaggtgcaatcgtcatgtcgagagcgtggacaagcgccactgttcactgcaagctgtaccggaggaaatttacagatattctagatccttagaggaactcttgttggacgcaaaccagctgagagagttgcctaagcctttttttcggcttctgaacctgcgaaagttaggcctctctgacaatgagattcaaagacttcctccggaggttgctaacttcatgcagttggtggagctggatgtatctagaaatgacataccagagataccagagtccattaagttctgtaaagctctggagatcgccgatttttccggaaacccactgagccggctgccagatggcttcacgcagctgcgctcactggcgcacctagctctgaacgatgtgagccttcaagccctgccaggagacgttggaaacctggctaacctcgtgactttggaactcagagagaatctgctcaaatctctgcctgcttctctgtcctttctcgtcaaacttgagcaattagatctaggtggaaacgacctggaagtgctgcccgataccctcggtgccctccccaatcttagggaactctggctggatcgaaatcagctctcagcactaccccctgaacttggtaatctcagacgcctggtatgtcttgacgttagtgagaataggctggaagagctgccagcagagctcggcggtttagtcttacttacagatcttctactctcacagaacctgcttagacgacttccggacggaattggacagctgaaacagttgagtattttgaaggtcgaccagaacaggctgtgtgaggtaacggaggcgattggggactgcgaaaacctgtcagagctcatccttacagagaacctgctaatggccttgccacgttcgcttggaaagcttactaagctgacgaatctgaatgtcgatcgtaatcatttggaagctctgcctccagaaatcggcgggtgcgtcgccttatccgttctgtccttgagggacaacaggcttgccgtcctcccgcctgagctggcccacaccactgagttgcatgtgctcgatgttgcagggaacagactccaaagcctaccctttgctttaacacacttgaacctcaaagctttatggctggccgagaatcaggcccaaccaatgctcagattccagactgaggacgacgcgcgaaccggtgaaaaagtgcttacatgttatttacttcctcagcagccccctccgtcccttgaggatgctggacagcagggcagcctgtctgaaacgtggtccgatgcccctcctagtcgggtatccgtcatccaattccttgaggcaccaatcggggatgaggatgctgaagaagcagcggccgagaagagaggcctgcagaggagggccacacctcatccttccgaactgaaggtgatgaagaggagcatcgagggccgcagatcggaggcctgtccatgtcaacccgacagtggaagtccgcttcccgctgaagaggagaagcgtctctccgcggagtcaggtctgagcgaggattcccgtccttccgccagtaccgtgtcagaggctgagcccgagggcccgtctgccgaagcccaggggggcagccagcaggaggccaccacagcggggggagaggaggacgccgaagaggattaccaggagcccacagtgcacttcgccgaggatgccctactgcccggagacgatagagagattgaggaggggcagcctgaagcgccttggacgctgccaggaggacggcaaagactgatccggaaagacaccccacactacaagaaacatttcaagattagtaaactcccccagccagaggccgtggttgctctgttacaggggatgcagccagacggcgaaggtccagtcgcgcccggtggctggcacaacgggccgcacgccccgtgggcaccccgggcccagaaggaggaggaggaggaagaagaagggtccccacaggaagaagaggttgaggaagaggaagaaaacagggccgaagaagaggaagctagcacggaggaagaagacaaggagggggcagtagtgtccgccccttctgtgaagggcgtgagcttcgatcaggctaacaacctgttgatagagcccgccaggattgaggaggaggagcttaccctcactatcttacgtcagactgggggtcttggcataagtattgctggaggaaaaggcagtaccccctacaaaggagacgatgagggtattttcatctctcgggtgtccgaagagggacctgctgctcgcgctggggtcagagtaggcgacaagttgttagaagtcaatggcgttgccttacagggagccgagcaccacgaggcggtcgaggccttgcgtggggccgggacagctgtgcagatgcgggtgtggagggagcgcatggtcgaaccagagaatgcggtgaccatcactccgcttcgccccgaagacgattactctccgagagagaggcggggcggggggctgaggctgcccctactgccccctgaatccccagggccattgcgtcaacgccacgtcgcctgtctcgcacgttcagagaggggcctggggtttagcatagcaggcggcaaagggtctactccgtaccgcgctggagatgcggggattttcgtgtcaaggatcgctgagggtggggcagcccacagggcgggtaccctgcaggtcggtgatagggtgctgtctattaacggggtggatgtcaccgaggctaggcacgatcatgccgtgtctctgctgactgccgcctcccccactatcgctttgctgctggaacgcgaggcgggtgggcccctgcctcctagccctctaccccatagctctcccccgacagccgcagtcgcaacaacctcaataacaaccgccaccccaggggttcccgggctgccctcgcttgctccctcgttgctggctgccgcattggagggaccctatcccgtggaggaaattaggctgccgagagctggagggcctctcgggctttcaatagttggtggctctgatcattctagtcatccttttggagtgcaggagccaggcgtcttcatttcaaaagtgctgccacgggggcttgctgcgaggagcggtctaagagttggggaccggattctggccgttaacggacaggatgtgcgggacgcgactcaccaggaggccgtgtcagctctgttgaggccttgcctcgagttgtcccttttagtgaggagagatcctgccccgcccggtcttcgcgagctttgtatccagaaggcccccggagaaagattgggcatttcaatccgcggaggagcccgcgggcacgccgggaatccaagagatccgactgatgagggcatattcatatccaaagtgtccccaacgggggctgccggtcgtgacggccggcttcgggtgggccttaggttgctcgaggtaaaccagcaaagcctgttggggctcacacacggagaggctgtgcaactactgcgatctgtgggcgacacccttactgtacttgtgtgtgacggctttgaagcctccactgatgctgccctggaggtgtctcctggcgtgattgccaacccttttgccgcgggcatcggacatcgaaactctctggagagcattagctcgatagaccgagagttatcccccgaggggcctggaaaggaaaaggaactgccaggccagaccctccactgggggccggaagctaccgaggctgctggccgcggccttcaaccgctgaagctcgactaccgggccctggccgcagtgccttctgcaggaagcgtccaaagagtgccatcaggggcagcaggcgggaaaatggccgagagtccatgcagccccagcgggcaacaaccaccaagccccccgtctcctgacgaattacctgcaaacgtcaagcaagcataccgcgccttcgcagccgtgcccaccagccatccacctgaagacgcacctgcccagcctcctacacccggccccgcagcatccccagaacaactgagtttccgggaacgacagaaatatttcgaattggaggtgcgtgtaccacaggccgaaggtcccccgaaaagagtgtctcttgttggggcagatgatcttaggaagatgcaagaagaggaggcccgcaaactccagcagaagagggcccagatgttgcgcgaggccgccgaagccggcgcggaggcacgacttgcgctggatggcgagactctgggtgaggaggagcaggaagatgaacagcctccttgggcttctccaagtccaacttctagacagagcccagctagcccaccacccctgggtgggggagcccctgtgcgcaccgctaaggcggaaagacggcatcaagagagattgcgagttcagtctccggaaccaccagcgcccgaacgggccctgagccccgccgagttacgtgcactggaagcagagaagagggcgctctggcgcgccgcaaggatgaagtccttggaacaagatgctttaagggcccagatggtcctgtcaaggtctcaggaaggcaggggaactagaggcccattagagcggctggcagaggcgccttctccagcaccaacaccaagtcctaccccagtggaagacctggggccccagacctcaacatctcccggtcgactgccgctatccggcaagaagttcgattaccgggccttcgcagccctccccagcagtcggcctgtgtacgacatacaatcccctgactttgctgaggagctgaggagcttggagccttcaccatctcctggcccccaggaagaagatggagaagtcgctttggtgctactgggtcggccctcacctggtgctgtgggacccgaggatgtggcattatgctcctccagacggccggtgcgcccagggcggagagggctcggccccgtcccttcctag

SEQ ID NO: 256624 - DNA, 4968 bp, Artificial Sequence
  derived and/or modified sequence
atgctgaagtgcatccccctgtggcgctgcaacagacatgtggagagcgtggacaagaggcactgcagcctgcaggccgtgcctgaggagatctaccgctacagccgcagcctggaggagctgctgctggatgccaaccagctgcgggagctgcccaagcccttcttccggctgctgaacctgaggaagctgggcctgagtgacaatgagatccagaggctgcccccagaggtggccaacttcatgcagctggtggagctggatgtgtccagaaatgacatccctgagatccctgagagcatcaagttctgcaaggccctggagattgctgacttcagcggcaaccccctgagccggctgcctgatggcttcacccagctgcggagcctggcccacctggccctgaatgatgtgtccctgcaggccctgcctggagatgtgggcaacctggccaacctggtgaccctggagctgcgggagaacctgctgaagagcctgcctgccagcctgtccttcctggtgaagctggagcagctggacctgggcggcaatgacctggaggtgctgcctgacaccctgggcgccctgcccaacctgcgggagctgtggctggacaggaaccagctgagcgccctgcccccagagctgggcaacctgcggcggctggtgtgcctggatgtgtctgaaaatcggctggaggagctgcctgctgagctgggcggcctggtgctgctgacagacctgctgctgagccagaacctgctgcggcggctgcctgatggcatcggccagctgaagcagctgagcatcctgaaggtggaccagaaccggctgtgtgaggtgacagaggccatcggggactgtgagaacctgtctgagctgatcctgacagagaacctgctgatggccctgcccaggagcctgggcaagctgaccaagctgaccaacctgaatgtggacaggaaccacctggaggccctgcccccagaaattggaggctgtgtggccctgtctgtgctgagcctgcgggacaaccggctggccgtgctgcccccagagctggcccacaccacagagctgcacgtgctggatgtggccggcaaccggctgcagagcctgccctttgccctgacccacctgaacctgaaggccctgtggctggccgagaaccaggcccagcccatgctgcgcttccagacagaagatgatgccaggactggagagaaggtgctgacctgctacctgctgccccagcagcccccacccagcctggaggatgctggccagcagggcagcctgtctgagacctggagcgatgccccacccagccgggtgtctgtcatccagttcctggaggcccccatcggagatgaagatgctgaggaggccgctgctgagaagaggggcctgcagaggcgggccaccccccaccccagcgagctgaaggtgatgaagaggagcattgagggcagaagaagtgaggcctgcccctgccagcctgacagcggcagccccctgcctgctgaggaggagaagaggctgtctgctgagagcggcctgtctgaggacagccggcccagcgccagcacagtgtctgaggccgagcctgagggccccagcgctgaggcccagggcggcagccagcaggaggccaccacagctggaggagaggaggatgctgaggaggactaccaggagcccaccgtgcactttgctgaagatgccctgctgcctggagatgaccgggagattgaggagggccagcctgaggccccctggaccctgcccggcggccggcagaggctcatcaggaaggacaccccccactacaagaagcacttcaagatcagcaagctgccccagcctgaggccgtggtggccctgctgcagggcatgcagccagatggagagggccctgtggcccctgggggctggcacaacggcccccacgccccctgggccccccgggcccagaaggaggaggaggaggaggaggagggcagcccccaggaggaggaggtggaggaggaggaggagaacagagctgaggaggaggaggccagcacagaggaggaggacaaggagggcgctgtggtgtctgcccccagcgtgaagggcgtgtcctttgaccaggccaacaacctgctgattgaaccagcccgcatcgaggaggaggagctgaccctgaccatcctgcggcagacaggaggcctgggcatcagcattgctgggggcaagggcagcaccccctacaagggagatgatgagggcatcttcatcagccgggtgtctgaggagggccctgctgcccgggccggcgtgcgggtgggggacaagctgctggaggtgaatggagtggccctgcagggcgctgagcaccacgaggccgtggaggccctgcggggagctggaacagctgtgcagatgagggtgtggagggagaggatggtggagccagaaaatgctgtgaccatcacccccctgcggccagaagatgactacagcccccgggagaggagaggaggcggcctgcggctgcccctgctgcccccagagagccctggccccctgcggcagagacatgtggcctgcctggcccggtctgagcggggcctgggcttcagcattgctgggggcaagggcagcaccccctacagagctggagatgctggcatctttgtgtccagaattgctgagggcggggccgcccaccgggccggcaccctgcaggtgggggacagagtgctgagcatcaatggagtggatgtgacagaggcccggcatgaccatgctgtgtccctgctgacagctgccagccccaccatcgccctgctgctggagcgggaggccggcggccccctgccccccagccccctgccccacagcagccccccaacagctgctgtggccaccaccagcatcaccacagccaccccaggagtgcccggcctgcccagcctggcccccagcctgctggccgccgccctggagggcccctaccctgtggaggagatccggctgccccgggccggcggccccctgggcctgagcatcgtgggcggcagtgaccacagcagccacccctttggagtgcaggagcccggggtcttcatcagcaaggtgctgccccggggcctggccgcccggagcggcctgcgggtgggggaccgcatcctggccgtgaatggccaggatgtgagagatgccacccaccaggaggccgtgtctgccctgctgcggccctgcctggagctgagcctgctggtgcggcgggaccctgcccctcctggcctgcgggagctgtgcatccagaaggcccctggagagcggctgggcatcagcatccggggcggggcccggggccatgctggcaacccccgggaccccacagatgagggcatcttcatcagcaaggtgagccccaccggggctgctggaagagatggccgcctgcgggtgggcctgcggctgctggaggtgaaccagcagagcctgctgggcctgacccacggggaggccgtgcagctgctgcggtctgtgggggacaccctgactgtgctggtgtgtgatggctttgaggccagcacagatgctgccctggaggtgtcccctggggtgattgccaacccctttgctgctggcatcggccacaggaacagcctggagagcatcagcagcattgaccgggagctgagccctgagggccctgggaaggagaaggagctgcccggccagaccctgcactggggccctgaggccacagaggccgccggccggggcctgcagcccctgaagctggactaccgggccctggccgctgtgcccagcgctggctctgtgcagagggtgcccagcggggccgccggcggcaagatggccgagagcccctgcagccccagcggccagcagccccccagcccccccagcccagatgagctgcctgccaacgtgaagcaggcctaccgggcctttgctgctgtgcccaccagccaccccccagaagatgccccagcccagccccccaccccaggccctgctgccagccctgagcagctgtccttccgggagcggcagaagtactttgagctggaggtgcgggtgccccaggccgagggcccccccaagagggtgtccctggtgggcgcagatgacctgaggaagatgcaggaggaggaggccaggaagctgcagcagaagagggcccagatgctgcgggaggccgctgaggccggggctgaggcccggctggccctggatggagagaccctgggggaggaggagcaggaggatgagcagcccccctgggccagccccagccccaccagccggcagagccctgccagccccccacccctgggcggcggggcccctgtgaggacagccaaggccgagaggaggcaccaggagcggctgcgggtgcagagccctgagcccccagcccctgagcgggccctgagccctgctgagctgcgggccctggaggccgagaagagggccctgtggagggctgccaggatgaagagcctggagcaggatgccctgcgggcccagatggtgctgagccgcagccaggagggccggggcacccggggccccctggagcggctggccgaggcccccagccctgcccccacccccagccccacccctgtggaggacctgggcccccagaccagcaccagccctggccgcctgcccctgagcggcaagaagtttgactaccgggcctttgctgccctgcccagcagcaggcctgtgtatgacatccagagcccagactttgctgaggagctgcggagcctggagcccagccccagccctggcccccaggaggaggatggagaggtggccctggtgctgctgggccggcccagccctggagctgtgggcccagaagatgtggccctgtgcagcagccggcggcctgtgcggcctggaagaagaggcctgggccctgtgcccagctag

SEQ ID NO: 256625 - DNA, 4968 bp, Artificial Sequence
  derived and/or modified sequence
atgctgaagtgcatccccctgtggcggtgcaaccggcacgtggagagcgttgataaaagacattgctccttgcaggccgtcccagaggaaatttatcggtattcgagaagcctcgaggaactgctcctcgatgctaaccaactccgagagttacctaaaccgttctttagacttcttaacctgagaaagctggggctttccgataacgagattcagcgacttcctcccgaagtagccaatttcatgcagctggtcgagctggacgtttcgagaaatgacatccctgaaattccagagtccataaaattttgtaaagccctagagattgctgatttctcagggaaccctttaagtcgcttaccggatgggtttacccagctccggtcactggctcacctcgctctcaacgacgtaagtctgcaagcgctacccggcgacgtcggcaatttagccaatctcgttacactggagctgagagagaacctgctgaagtctctacccgcatctctcagcttcctggttaaactcgagcaactagatctgggcggaaatgacctagaggttctgcccgatacactgggcgccctgcccaacctgagagagctgtggctcgacagaaaccagttgtcggctctgccaccggaactggggaacttgagacgtcttgtgtgtcttgacgtgagcgaaaataggctggaggagctccctgcagaactcgggggactggtcctcctgactgatctcctgctgagccaaaatctgctgagacgcctacctgatggaataggacagctcaaacagttatccatactgaaggttgatcaaaatcgtctgtgcgaggtcacagaagcaatcggtgactgtgaaaatctgtccgagcttatacttacggaaaatctgctcatggcgctgccacggtccctcggaaaactgaccaaattaactaatctgaacgtggatcgcaaccacctggaagctttgccgcctgaaatcggcgggtgcgtagcgctaagcgttctcagtctgcgcgataatcgcctcgccgttctccctccagagctggctcacaccacagagcttcatgtgctggatgtggccgggaaccgtctacaaagcctgccattcgccttgacacatttgaacctaaaagccctgtggctggccgaaaaccaggcacagccaatgctgaggttccagactgaagatgatgccagaactggggagaaggtcctgacctgctatttgctacctcagcagcccccacccagtctcgaggacgctggccagcagggctctttatctgaaacctggtccgacgcgcccccctcacgcgtcagcgtgattcagttcctcgaagcccccatcggagatgaagacgccgaggaagctgccgccgagaagagggggctccagagacgcgcgacaccgcacccaagtgaactgaaagtcatgaagcgctccattgaaggtagacgctccgaggcctgcccatgccagccagacagcggatcccctcttccagccgaggaagaaaagcgtctgtctgccgagtctggtctctccgaggattcccggccgagtgcctccaccgtgagcgaagccgaacccgaaggacccagtgcagaagcccaaggcggctctcaacaagaagctaccaccgccggaggagaagaagatgctgaggaagattatcaggaacctacagtgcattttgccgaagacgcgctgcttcccggagacgaccgggaaattgaagaagggcagcctgaggccccttggactctcccgggtggtcggcagcggctcatccgaaaggatactccgcattacaagaaacatttcaagataagcaagctgcctcagccagaggcagtggtggcactgcttcagggcatgcagcccgacggtgaaggacccgtggcacccggtggctggcacaacggccctcatgccccttgggccccacgggctcagaaggaggaagaggaggaggaggagggctccccacaggaagaagaagtggaggaggaggaagaaaacagggctgaggaggaagaggcctcaaccgaagaggaagataaggagggcgcggtggtttccgccccatctgtgaagggggtgagttttgatcaagccaacaacttgttaatcgagccagccaggatcgaggaagaagagctgactctcaccattctgagacagacaggaggcctcggaattagtatcgccgggggcaagggatccactccatacaaaggcgacgatgaaggtatctttatctcgagggtctcagaggaaggcccagctgctcgggccggggtgcgcgtgggagataagttactggaggttaatggggttgctctgcagggggccgagcaccatgaggcggttgaagccttgaggggtgctggcaccgcagtgcagatgcgggtctggcgcgaacggatggtagaacccgaaaacgctgtcactattacaccattgagacccgaggacgactacagcccccgagagcgaagggggggcggtctgagattgcctctgctccccccagagtcaccaggtcctctacgacaacggcacgtcgcatgccttgcccggtcagagagagggctgggattcagtattgcaggaggtaaagggtccacgccataccgggccggcgacgccgggatctttgtgagccgcattgcagagggcggcgctgcacaccgagcggggaccctccaggttggggacagggtgctgtccataaatggcgttgacgtgaccgaagctagacacgaccacgctgtctccttgctcaccgccgcctcccccactattgccctgctgctggagagggaggctggcggacccctgcccccctctccactgccccattcgtcccccccaaccgcggctgtcgccacaacctcaataacaacagcgacaccaggggttcccggactgccaagtctggctccaagcttgctggccgcagcactggagggaccatatccggtcgaggaaattcgcctgcctcgcgcgggcggccccctcggacttagcatcgtaggagggagcgaccactcttcccacccctttggcgtccaggaaccaggagtcttcataagtaaagtgctgcctcgcggacttgcagcacgtagtggcctgcgggtgggagacagaatcctggctgtcaatgggcaggacgtgcgcgatgctacccatcaggaagccgtgagtgccctgctgagaccctgccttgagcttagtctcctggtcaggagggatcctgcaccacccggcctgcgtgaactgtgcatccagaaagccccaggcgaaaggctcggcatcagcatccgaggaggcgcaaggggccacgccggaaatccaagagatccaactgacgagggtatttttatcagtaaggtctcccccacaggggcagccggcagagatgggcgcctgagagtgggcctaagactgctggaagtgaatcagcaaagcctgttagggctgacccacggtgaggccgtccagctgcttcgatccgtgggtgacactctcactgttctcgtgtgtgacggatttgaggccagcacagacgccgcgctggaggtttctcctggtgtaatcgccaacccattcgccgctggcatcggccaccggaactcactggaatctatttcgtcaatcgatcgggaattgtcccccgagggacccgggaaggagaaagaattgcctggtcagacactgcattgggggcctgaggccacagaagcagctggtaggggtcttcagccactcaaactggattaccgcgcgctggccgccgtccctagtgcaggctccgtacagcgagttcctagcggcgctgctggagggaagatggctgagtcaccttgcagccccagcggacagcagcctccttcgccaccttctccggatgaactacctgccaatgtcaagcaagcgtatcgcgcctttgctgccgtgccgacctcccacccccctgaggacgctccagcgcagccccctacgcccggccctgccgcgagtccagaacagctcagtttccgggaaagacagaagtacttcgaactcgaggtcagagtgccacaggccgagggcccccccaagagggtctccctggttggcgctgatgatctccgaaagatgcaggaagaggaagctcgcaagcttcagcaaaagagggcccagatgctgcgcgaggctgccgaagctggggctgaggcccgcctggccctggacggggagaccttgggagaagaggaacaggaggacgaacagcccccgtgggcctccccatccccaacctcacgccaatctcccgccagcccccctcctttaggagggggcgcccccgtacggactgctaaggctgagagacggcatcaggaaagactccgggttcagagcccagagcccccagcccctgaaagagccttatcacccgctgagctacgcgctctggaagccgagaagagagccttatggcgcgctgcgaggatgaagagcctagaacaggacgcactgcgggcccagatggtcctgagtagaagtcaggagggacgcggtacacggggcccactcgagcgcttagccgaggcaccaagtcccgctcctacaccaagccctactcctgtggaagatctggggccccagacctccacatccccgggcaggctccccctgagcgggaaaaagttcgactatcgcgccttcgccgccctgccaagttctagacccgtatatgacattcagagcccagattttgccgaggaactccggagtttagagccatcaccttctcctggcccacaggaggaagacggggaggtggccttggtgctgcttggacgtccatctcccggagctgtcgggccagaggacgtggccctgtgcagcagtagaagaccagttcgccccgggagacgggggttgggccccgtaccgtcctag

SEQ ID NO: 256626 - DNA, 4968 bp, Artificial Sequence
  derived and/or modified sequence
atgctaaaatgtattccactctggcgttgcaatcgccatgttgagtccgtcgacaagcggcattgttccctgcaggcggttccagaggagatctacaggtattccaggtccctcgaggaacttctgctggacgctaatcagttacgcgagctgcctaagcctttcttccggttgttaaatctgagaaagctgggattgagtgataatgagattcaacggctcccccctgaggtggccaattttatgcagctcgtggagctggacgtgtctcggaatgacatcccagagattcccgaatcaatcaaattctgcaaggcattggaaatcgccgacttctcaggcaaccccctaagccgcctcccagatggctttactcagttgagatctctcgcacacctagctctgaatgatgtatccttgcaggccctccccggagatgtgggtaatctcgctaatctcgtcaccctggagctccgggagaacctgttgaagtcactgcctgccagcctcagtttcctagttaagctcgaacagctggatcttggcggaaacgaccttgaagttctccccgacactcttggtgctctaccaaatctgcgagagttgtggctcgatcgtaaccagctgtcagccctacctccagagctcggaaacctacgtagactggtctgtctcgatgtgtccgagaaccggctggaagagttgcccgcagagcttgggggacttgtcctactgaccgatctgttactgtctcagaatttgctgagaagattgcctgatggtattggacagctcaagcagctgtcaatacttaaggttgatcaaaacagactctgcgaagtaaccgaagcaatcggcgattgcgaaaacctgagtgaactgattctgacagagaatcttctgatggcgctgccgcgaagtctcggtaagctcacaaagctcacaaaccttaatgtagataggaaccatctcgaggctctgccgcctgaaatcgggggttgcgtggctttgtcagtcctctctctaagagataatagactggctgttttgcccccagagctggcccacaccactgagctccacgttctggatgttgccggtaaccgtcttcagtccctgccctttgcgctgactcacctaaacctgaaggccctgtggctagcggaaaaccaggcccaaccaatgctccggttccagactgaagatgacgctaggactggagagaaggtactaacttgttatctgcttccgcagcagcccccacctagccttgaggatgccggacagcagggaagcctttccgaaacctggagcgacgcccctccgtctcgggtgagtgtcatccaatttctggaggctcctatcggcgatgaagacgccgaggaagcggctgccgaaaagaggggcctgcagcggagagctaccccacatccctctgagctgaaggtgatgaagcgaagcatcgaagggaggaggagcgaggcctgtccctgccagcccgattcaggctcaccattgccagctgaggaggagaagcgcctgtctgcagagtctgggctgtccgaggatagtcgcccaagcgcatcaacagtttccgaggctgagcccgagggcccttctgcagaagctcagggaggttctcagcaggaggctaccacagctggcggagaggaagatgctgaggaagattaccaggagcctaccgtgcactttgcagaagatgccttgctgccgggagacgaccgagaaattgaggagggtcagccagaggcgccatggacattgcccggtggccgtcagcgactgattagaaaagatactcctcactataaaaaacacttcaaaatctccaagctcccacagccagaggccgttgtggcgctgctacaaggcatgcaacccgatggcgaaggacctgttgcaccgggaggttggcataatgggcctcacgccccttgggcccctcgggcacagaaggaggaagaggaggaagaagaaggatctccacaggaggaggaggtagaggaagaggaggaaaatagggccgaggaagaggaagcttctaccgaagaggaagacaaggaaggtgcggtggtcagtgcaccatccgtcaagggagtaagtttcgatcaagctaataacctgctgattgagcctgctcgcatcgaagaagaagagctcactctgaccatcttaaggcaaactggcggattgggtataagcattgcgggtgggaagggttcaacaccctacaagggagacgacgagggcatttttatcagtcgggtgagtgaagaggggcctgcagccagagctggtgtccgggttggagacaaacttctggaagtaaacggcgtcgctctacaaggcgctgaacatcatgaggcagtggaagcactgagaggcgcaggtaccgctgtgcagatgagggtctggcgggagcgcatggtggaaccagaaaacgctgtgactatcacgcccctcaggccggaagatgactattctccaagagaaagacgaggcggagggctgaggctgccactgctgccaccagagtctcccggtccgctccgtcagaggcatgtggcctgcttggctagaagcgagagaggcctgggcttttctattgctggaggtaaaggatccacaccatatagggccggagacgctggaattttcgttagcaggattgcagaaggtggggctgcccaccgggctgggactctccaggtgggagatagagtcctgagcatcaacggggtggatgtcaccgaagctcggcacgatcatgccgtcagtttgctgaccgccgcatctcccacaattgcgttactgcttgagagggaagctggcggtccgttgccaccttctcccctccctcattctagccctccgaccgcagccgtagccactaccagcatcactacggctacccccggtgtccccggattgccttctttagcgccaagcttgctggcagccgcactagagggtccatatcctgtggaggagatacgactgccgcgagccggtggtcccctgggactgtcgatcgtgggtggcagtgatcactcaagccatccgttcggcgtccaggaacccggagtatttatcagtaaagtgctgccacgcggtctggcagccaggtctggcctgagggtgggcgacagaatcctcgccgtgaatggacaggacgtcagagatgcaacccaccaggaggcagtttcagctctgctgaggccttgcctggagttgagccttttagtccgcagagacccagcgcctcccggactcagggaattgtgtattcagaaggctcccggagaacgccttggtattagcattaggggaggggcaagaggacatgccggtaatccccgagaccccacagacgaaggcattttcatttcgaaagtctctcctaccggggcagctgggagggatgggagattgagggtggggctgcgcctccttgaggtgaaccagcagtctctgcttgggttgacacacggggaagcggtccagctcctgaggtccgtgggcgacactctgaccgtgcttgtttgtgatggtttcgaggccagcaccgatgcggcactggaagtgagtccaggtgtcattgccaatccattcgccgctgggattggccacaggaactcactcgagtccatcagttctatagatcgtgagctgtctccggaaggaccgggaaaggaaaaagaactgcctggccaaacgctgcattgggggccagaggctaccgaggctgcaggacgtggactacagccgctgaagttagactatagagccctggccgcagtgccaagcgcaggaagtgtgcaacgagtaccttccggcgcagctggcggtaagatggccgaatccccatgctcacctagtggccagcaaccccctagccccccaagccctgacgagctgcccgcaaacgtgaaacaggcttatcgggcattcgcagcagtccctacgtcccatccgccagaggacgcacccgctcagccaccaactccaggcccagcagctagtcccgagcagctgtcattccgcgaacgtcagaaatactttgagctggaggtccgggttcctcaggccgaaggtcctcctaaaagggtgagcttggtgggagccgacgaccttcggaagatgcaggaggaagaggcaaggaaactgcagcaaaaaagggcacagatgctgagggaggcggctgaggctggtgctgaggccagactcgcactagacggcgagaccctgggagaggaggaacaggaagacgaacagccgccttgggcctctccttctcctacatctaggcaaagcccagcttcccctcccccacttggaggtggtgcccctgtcaggacagcgaaggccgagcgcagacaccaggaacgccttcgggttcagtcccctgaacctccagccccagagcgcgctttatcacccgctgagctgagggccctggaagcagaaaagagggccctgtggagggctgcacggatgaaaagcctggaacaggacgcgctcagagcccaaatggtgctttcaagatcccaggaaggacggggaaccaggggacctttggaacgcctagccgaggcaccatccccggcacccaccccttcccccacgccggtggaagacctaggtccccagacaagcacgtcgccgggtaggcttcccctgtctggtaagaagtttgattacagagcattcgcagccctgccctccagccgccctgtttacgatatccagtcgcctgattttgcagaggagctacggtctctagaaccctcaccgagccctgggcctcaggaggaggacggcgaggttgctttagtgctcctgggacgtccctcacctggtgctgtgggccctgaggatgtggccttgtgttcatctcgtcgtccggtgcgccctggtcgcagagggcttgggccagtaccctcgtag

SEQ ID NO: 256627 - DNA, 5218 bp, Artificial Sequence
  derived and/or modified sequence
ccgcaccatgctcaagtgcatcccgctgtggcgctgcaaccggcacgtggagtcggtggacaagcggcactgttcgctgcaggccgtgccggaggagatctaccgctacagccgcagcctggaggagctgctgctcgacgccaaccagctgcgcgagctgcccaagccttttttccggctgctgaacttgcgcaagctgggcctgagcgacaacgagatccagcggttgcctcccgaggtggccaacttcatgcagctggtggagctggacgtgtcccggaacgatatccctgagatcccggagagcatcaagttctgcaaggctctggagatcgcggacttcagcgggaaccccctctccaggctccctgatggcttcactcagctgcgcagcctggctcacctggccctgaatgatgtgtctctgcaggcactgcccggggacgtgggcaacctcgccaacctggtgaccctggagctccgggagaacctgctcaagtccctgccagcgtccctgtcatttctggtcaagctggaacagctggatctgggaggcaacgatctggaagtgctgccagacactctgggggctctgcccaatcttcgggagctgtggcttgaccggaaccagctgtcagcactgcccccggagctcgggaacctgcggcgcctggtgtgcctggacgtgtcggaaaaccggctggaggagctgcctgctgagctcggcgggctggtgctgctcactgacctgctgctgtcccagaacctgctgcggaggctgcccgacggcatcggtcagctgaagcagctatccatcctaaaggtagaccagaatcggctgtgcgaggtgaccgaggccatcggggactgtgagaacctctctgagctgatcctcacggagaacctgctgatggccctgccccgctccctgggaaagctgactaagctgaccaacctcaacgtggaccggaaccacctcgaggcgctgccgcccgagatcgggggctgtgtggcactcagcgtcctctccttgagggacaaccgcctggccgtcctgccaccagagctggcccacacgacagagctgcacgtgctggacgtggcggggaaccgcctgcagagtctgccgttcgcgctcacccacctcaatctcaaggccctgtggctggcagagaaccaggcgcagcccatgctccggttccagacggaggatgatgcccggaccggcgagaaggtgctcacctgctacttgctgccccagcagcccccacccagcctcgaggatgctgggcagcaggggagcctctcggagacctggagcgatgccccgccgagccgcgtcagcgtcatccagttcctggaggcccccataggtgatgaggacgctgaggaagctgcagctgagaagcggggcctacagcgccgggccacacctcaccccagcgagctcaaggtgatgaagaggagcatcgaggggcggcggagcgaggcctgcccttgccagccagactctgggtcgcccttgcctgcagaggaggagaagcggctgagtgccgagtctggcctgagtgaagactctcgcccatctgccagcacagtctctgaggctgagcccgagggcccgtcggctgaggcacagggtgggagccagcaggaagccacgactgctggcggggaggaagacgccgaagaggactaccaggagcccacggtgcatttcgcagaggacgcactgctgcccggggatgacagggagatcgaggaggggcagcctgaggccccctggaccctgccaggcgggaggcagcggctcatccgcaaggacacacctcactacaaaaagcacttcaagatctccaagctgccccagcccgaggccgttgtggctctgctgcagggcatgcagcctgatggggagggccctgtggctcccgggggctggcacaatggcccccacgcaccctgggctcctcgggcccagaaggaggaggaggaggaggaagagggtagtcctcaggaggaggaggtagaggaggaggaggaaaacagggctgaagaggaagaggccagcactgaggaggaggacaaggagggggccgtggtttctgcgccctctgtcaagggagtgtcgtttgaccaggccaataacctgctgatagagcctgctcgcattgaggaggaagagctgaccctcactatcctgcggcagactgggggcctgggcatcagcattgcgggcggcaagggctccacaccctataagggggacgacgagggcatattcatctctcgggtgtccgaggaaggccctgcggcccgggctggagtccgtgtgggtgacaagctcctggaggtgaatggtgtggctctgcagggcgccgagcaccacgaggccgtggaggcgctccggggggccggcactgccgtgcagatgcgagtgtggcgggagcgcatggtggagcctgagaacgcggtcaccatcacgccgctgcggcccgaggatgattacagcccccgagagcggcggggaggggggctgcgcctgcccctgctcccgcctgagagccccgggcccctccgtcagcgccacgtggcctgcctggcacgcagcgagagggggctgggcttcagcattgctggtgggaaaggctccacaccctacagggctggtgatgcgggcatcttcgtctcccgcattgccgagggcggtgctgctcaccgcgcgggcacactgcaggttggcgaccgcgtcctctctattaatggagtggacgtgactgaggccaggcatgaccacgccgtctccctgctgaccgctgcctcccccaccatcgccctgctgttggagcgggaggctgggggccctcttcctcccagccctctgccacattcctcaccccccaccgctgctgttgccaccaccagcataaccactgccacccccggggtgcctgggttgccgagcctggcccccagcctgctggctgccgcgttggaagggccatacccagtggaggagatccgtctgccaagagctgggggccctctggggcttagtattgtcggaggctccgaccattccagccacccgtttggtgtccaggagcctggtgtgttcatctccaaggtgctcccgcggggcctggccgctcgcagcggcctgcgggttggggaccgcatcctggcagtgaacgggcaagacgtgcgggatgccacgcaccaagaagcagtcagtgccctgctccggccctgcctggagctgtcgctgctggtgcggagggacccggcacccccgggcctacgggaactgtgcatccagaaggcacctggggagaggctgggcatcagcatccgcgggggtgccaggggccacgctggcaacccccgcgaccccacagacgagggcatcttcatctccaaggtgagccccacgggggcagccgggcgcgacggtcggctgcgtgtgggtttgcggctgttggaggtgaaccagcagagcctgctgggcctgacgcacggcgaggcggtgcagctgctccgcagtgtgggcgacaccctcaccgtgctggtctgtgacggctttgaggccagcaccgacgcagccctggaggtgtccccaggtgtcattgccaacccctttgcggcaggcatcggccaccggaacagcctggagagcatctcttccatcgaccgggagctgagccctgagggcccaggcaaggagaaggagctgcctggacagaccctgcactgggggcccgaggccacagaagccgcaggtcggggtctgcagcccctgaagctggactaccgcgccctggccgccgtgcccagcgctggcagcgtgcagagggtaccgtctggagcagctggagggaagatggctgaatctccctgctcccctagtggccagcagccgccctccccgccttctccggatgagctgcccgccaatgtgaagcaggcctacagggccttcgcggccgtgcccacttctcacccgcctgaggatgcccctgcccagccccccacgcctgggcctgcagcctccccggagcagctgtccttccgggagcggcagaagtactttgagctggaggtgcgcgtgccccaggccgagggcccccctaagcgcgtgtccctggtgggtgctgacgacctgcggaagatgcaggaggaggaagccagaaaactacagcagaagagagcgcagatgctgcgggaggcggcagaggctggggccgaagcgaggctcgccctggacggggagacgctgggcgaggaggaacaggaggatgagcagccaccctgggccagcccgagccccacctcaaggcagagcccggcgtcccccccacccctgggaggtggcgccccggtgcggacggccaaagctgaacggcgccaccaggagcggctgcgcgtgcagagtccggagccaccggcacccgagcgtgccctgtcccctgccgagctccgggccctggaggccgagaagcgtgcgctgtggagggcagccaggatgaagtcattggaacaggacgctctccgagcacagatggtcctcagcaggtcccaggaaggccggggcacgcgggggcccctggagcgactggccgaggccccttcccctgcgcccaccccgtcgcccacccctgtggaagacctcggcccccagaccagcacctccccgggacgcctgcccttgtctggaaagaagtttgactacagggcctttgcggccctgccttcttccagacctgtctatgacatccagtcaccggactttgctgaggagttgaggtccctggaaccatctcccagccctggcccgcaggaggaggatggagaagtggctctggtgcttctgggcaggccctcacccggcgctgtgggccctgaagatgtggcactgtgcagcagccgccgccccgtaaggcctgggcgccgtggcctgggccctgtgccctcctagaggagcaggcacctcccccagacttggggtgggggccctgccagctccagcaccacccttgccccaagtcttttaacctgggtgttagcattttaaagagaccccacaggagttctggcctgtgactaactaactgccccaccccagccgagacctcggcgagactgtaactagtgatgtttgtacaaccaaagactctattttgtggtttaaggagaataaagttgactacattttacctcc

SEQ ID NO: 256628 - DNA, 4968 bp, Artificial Sequence
  derived and/or modified sequence
atgctgaagtgcatccccctgtggagatgcaacagacacgtggagagcgtggacaagagacactgcagcctgcaggccgtgcccgaggagatctacagatacagcagaagcctggaggagctgctgctggacgccaaccagctgagagagctgcccaagcccttcttcagactgctgaacctgagaaagctgggcctgagcgacaacgagatccagagactgccccccgaggtggccaacttcatgcagctggtggagctggacgtgagcagaaacgacatccccgagatccccgagagcatcaagttctgcaaggccctggagatcgccgacttcagcggcaaccccctgagcagactgcccgacggcttcacccagctgagaagcctggcccacctggccctgaacgacgtgagcctgcaggccctgcccggcgacgtgggcaacctggccaacctggtgaccctggagctgagagagaacctgctgaagagcctgcccgccagcctgagcttcctggtgaagctggagcagctggacctgggcggcaacgacctggaggtgctgcccgacaccctgggcgccctgcccaacctgagagagctgtggctggacagaaaccagctgagcgccctgccccccgagctgggcaacctgagaagactggtgtgcctggacgtgagcgagaacagactggaggagctgcccgccgagctgggcggcctggtgctgctgaccgacctgctgctgagccagaacctgctgagaagactgcccgacggcatcggccagctgaagcagctgagcatcctgaaggtggaccagaacagactgtgcgaggtgaccgaggccatcggcgactgcgagaacctgagcgagctgatcctgaccgagaacctgctgatggccctgcccagaagcctgggcaagctgaccaagctgaccaacctgaacgtggacagaaaccacctggaggccctgccccccgagatcggcggctgcgtggccctgagcgtgctgagcctgagagacaacagactggccgtgctgccccccgagctggcccacaccaccgagctgcacgtgctggacgtggccggcaacagactgcagagcctgcccttcgccctgacccacctgaacctgaaggccctgtggctggccgagaaccaggcccagcccatgctgagattccagaccgaggacgacgccagaaccggcgagaaggtgctgacctgctacctgctgccccagcagcccccccccagcctggaggacgccggccagcagggcagcctgagcgagacctggagcgacgccccccccagcagagtgagcgtgatccagttcctggaggcccccatcggcgacgaggacgccgaggaggccgccgccgagaagagaggcctgcagagaagagccaccccccaccccagcgagctgaaggtgatgaagagaagcatcgagggcagaagaagcgaggcctgcccctgccagcccgacagcggcagccccctgcccgccgaggaggagaagagactgagcgccgagagcggcctgagcgaggacagcagacccagcgccagcaccgtgagcgaggccgagcccgagggccccagcgccgaggcccagggcggcagccagcaggaggccaccaccgccggcggcgaggaggacgccgaggaggactaccaggagcccaccgtgcacttcgccgaggacgccctgctgcccggcgacgacagagagatcgaggagggccagcccgaggccccctggaccctgcccggcggcagacagagactgatcagaaaggacaccccccactacaagaagcacttcaagatcagcaagctgccccagcccgaggccgtggtggccctgctgcagggcatgcagcccgacggcgagggccccgtggcccccggcggctggcacaacggcccccacgccccctgggcccccagagcccagaaggaggaggaggaggaggaggagggcagcccccaggaggaggaggtggaggaggaggaggagaacagagccgaggaggaggaggccagcaccgaggaggaggacaaggagggcgccgtggtgagcgcccccagcgtgaagggcgtgagcttcgaccaggccaacaacctgctgatcgagcccgccagaatcgaggaggaggagctgaccctgaccatcctgagacagaccggcggcctgggcatcagcatcgccggcggcaagggcagcaccccctacaagggcgacgacgagggcatcttcatcagcagagtgagcgaggagggccccgccgccagagccggcgtgagagtgggcgacaagctgctggaggtgaacggcgtggccctgcagggcgccgagcaccacgaggccgtggaggccctgagaggcgccggcaccgccgtgcagatgagagtgtggagagagagaatggtggagcccgagaacgccgtgaccatcacccccctgagacccgaggacgactacagccccagagagagaagaggcggcggcctgagactgcccctgctgccccccgagagccccggccccctgagacagagacacgtggcctgcctggccagaagcgagagaggcctgggcttcagcatcgccggcggcaagggcagcaccccctacagagccggcgacgccggcatcttcgtgagcagaatcgccgagggcggcgccgcccacagagccggcaccctgcaggtgggcgacagagtgctgagcatcaacggcgtggacgtgaccgaggccagacacgaccacgccgtgagcctgctgaccgccgccagccccaccatcgccctgctgctggagagagaggccggcggccccctgccccccagccccctgccccacagcagcccccccaccgccgccgtggccaccaccagcatcaccaccgccacccccggcgtgcccggcctgcccagcctggcccccagcctgctggccgccgccctggagggcccctaccccgtggaggagatcagactgcccagagccggcggccccctgggcctgagcatcgtgggcggcagcgaccacagcagccaccccttcggcgtgcaggagcccggcgtgttcatcagcaaggtgctgcccagaggcctggccgccagaagcggcctgagagtgggcgacagaatcctggccgtgaacggccaggacgtgagagacgccacccaccaggaggccgtgagcgccctgctgagaccctgcctggagctgagcctgctggtgagaagagaccccgccccccccggcctgagagagctgtgcatccagaaggcccccggcgagagactgggcatcagcatcagaggcggcgccagaggccacgccggcaaccccagagaccccaccgacgagggcatcttcatcagcaaggtgagccccaccggcgccgccggcagagacggcagactgagagtgggcctgagactgctggaggtgaaccagcagagcctgctgggcctgacccacggcgaggccgtgcagctgctgagaagcgtgggcgacaccctgaccgtgctggtgtgcgacggcttcgaggccagcaccgacgccgccctggaggtgagccccggcgtgatcgccaaccccttcgccgccggcatcggccacagaaacagcctggagagcatcagcagcatcgacagagagctgagccccgagggccccggcaaggagaaggagctgcccggccagaccctgcactggggccccgaggccaccgaggccgccggcagaggcctgcagcccctgaagctggactacagagccctggccgccgtgcccagcgccggcagcgtgcagagagtgcccagcggcgccgccggcggcaagatggccgagagcccctgcagccccagcggccagcagccccccagcccccccagccccgacgagctgcccgccaacgtgaagcaggcctacagagccttcgccgccgtgcccaccagccacccccccgaggacgcccccgcccagccccccacccccggccccgccgccagccccgagcagctgagcttcagagagagacagaagtacttcgagctggaggtgagagtgccccaggccgagggcccccccaagagagtgagcctggtgggcgccgacgacctgagaaagatgcaggaggaggaggccagaaagctgcagcagaagagagcccagatgctgagagaggccgccgaggccggcgccgaggccagactggccctggacggcgagaccctgggcgaggaggagcaggaggacgagcagcccccctgggccagccccagccccaccagcagacagagccccgccagccccccccccctgggcggcggcgcccccgtgagaaccgccaaggccgagagaagacaccaggagagactgagagtgcagagccccgagccccccgcccccgagagagccctgagccccgccgagctgagagccctggaggccgagaagagagccctgtggagagccgccagaatgaagagcctggagcaggacgccctgagagcccagatggtgctgagcagaagccaggagggcagaggcaccagaggccccctggagagactggccgaggcccccagccccgcccccacccccagccccacccccgtggaggacctgggcccccagaccagcaccagccccggcagactgcccctgagcggcaagaagttcgactacagagccttcgccgccctgcccagcagcagacccgtgtacgacatccagagccccgacttcgccgaggagctgagaagcctggagcccagccccagccccggcccccaggaggaggacggcgaggtggccctggtgctgctgggcagacccagccccggcgccgtgggccccgaggacgtggccctgtgcagcagcagaagacccgtgagacccggcagaagaggcctgggccccgtgcccagctag

SEQ ID NO: 256629 - protein, 426 aa, Artificial Sequence
  derived and/or modified sequence
MGLLSAPPCTQRITWKGLLLTASLLNFWNPPTTAQVTIEAQPTKVSEGKDVLLLVHNLPQNLTGYIWYKGQIRDLYHYITSYVVDGQIIIYGPAYSGRETIYSNASLLIQNVTQEDAGSYTLHIIMGGDENRGVTGHFTFTLYLETPKPSISSSKLNPREAMEAVSLTCDPETPDASYLWWMNGQSLPMSHRLQLSETNRTLFLLGVTKYTAGPYECEIRNPVSASRSDPFTLNLLPKLPKPYITINNLKPRENKDVLNFTCEPKSENYTYIWWLNGQSLPVSPRVKRPIENRILILPSVTRNETGPYQCEIRDQYGGIRSYPVTLNVLYGPDLPRIYPSFTYYRSGEVLYLSCSADSNPPAQYSWTINGKFQLSGQKLFIPQITTKHSGLYACSVRNSATGKESSKSMTVKVSGKRIPVSLAIGI

SEQ ID NO: 256630 - DNA, 1281 bp, Artificial Sequence
  derived and/or modified sequence
atggggttgctgtccgctcccccatgtacgcagagaatcacctggaagggcctactgctgactgcttcccttctgaatttttggaatccccctaccacggcgcaggttactattgaggcacagccaacgaaggtgtctgaagggaaggatgtcctgttactcgtgcataatttgcctcagaacctgaccggatacatatggtacaagggtcaaattagagacctttatcattatatcacttcttatgtagtggatggtcaaataatcatttacggacctgcctattcaggccgggagacaatttactcaaacgcatccctgctaattcagaacgttacacaggaggatgccggttcttacacactacacattattatgggcggggacgagaatagaggagttacggggcattttacctttacgttgtaccttgagacacccaagccaagcatcagctccagcaagctcaacccgcgcgaggccatggaggccgtgtccttgacctgcgatcccgaaacacccgatgcttcctatctgtggtggatgaatggccaaagcctgccgatgtcccatcggctccaacttagcgagacgaacaggaccctgttcctgctaggggtgacaaagtatacagccggcccctacgagtgcgagatcaggaaccctgtgtcagcgagtaggagcgacccttttaccctaaatcttttaccaaaactgccaaaaccttacattaccataaataacttaaaaccaagggagaataaagatgttctgaacttcacatgcgagcctaaaagtgagaattatacatacatttggtggctgaatgggcagtccctacccgtatcccccagagtcaagaggccaattgagaaccgcattctcatactcccgagcgtcacgcgaaatgagactggcccatatcagtgcgagatcagagaccagtacggcggcattcgctcttatccagtgacactcaatgtcctgtatgggccagacctcccacgcatatatccttcatttacctattataggagcggggaggtcctttatctgtcatgctcagctgattctaatcctcccgcacagtattcatggactataaatgggaaatttcaattaagcggacagaagttatttatcccccaaattaccacaaaacactccggcttgtatgcatgttccgtgcgtaattccgccacaggtaaggagagctccaaatctatgacagtaaaagtctctgggaagcgtattccagtgtccttagccatcggaatctag

SEQ ID NO: 256631 - DNA, 1281 bp, Artificial Sequence
  derived and/or modified sequence
atgggcctgctgagcgccccaccctgcacccagaggatcacctggaagggcctgctgctgacagccagcctgctgaacttctggaacccccccaccacagcccaggtgaccatcgaggcccagcccaccaaggtgtctgagggcaaggatgtgctgctgctggtgcacaacctgccccagaacctgaccggctacatctggtacaagggccagatccgggacctgtaccactacatcaccagctatgtggtggatggccagatcatcatctacggccctgcctacagcggccgggagaccatctacagcaatgccagcctgctgatccagaatgtgacccaggaggatgctggcagctacaccctgcacatcatcatgggaggagatgagaacagaggagtgacaggccacttcaccttcaccctgtacctggagacccccaagcccagcatcagcagcagcaagctgaacccccgggaggccatggaggccgtgtccctgacctgtgaccctgagaccccagatgccagctacctgtggtggatgaatggccagagcctgcccatgagccaccggctgcagctgtctgagaccaacagaaccctcttcctgctgggcgtgaccaagtacacagctggcccctatgaatgtgagatccggaaccctgtgtctgccagcagaagtgaccccttcaccctgaacctgctgcccaagctgcccaagccctacatcaccatcaacaacctgaagccccgggagaacaaggatgtgctgaacttcacctgtgagcccaagtctgagaactacacctacatctggtggctgaatggccagagcctgcctgtgagcccccgggtgaagaggcccattgaaaatcgcatcctgatcctgcccagcgtgaccagaaatgaaacaggcccctaccagtgtgagatccgggaccagtatggaggcatccgcagctaccctgtgaccctgaatgtgctgtatggccctgacctgccccgcatctaccccagcttcacctactaccgcagcggggaggtgctgtacctgagctgcagcgctgacagcaaccccccagcccagtacagctggaccatcaatggcaagttccagctgagcggccagaagctgttcatcccccagatcaccaccaagcacagcggcctgtatgcctgcagcgtgagaaattctgccaccgggaaggagagcagcaagtccatgacagtgaaggtgtctgggaagagaattcctgtgtccctggccatcggcatctag

SEQ ID NO: 256632 - DNA, 1281 bp, Artificial Sequence
  derived and/or modified sequence
atgggcctgctgagcgcccccccctgcacccagcggatcacctggaagggcctgcttctcaccgcaagtcttctgaatttctggaacccacctaccacggcacaggtcacaattgaagcgcaacccacgaaggtaagcgagggcaaggacgtgttactgttggttcacaatctgccacagaacctgaccggttatatctggtacaaagggcagatcagggacctgtatcactacattacctcttacgtggttgatggccaaatcattatttatggacctgcctatagtggccgcgagaccatctacagcaatgcctcattgctcatccagaacgtgacacaggaagacgccggatcctacacacttcatattattatggggggcgacgaaaaccggggcgtgacgggccacttcacttttaccctttacttggagacacccaagccgtcaattagtagctcaaagctgaacccaagagaggccatggaggcggtctcattgacttgcgaccctgagacccctgatgcgagctatctgtggtggatgaacggacagtctctgccaatgagccacaggctacagttgagtgagacaaacagaaccctcttccttctcggggtaacaaaatatactgcaggtccctacgaatgtgagattcgaaaccctgtcagcgcaagccgatccgatcctttcacactgaatcttctccctaaactccccaaaccctacatcactatcaataacctcaagccgcgggagaacaaagacgtgttgaattttacctgcgaaccaaagagtgagaactacacatatatctggtggttgaatgggcaatccttaccggtttccccgagggtgaaacgtcccattgagaatcgcattctaatactgccttccgtcactagaaacgagactggaccctatcaatgcgaaattcgtgaccaatatgggggcatccggagttatccggttacactgaatgtgctatatgggcccgatctgcccagaatctacccatcattcacatactaccggagcggggaggtcctctacctgtcgtgttctgcagatagcaatcctccagcccagtactcttggaccatcaatggcaagttccagcttagcgggcagaagctcttcatcccccagattactacgaaacattctggactgtacgcctgcagtgtacgcaactctgccaccggcaaagagtctagcaaatctatgactgtcaaagtttccggaaagcgcataccggtcagtctggcgatcggcatttag

SEQ ID NO: 256633 - DNA, 1441 bp, Artificial Sequence
  derived and/or modified sequence
cagaaggaggcaggacagcactgctgagagctgtgctcaggaagcttctggatcctaggctcatctccacagaggagaacacacagacagcagagaccatggggctcctctcagcccctccctgcacacagcgcatcacctggaaggggctcctgctcacagcatcacttttaaacttctggaacccacccacgactgcccaagtcacgattgaagcccagccaaccaaagtttctgaggggaaggatgttcttctacttgtccacaatttgccccagaatcttactggctacatctggtacaaagggcaaatcagggacctctaccattacattacatcatatgtagtagacggtcaaataattatatatgggcctgcatacagtggacgagaaacaatatattccaatgcatccctgctgatccagaatgtcacccaggaagacgcaggatcctacaccttacacatcataatgggaggtgatgagaatagaggagtaactggacatttcaccttcaccttatatctggagactcccaagccctccatctccagcagcaaattaaaccccagggaggccatggaggctgtgagcttaacctgtgatcctgagactccggacgcaagctacctgtggtggatgaatggtcagagcctccctatgtctcacaggttgcagttgtctgaaaccaacaggaccctctttctattgggtgtcacaaagtacactgcaggaccctatgaatgtgaaatacggaacccagtgagtgccagccgcagtgacccattcaccctgaatctcctcccgaagctgcccaagccctacatcaccatcaacaacttaaaacccagggagaataaggatgtcttaaacttcacctgtgaacctaagagtgagaactacacctacatttggtggctaaatggtcagagcctcccggtcagtcccagggtaaagcgacccattgaaaacaggatcctcattctacccagtgtcacgagaaatgaaacaggaccctatcaatgtgaaataagggaccaatatggtggcatccgcagttacccagtcaccctgaatgtcctctatggtccagacctccccagaatttacccttcattcacctattaccgttcaggagaagtcctctacttgtcctgttctgcggactctaacccaccggcacagtattcttggacaattaatgggaagtttcagctatcaggacaaaagctctttatcccccaaattactacaaagcatagcgggctctatgcttgctctgttcgtaactcagccactggcaaggaaagctccaaatccatgacagtaaaagtctctggtaagcggatcccagtatccttggcaatagggatttaggtggagtctatctggccttcagggaagagtcaggaaaacatttttattcccagcctgcgtcc

SEQ ID NO: 256634 - DNA, 1281 bp, Artificial Sequence
  derived and/or modified sequence
atgggcctgctcagcgcaccaccgtgcacccagcgcataacttggaagggactcctgctaaccgcttcactactcaatttttggaatcctccgaccactgctcaggtcacaatcgaggcccagcccaccaaagtgagcgaaggcaaggatgttctgctgctggtccacaatctgccccagaacctgaccggatacatttggtacaagggacaaatccgtgacctctaccattacatcacatcctacgtggtggatggacagattatcatctacggacctgcgtattccggacgagaaactatatacagtaacgcatcccttctaatacagaacgtgactcaggaagacgccggatcctacacactccacatcatcatgggaggagatgagaaccggggtgttacagggcatttcacgtttactctgtacctggagacaccaaagccgagcatcagttcaagcaaactgaacccaagggaggcaatggaggccgtgtccctgacatgcgaccccgagacaccagatgcatcatacctttggtggatgaacgggcagtctctgcccatgtcacatcggctacaactgagtgagacaaacaggaccctgtttctccttggcgtgactaaatacacagcaggaccgtacgagtgtgagatccggaaccctgtgagtgcctctagaagcgacccgttcactctgaacctcctccctaaactgcctaaaccctacataacaataaacaacctgaaacccagggagaacaaggatgttctgaatttcacatgtgaacccaagagcgagaattatacgtatatttggtggctgaacggccagagcttgcccgtttcgcctcgcgtgaagagacccatagaaaatcggatcctgatcctcccatccgtgacccgcaacgaaaccggcccataccaatgcgagatacgagaccagtacggtggcattcgttcctaccccgtgaccctcaatgtcctgtacgggccagaccttcccaggatctatccaagtttcacgtactatagatcgggcgaggtcctctacttgagttgttcagccgattcgaatcctcccgcacagtactcatggacaattaatggcaagtttcagctgtccggccagaagctgttcatccctcaaataacaaccaagcattctggcctctatgcgtgtagtgtccgtaactcagctaccggaaaggagagctccaaaagcatgactgtgaaagttagcggcaagcgaatccccgtgagtctggcgatcggtatctag

SEQ ID NO: 256635 - DNA, 1281 bp, Artificial Sequence
  derived and/or modified sequence
atgggcctgctgagcgcccccccctgcacccagagaatcacctggaagggcctgctgctgaccgccagcctgctgaacttctggaacccccccaccaccgcccaggtgaccatcgaggcccagcccaccaaggtgagcgagggcaaggacgtgctgctgctggtgcacaacctgccccagaacctgaccggctacatctggtacaagggccagatcagagacctgtaccactacatcaccagctacgtggtggacggccagatcatcatctacggccccgcctacagcggcagagagaccatctacagcaacgccagcctgctgatccagaacgtgacccaggaggacgccggcagctacaccctgcacatcatcatgggcggcgacgagaacagaggcgtgaccggccacttcaccttcaccctgtacctggagacccccaagcccagcatcagcagcagcaagctgaaccccagagaggccatggaggccgtgagcctgacctgcgaccccgagacccccgacgccagctacctgtggtggatgaacggccagagcctgcccatgagccacagactgcagctgagcgagaccaacagaaccctgttcctgctgggcgtgaccaagtacaccgccggcccctacgagtgcgagatcagaaaccccgtgagcgccagcagaagcgaccccttcaccctgaacctgctgcccaagctgcccaagccctacatcaccatcaacaacctgaagcccagagagaacaaggacgtgctgaacttcacctgcgagcccaagagcgagaactacacctacatctggtggctgaacggccagagcctgcccgtgagccccagagtgaagagacccatcgagaacagaatcctgatcctgcccagcgtgaccagaaacgagaccggcccctaccagtgcgagatcagagaccagtacggcggcatcagaagctaccccgtgaccctgaacgtgctgtacggccccgacctgcccagaatctaccccagcttcacctactacagaagcggcgaggtgctgtacctgagctgcagcgccgacagcaacccccccgcccagtacagctggaccatcaacggcaagttccagctgagcggccagaagctgttcatcccccagatcaccaccaagcacagcggcctgtacgcctgcagcgtgagaaacagcgccaccggcaaggagagcagcaagagcatgaccgtgaaggtgagcggcaagagaatccccgtgagcctggccatcggcatctag

SEQ ID NO: 256636 - protein, 560 aa, Artificial Sequence
  derived and/or modified sequence
MFGIQESIQRSGSSMKEEPLGSGMNAVRTWMQGAGVLDANTAAQSGVGLARAHFEKQPPSNLRKSNFFHFVLALYDRQGQPVEIERTAFVGFVEKEKEANSEKTNNGIHYRLQLLYSNGIRTEQDFYVRLIDSMTKQAIVYEGQDKNPEMCRVLLTHEIMCRFFLKFFLKCNQNCLKNAGNPRDMRRFQVVVSTTVNVDGHVLAVSDNMFVHNNSKHGRRARRLDPSEATPCIKAISPSEGWTTGGATVIIIGDNFFDGLQVIFGTMLVWSELITPHAIRVQTPPRHIPGVVEVTLSYKSKQFCKGTPGRFIYTALNEPTIDYGFQRLQKVIPRHPGDPERLPKEVILKRAADLVEALYGMPHNNQEIILKRAADIAEALYSVPRNHNQLPALANTSVHAGMMGVNSFSGQLAVNVSEASQATNQGFTRNSSSVSPHGYVPSTTPQQTNYNSVTTSMNGYGSAAMSNLGGSPTFLNGSAANSPYAIVPSSPTMASSTSLPSNCSSSSGIFSFSPANMVSAVKQKSAFAPVVRPQTSPPPTCTSTNGNSLQAISGMIVPPM

SEQ ID NO: 256637 - DNA, 1683 bp, Artificial Sequence
  derived and/or modified sequence
atgtttggtatccaggaatccatacagcggtcgggcagcagcatgaaggaggaacctctggggagcggcatgaacgccgtgaggacgtggatgcagggagcaggagtgctagatgcaaatacagccgcccaaagtggagttggactcgcccgcgctcactttgaaaaacagccccccagtaatctccgcaaaagtaacttttttcattttgtccttgctctctatgaccggcaggggcagcccgtggagatcgagcggacagccttcgtgggcttcgtggagaaggagaaagaagccaattccgagaaaactaacaacggcatccactacagactccaactgctctactccaatgggattcgcacagagcaggacttctatgtgcggcttatagacagtatgacaaaacaggctattgtgtatgagggtcaagataagaaccccgaaatgtgtcgagtgttgctgactcacgagatcatgtgccggttctttctgaaatttttccttaagtgcaatcaaaactgccttaagaacgccggcaacccgagggacatgcgacggtttcaggtggtcgtgtcaaccacagtgaacgtggatggccatgtgctggccgtgtccgataatatgtttgtgcacaataatagcaagcacgggcggagggccaggcggcttgatcccagcgaagcaaccccttgcatcaaagcgatctcacccagtgaagggtggacgaccggcggcgccacagtaattattattggtgacaatttttttgacggcttacaggtcatctttggaaccatgctggtctggagtgaacttattacacctcatgcgatcagggtgcaaactcccccccggcacattcctggggtcgtggaagttaccctatcgtataagtcaaagcaattttgcaagggtacacctggaaggttcatctatacagcactcaatgaacccaccatcgactacggcttccagaggttgcagaaggtcatccccaggcaccccggggaccctgagcgattgccaaaagaagttattctgaaacgcgcagcagacctggtcgaggcgctttatggtatgccccataataaccaggagattattcttaaaagagccgcagatattgccgaggccttgtatagcgtaccaaggaaccacaaccagcttccagctctggcaaacacctcggtgcatgcggggatgatgggtgtgaactcattctcagggcagctggcagtgaatgtctctgaggcatctcaagcaactaaccaaggtttcactcggaactcttcgagcgtgagtccgcacggatacgtgcctagtactactccccagcagacaaactacaattccgttacaacaagcatgaacggttacgggtcagcagcaatgtcgaacctgggaggctctcctaccttcttaaatggctccgctgctaattcaccttacgccatcgttccctccagtccgacaatggcttcttcgacctctctgcccagcaactgctcttctagctctggcatcttttctttctctcccgccaacatggtttctgcggttaagcagaagtcagccttcgccccagttgtacgacctcaaacctcaccgcctccaacctgcacctctaccaacgggaatagcctacaggctattagtggaatgatcgttccgccgatgtag

SEQ ID NO: 256638 - DNA, 1683 bp, Artificial Sequence
  derived and/or modified sequence
atgtttggcatccaggagagcatccagaggagcggcagctccatgaaggaggagcccctgggcagcggcatgaatgctgtgaggacctggatgcagggcgctggggtgctggatgccaacacagctgcccagagcggcgtgggcctggcccgggcccactttgagaagcagccccccagcaacctgaggaagagcaacttcttccactttgtgctggccctgtatgaccggcagggccagcctgtggagattgaaagaacagcctttgtgggctttgtggagaaggagaaggaggccaacagcgagaagaccaacaacggcatccactaccgcctgcagctgctgtacagcaatggcatcagaacagagcaggacttctacgtgcggctgattgacagcatgaccaagcaggccatcgtgtatgagggccaggacaagaaccctgagatgtgccgggtgctgctgacccatgagatcatgtgccgcttcttcctgaagttcttcctgaagtgcaaccagaactgcctgaagaatgccggcaacccccgggacatgaggcgcttccaggtggtggtgtccaccaccgtgaatgtggatggccacgtgctggccgtgtctgacaacatgtttgtgcacaacaacagcaagcatggaagaagagcccggcggctggaccccagcgaggccaccccctgcatcaaggccatcagccccagcgagggctggaccaccggcggggccaccgtcatcatcatcggggacaacttctttgatggcctgcaggtgatcttcggcaccatgctggtgtggagcgagctgatcacccctcatgccatccgggtgcagaccccacccaggcacatccctggggtggtggaggtgaccctgagctacaagagcaagcagttctgcaagggcaccccaggccgcttcatctacacagccctgaatgagcccaccattgattatggcttccagaggctgcagaaggtgatccccaggcaccctggggaccctgagcggctgcccaaggaggtgatcctgaagagagctgctgacctggtggaggccctgtatggcatgccccacaacaaccaggagatcatcctgaagagagctgctgacattgctgaggccctgtacagcgtgcccaggaaccacaaccagctgcctgccctggccaacacctctgtgcacgccggcatgatgggcgtgaacagcttcagcggccagctggccgtgaatgtgtctgaggccagccaggccaccaaccagggcttcaccaggaacagcagctctgtgagcccccacggctacgtgcccagcaccaccccccagcagaccaactacaacagcgtgaccacctccatgaatggctacggcagcgctgccatgagcaacctgggcggcagccccaccttcctgaatggcagcgctgccaacagcccctatgccatcgtgcccagcagccccaccatggccagcagcaccagcctgcccagcaactgcagcagcagcagcggcatcttctccttcagccctgccaacatggtgtctgctgtgaagcagaagagcgcctttgcccctgtggtgcggccccagaccagccccccacccacctgcaccagcaccaatggaaacagcctgcaggccatcagcggcatgattgtgccccccatgtag

SEQ ID NO: 256639 - DNA, 1683 bp, Artificial Sequence
  derived and/or modified sequence
atgttcggcatccaggagagcatccagcggagcggcagcagcatgaaagaggagcctctgggtagcgggatgaacgctgttcgaacgtggatgcaaggtgcaggcgtgcttgatgccaacaccgccgcccagtctggagtggggctggcccgggctcatttcgagaagcagcctcctagcaatcttaggaaaagcaacttctttcactttgtcctggctctatatgaccggcaggggcagccagtagaaatcgaaaggacagccttcgtgggattcgtagaaaaggagaaggaagctaacagcgagaagactaataatgggatacactacaggctacagctcctgtactcaaacggaatacggaccgagcaggatttctatgtgcgtctgatcgactccatgacaaaacaggccatagtgtacgaggggcaggacaagaaccccgaaatgtgccgagtacttttaactcacgagataatgtgcaggttctttttgaagttcttcttaaaatgtaaccagaattgtctgaaaaatgctgggaaccctagagacatgaggaggtttcaagtcgtggtttccacgaccgttaatgtcgacggccacgtactagcagtctccgacaatatgttcgtgcacaacaactcaaaacacgggagacgcgcccggagacttgaccccagtgaagctacaccctgcataaaggctatatccccctcagagggatggactacaggcggggcaactgtcatcattataggagataatttcttcgacggcctccaggtgatcttcggcactatgctggtgtggagtgagctgatcaccccccacgccatcagggtccagacccctcctaggcatatccccggagtggtagaggttacactcagctataaatctaagcagttttgcaagggaacaccagggaggtttatatacacagctctgaacgaaccaacaatagactacgggttccagcgccttcagaaggtgatcccccgtcaccctggggatcccgaacggctgcccaaggaagtcattctcaaacgggccgcggatctggtcgaggccctgtacgggatgccccacaataatcaggagatcatcctgaaacgtgccgcggacatcgccgaggcgttgtatagcgtgcctcggaatcacaaccagctacccgccctggcaaataccagcgttcacgctggcatgatgggagtaaacagcttttctggtcagcttgccgtcaacgtcagcgaagcgagccaggctaccaatcaggggttcactcgtaattccagttctgtcagtccccacggatatgtgccctcaactactcctcaacagacaaattacaatagcgttactaccagcatgaacggctacggttctgccgctatgtctaacctgggaggctcacctacttttctcaacgggtctgccgcaaattccccgtatgctattgtgccttcctcccctactatggccagtagtacttcattgccgagcaattgctcatcctcctcaggcatttttagtttctctccagccaatatggtgagcgctgtgaagcagaagtccgcattcgctcccgtggttcgtccacagaccagtcccccgccgacctgtacaagtactaatggaaactccctgcaggccatcagcggtatgatcgtccccccgatgtag

SEQ ID NO: 256640 - DNA, 1683 bp, Artificial Sequence
  derived and/or modified sequence
atgtttggaatccaagaaagcatccagcgatctgggtcctcaatgaaggaagagcctctggggtctgggatgaatgccgtgcggacctggatgcagggggctggggttctggatgcaaacaccgctgcgcagtctggagtcgggctggccagagctcactttgaaaagcaacccccaagcaacttgagaaaatctaacttcttccacttcgtgcttgccctgtatgacaggcagggccaaccggtggaaatcgaacggacggcattcgtgggattcgtggaaaaagagaaggaggccaattccgagaagactaacaacgggatccattataggttgcagctcttgtatagtaacggcatccggactgaacaggatttttacgtgcggcttatagacagtatgaccaaacaggctattgtatacgagggccaggacaagaatcccgagatgtgcagagtgctgctaacacacgagataatgtgtcggttcttcctgaagtttttcctgaaatgtaatcagaactgcctaaagaatgcagggaaccctagggatatgcgacgatttcaggtggttgtgagcaccaccgtgaacgtggatggccatgttctggcagtatccgataacatgttcgtgcataataactcaaagcacggccgacgcgctaggcgcctggacccttcggaggccacaccatgcattaaggctatttcccctagcgaagggtggactacaggaggagctacggtgattatcattggagacaacttcttcgatggattacaggtgatcttcggtactatgcttgtttggagtgaattgatcacacctcatgccattcgtgtccagactccacctagacacattcccggtgtggtggaggtgactctaagctacaaaagcaaacagttttgcaagggaactcctgggcgtttcatatataccgccctgaacgagcccaccattgactacggctttcagcgactgcagaaggtcatcccaaggcatccgggagacccagagcggcttcctaaggaggtgatcctcaagcgcgcagctgatctcgtcgaagctctctatggcatgccccataataatcaggaaatcattctgaaacgcgcagccgatattgctgaagctctgtattccgtgcctcgcaatcacaaccagttacccgctctcgcaaatacctccgtccacgctggaatgatgggggtgaattcattctcgggccaacttgccgtgaacgtgtctgaagcctcacaagctacgaatcaggggttcacacgcaattcgtcatccgtttccccccacggttacgtcccctcgaccactcctcagcagaccaactataacagcgtgactactagcatgaatggctatggctcagccgcaatgagtaatctcggtgggagccccacattcctgaacggctcagcggcaaattctccgtacgcgattgtgccttcttcacctaccatggcatctagcacatccctgccaagcaattgttcttcgtctagtggcatcttcagttttagcccagccaatatggtgagtgccgtgaaacagaaatcagcatttgccccagtagtacgccctcaaacttctcccccacccacatgtacatcaacaaatggaaatagcctgcaagccatctcgggaatgatagtgccacctatgtag

SEQ ID NO: 256641 - DNA, 2345 bp, Artificial Sequence
  derived and/or modified sequence
gggttatcgctcagttttgagcagaggtttacattttttaaaaatttgctttccagcccgccttgatcttctaagtgcgagttcatcgtctgagaaaaaaaaaaatctctggttggcgtttttgtttcttttcttttctttcttttctttcctttttttttttttttaatttttttcaagggggaggagattttccacaagaaaaggttgttttcatgtttgggattcaggaaagcatccaacggagtggaagcagcatgaaggaagagccgctgggcagcggcatgaacgcggtgcggacgtggatgcagggcgccggggtgctggacgccaacacggcggcgcagagcggggtgggtctggcccgggctcactttgagaagcagccgccttccaatctgcggaaatccaacttcttccacttcgtcctggccctctacgacagacagggccagcccgtggagatcgagaggacagcgtttgtggggttcgtggagaaggaaaaagaagccaacagcgaaaagaccaataacggaattcactaccggcttcagcttctctacagcaatgggataaggacggagcaggatttctacgtgcgcctcattgactccatgacaaaacaagccatagtgtatgaaggccaagacaagaacccagaaatgtgccgagtcttgctcacacatgagatcatgtgcaggttcttcttgaaatttttcctcaaatgtaaccaaaattgcctaaagaatgcgggaaacccacgtgacatgcggagattccaggtcgtggtgtctacgacagtcaatgtggatggccatgtcctggcagtctctgataacatgtttgtccataataattccaagcatgggcggagggctcggaggcttgacccctcggaagctactccctgtatcaaagccatcagcccgagtgaaggatggacgacgggaggtgcgactgtgatcatcataggggacaatttctttgatgggttacaggtcatattcggtaccatgctggtctggagtgagttgatcactcctcatgccatccgtgtgcagacccctcctcggcacatccctggtgttgtggaagtcacactgtcctacaaatctaagcagttctgcaaaggaacaccaggcagattcatttatacagcgctcaacgaacccaccatcgattatggtttccagaggttacagaaggtcattcctcggcaccctggtgaccctgagcgtttgccaaaggaagtaatactcaaaagggctgcggatctggtagaagcactgtatgggatgccacacaacaaccaggaaatcattctgaagagagcggccgacattgccgaggccctgtacagtgttccccgcaaccacaaccaactcccggcccttgctaacacctcggtccacgcagggatgatgggcgtgaattcgttcagtggacaactggccgtgaatgtctccgaggcatcacaagccaccaatcagggtttcacccgcaactcaagcagcgtatcaccacacgggtacgtgccgagcaccactccccagcagaccaactataactccgtcaccacgagcatgaacggatacggctctgccgcaatgtccaatttgggcggctcccccaccttcctcaacggctcagctgccaactccccctatgccatagtgccatccagccccaccatggcctcctccacaagcctcccctccaactgcagcagctcctcgggcatcttctccttctcaccagccaacatggtctcagccgtgaaacagaagagtgctttcgcaccagtcgtcagaccccagacctccccacctcccacctgcaccagcaccaacgggaacagcctgcaagcgatatctggcatgattgttcctcctatgtgaaagaattgccttgaagaattgtattaatgaagaggttggattctgctacagagagtaatctgatacaagtcccagagtggaacttttaactcaggcctttttaagaggaatcacaataactgcagatttttaaacaaacaaaatcaccgaccttgcaaatactgaaattggaagagggatctgcaagtgcagggtgttggttaaagttgtacctcccaagtatttgggggatatatttattctgtattgacaaaagcaaatccactttttctttttcttttttttttttaagcttaattctgcaatcatttgtcttttataaaccgtaaagctctatacaagggacactataaataagactccatgttttaatttatgatgtttttaaagctgtgtaaaggaagaatgaagtggtgatatttacaaaaaagtaaaaaaaaaaaaaaa

SEQ ID NO: 256642 - DNA, 1683 bp, Artificial Sequence
  derived and/or modified sequence
atgttcggcatccaggagagcatccagagaagcggcagcagcatgaaggaggagcccctgggcagcggcatgaacgccgtgagaacctggatgcagggcgccggcgtgctggacgccaacaccgccgcccagagcggcgtgggcctggccagagcccacttcgagaagcagccccccagcaacctgagaaagagcaacttcttccacttcgtgctggccctgtacgacagacagggccagcccgtggagatcgagagaaccgccttcgtgggcttcgtggagaaggagaaggaggccaacagcgagaagaccaacaacggcatccactacagactgcagctgctgtacagcaacggcatcagaaccgagcaggacttctacgtgagactgatcgacagcatgaccaagcaggccatcgtgtacgagggccaggacaagaaccccgagatgtgcagagtgctgctgacccacgagatcatgtgcagattcttcctgaagttcttcctgaagtgcaaccagaactgcctgaagaacgccggcaaccccagagacatgagaagattccaggtggtggtgagcaccaccgtgaacgtggacggccacgtgctggccgtgagcgacaacatgttcgtgcacaacaacagcaagcacggcagaagagccagaagactggaccccagcgaggccaccccctgcatcaaggccatcagccccagcgagggctggaccaccggcggcgccaccgtgatcatcatcggcgacaacttcttcgacggcctgcaggtgatcttcggcaccatgctggtgtggagcgagctgatcaccccccacgccatcagagtgcagaccccccccagacacatccccggcgtggtggaggtgaccctgagctacaagagcaagcagttctgcaagggcacccccggcagattcatctacaccgccctgaacgagcccaccatcgactacggcttccagagactgcagaaggtgatccccagacaccccggcgaccccgagagactgcccaaggaggtgatcctgaagagagccgccgacctggtggaggccctgtacggcatgccccacaacaaccaggagatcatcctgaagagagccgccgacatcgccgaggccctgtacagcgtgcccagaaaccacaaccagctgcccgccctggccaacaccagcgtgcacgccggcatgatgggcgtgaacagcttcagcggccagctggccgtgaacgtgagcgaggccagccaggccaccaaccagggcttcaccagaaacagcagcagcgtgagcccccacggctacgtgcccagcaccaccccccagcagaccaactacaacagcgtgaccaccagcatgaacggctacggcagcgccgccatgagcaacctgggcggcagccccaccttcctgaacggcagcgccgccaacagcccctacgccatcgtgcccagcagccccaccatggccagcagcaccagcctgcccagcaactgcagcagcagcagcggcatcttcagcttcagccccgccaacatggtgagcgccgtgaagcagaagagcgccttcgcccccgtggtgagaccccagaccagccccccccccacctgcaccagcaccaacggcaacagcctgcaggccatcagcggcatgatcgtgccccccatgtag

SEQ ID NO: 256643 - protein, 461 aa, Artificial Sequence
  derived and/or modified sequence
MAEVGEIIEGCRLPVLRRNQDNEDEWPLAEILSVKDISGRKLFYVHYIDFNKRLDEWVTHERLDLKKIQFPKKEAKTPTKNGLPGSRPGSPEREVKRKVEVVSPATPVPSETAPASVFPQNGAARRAVAAQPGRKRKSNCLGTDEDSQDSSDGIPSAPRMTGSLVSDRSHDDIVTRMKNIECIELGRHRLKPWYFSPYPQELTTLPVLYLCEFCLKYGRSLKCLQRHLTKCDLRHPPGNEIYRKGTISFFEIDGRKNKSYSQNLCLLAKCFLDHKTLYYDTDPFLFYVMTEYDCKGFHIVGYFSKEKESTEDYNVACILTLPPYQRRGYGKLLIEFSYELSKVEGKTGTPEKPLSDLGLLSYRSYWSQTILEILMGLKSESGERPQITINEISEITSIKKEDVISTLQYLNLINYYKGQYILTLSEDIVDGHERAMLKRLLRIDSKCLHFTPKDWSKRGKW

SEQ ID NO: 256644 - DNA, 1386 bp, Artificial Sequence
  derived and/or modified sequence
atggctgaggtaggtgagatcatcgaaggatgtcggctacccgtgcttcggagaaatcaagataacgaggacgaatggccactggcggagattctgtcagtgaaggatatctctgggcgcaagctgttttacgtccactacatagactttaataaaaggctggatgaatgggtcacccatgagcgtctggacctgaagaagatacagttccccaagaaagaggctaaaactccaactaaaaacggcctgcctggctcccggcccggatcgccggagcgggaagtcaagcgaaaagtggaggtggtgtcccccgccacccctgtgccttccgaaaccgcccccgcctctgttttcccgcagaacggcgccgctaggagggcagtagctgcccagcccggaagaaagcggaaatcaaactgtctaggtaccgatgaagactcacaggattccagtgatggtattccaagtgctccaagaatgaccgggtcactagtgtctgatcgctcccatgatgatattgtgactaggatgaaaaatatcgaatgcatcgaacttggccggcacaggctgaaaccctggtacttctcaccgtacccccaagaacttaccactttacccgtgctctatctttgtgagttctgcctgaaatatgggcgcagcttaaaatgcttacagcgccacctgactaagtgtgatctgcgccaccctcccgggaatgaaatctacagaaagggcactatttccttctttgaaatagacggtagaaagaacaaatcttacagccagaacttatgcctactggccaagtgctttttggaccacaaaacactctattacgacacggatccctttctgttttatgtgatgaccgaatacgattgcaaaggcttccacatcgtaggctatttttctaaagaaaaggaatccacggaggattataatgtggcgtgtatcttgaccctgcccccataccagagacggggctacggaaagctccttatcgagttctcttacgagctgagtaaggtcgaagggaaaacaggaacgcctgaaaaacctctctcggatttgggactgctcagttacaggagctattggtcccagacaatcctagaaatactgatgggcctgaaaagcgagtcaggcgagagacctcaaatcacaatcaatgagatctccgagatcacctccatcaagaaggaggatgttatttctactctgcaatatctgaatctgataaactattacaaggggcagtatatactgacgctgagcgaggacatcgtggacgggcatgaacgcgccatgctcaagcggctgctcaggatcgacagcaaatgccttcactttacaccaaaggactggtcaaaaagagggaagtggtag

SEQ ID NO: 256645 - DNA, 1386 bp, Artificial Sequence
  derived and/or modified sequence
atggccgaggtgggggagatcatcgagggctgccgcctgcctgtgctgcggaggaaccaggacaatgaagatgagtggcccctggccgagatcctgtctgtgaaggacatcagcggcaggaagctgttctacgtgcactacatcgacttcaacaagaggctggatgagtgggtgacccatgagcggctggacctgaagaagatccagttccccaagaaggaggccaagacccccaccaagaatggcctgcccggcagccggcccggcagccctgagcgggaggtgaagaggaaggtggaggtggtgtccccagccacccctgtgcccagcgagacagccccagccagcgtcttcccccagaatggagctgccaggagagctgtggccgcccagcccggcaggaagaggaagagcaactgcctgggcacagatgaggacagccaggacagcagtgatggcatccccagcgcccccaggatgacaggcagcctggtgtctgacaggagccatgatgacatcgtgaccaggatgaagaacattgaatgtattgagctgggccgccaccggctgaagccctggtacttcagcccctacccccaggagctgaccaccctgcctgtgctgtacctgtgtgagttctgcctgaagtatggccgcagcctgaagtgcctgcagaggcacctgaccaagtgtgacctgcggcaccccccaggaaatgagatctacaggaagggcaccatctccttctttgaaattgatggcaggaagaacaagagctacagccagaacctgtgcctgctggccaagtgcttcctggaccacaagaccctgtactatgacacagaccccttcctgttctacgtgatgacagaatatgactgcaagggcttccacatcgtgggctacttcagcaaggagaaggagagcacagaggactacaacgtggcctgcatcctgaccctgcccccctaccagaggcggggctacggcaagctgctgattgagttctcctatgagctgagcaaggtggagggcaagacaggcaccccagagaagcccctgagtgacctgggcctgctgagctaccgcagctactggagccagaccatcctggagatcctgatgggcctgaagtctgagagcggggagcggccccagatcaccatcaatgagatcagcgagatcaccagcatcaagaaggaggatgtgatcagcaccctgcagtacctgaacctgatcaactactacaagggccagtacatcctgaccctgtctgaggacatcgtggatggccacgagcgggccatgctgaagaggctgctgagaattgacagcaagtgcctgcacttcacccccaaggactggagcaagaggggcaagtggtag

SEQ ID NO: 256646 - DNA, 1386 bp, Artificial Sequence
  derived and/or modified sequence
atggccgaggtgggcgagatcatcgagggctgccggctgcccgtgctaaggcgcaaccaggataacgaagatgaatggcccctggcagagattctctctgtgaaagatatctcaggtcggaaactcttttatgttcactatatcgacttcaacaagcgcctggatgaatgggtcactcacgagcgactcgacctaaaaaagatacagtttcctaaaaaagaagccaagaccccgaccaaaaatggtctgccaggctcacggcccggcagccctgagcgcgaagtcaaacgaaaagtcgaagtcgtctctcccgctactccggtcccctcagaaacagccccggcctctgtattccctcaaaacggagcggcccggcgagcagtggctgctcaacctggccgcaagaggaaatccaattgcctgggaaccgatgaagactctcaagattcaagtgatggtatcccttcggcccctcggatgaccggcagccttgtatcagaccgctcgcacgatgacatcgtgactcggatgaagaacattgagtgcatcgaactgggaaggcatcgtctgaaaccctggtatttttctccctacccccaggagcttaccactctgccagtgctgtacctgtgtgagttctgcctaaaatatggccgttctcttaaatgtctgcagagacatctgactaagtgtgatctacggcaccctcctggtaacgagatatatcgaaaggggactatcagttttttcgaaatagatggaagaaaaaacaagtcttatagtcagaatctgtgcctgttggctaagtgtttccttgatcacaagactctgtattatgacaccgaccctttcctgttttacgtgatgaccgagtacgactgtaagggttttcacatcgtcggctacttctccaaggagaaagagtcaactgaagactataacgttgcttgcatactcacactccctccctaccagcggcggggttatggaaagctgttgatcgagttttcttacgagcttagcaaggtcgagggcaagactggtactcctgagaagcccttatcagatttaggcctgttgagctatagatcctattggtcgcaaactatcctggagatcctaatggggttgaagagcgaaagtggcgagaggccacagataacgattaatgaaattagcgagatcacatctatcaaaaaagaagatgtgatcagtacgctgcagtacctcaacctcattaattattacaagggtcagtacatactgacattgagcgaagacattgtggacgggcacgaaagagccatgctgaaaagactgctgcgcatcgactcaaaatgcctgcacttcacgccaaaagattggagcaagcgcggcaaatggtag

SEQ ID NO: 256647 - DNA, 1386 bp, Artificial Sequence
  derived and/or modified sequence
atggctgaggtgggagagatcattgagggctgtagactacccgtgctgaggcgcaaccaagataacgaggatgaatggcccctcgccgagatcctgtccgtaaaggatatctctgggagaaaattgttctatgtgcattacattgactttaataagagactcgacgagtgggtgacccacgaaagactggatctgaagaaaatccagtttccaaagaaagaggccaagacccctacaaaaaacggtctgccaggctctcgccctggttcccccgaacgcgaagttaagcgaaaggtcgaggttgtgagccctgccacaccagtgcccagcgagacggcgcctgcctctgtctttccccaaaatggcgcagcgagaagggcggtggccgcacagccgggacgaaagaggaagagtaattgcctgggtacagatgaagattcccaggattccagtgacgggattccttcggcgccacgaatgactggaagcctggtgagcgatcgctcccatgatgatatcgtaacccggatgaaaaacatcgagtgcatcgagcttgggcgtcaccgcctgaagccttggtatttttccccttatccccaggaactgactacgctcccagtactgtacctgtgtgagttttgcctgaaatatgggaggagcttgaaatgcctgcagcgccatttgacaaagtgcgacctccggcacccaccaggcaatgaaatctatagaaaaggaactatctccttctttgaaatcgatgggaggaagaacaaatcttacagtcagaatctgtgcctcctagccaaatgttttctggaccacaagactctctactacgacacggatccttttctcttttatgtaatgaccgaatacgactgcaagggttttcacattgtcggctacttttctaaggagaaagaatcaactgaggactacaacgtggcatgcattctgaccctgcccccttatcagcgccgtgggtacggcaagttattgatcgagtttagttacgaactctccaaagtcgaaggcaagaccggtacccccgagaaaccgctgtctgatcttggcctgctctcttataggagctattggtcccagactatcctcgaaatcttgatgggccttaagagtgagtccggtgagaggccccagataacaatcaacgagatcagcgaaatcaccagtattaaaaaggaagacgtgatttcaacactacagtacctgaatttaattaattattataaaggacagtatattctgacccttagcgaagacatcgtggatggtcacgaacgcgctatgctgaagcgacttctgaggattgactccaagtgcctgcattttacccccaaggactggtctaagaggggcaagtggtag

SEQ ID NO: 256648 - DNA, 1386 bp, Artificial Sequence
  derived and/or modified sequence
atggccgaggtgggcgagatcatcgagggctgcagactgcccgtgctgagaagaaaccaggacaacgaggacgagtggcccctggccgagatcctgagcgtgaaggacatcagcggcagaaagctgttctacgtgcactacatcgacttcaacaagagactggacgagtgggtgacccacgagagactggacctgaagaagatccagttccccaagaaggaggccaagacccccaccaagaacggcctgcccggcagcagacccggcagccccgagagagaggtgaagagaaaggtggaggtggtgagccccgccacccccgtgcccagcgagaccgcccccgccagcgtgttcccccagaacggcgccgccagaagagccgtggccgcccagcccggcagaaagagaaagagcaactgcctgggcaccgacgaggacagccaggacagcagcgacggcatccccagcgcccccagaatgaccggcagcctggtgagcgacagaagccacgacgacatcgtgaccagaatgaagaacatcgagtgcatcgagctgggcagacacagactgaagccctggtacttcagcccctacccccaggagctgaccaccctgcccgtgctgtacctgtgcgagttctgcctgaagtacggcagaagcctgaagtgcctgcagagacacctgaccaagtgcgacctgagacacccccccggcaacgagatctacagaaagggcaccatcagcttcttcgagatcgacggcagaaagaacaagagctacagccagaacctgtgcctgctggccaagtgcttcctggaccacaagaccctgtactacgacaccgaccccttcctgttctacgtgatgaccgagtacgactgcaagggcttccacatcgtgggctacttcagcaaggagaaggagagcaccgaggactacaacgtggcctgcatcctgaccctgcccccctaccagagaagaggctacggcaagctgctgatcgagttcagctacgagctgagcaaggtggagggcaagaccggcacccccgagaagcccctgagcgacctgggcctgctgagctacagaagctactggagccagaccatcctggagatcctgatgggcctgaagagcgagagcggcgagagaccccagatcaccatcaacgagatcagcgagatcaccagcatcaagaaggaggacgtgatcagcaccctgcagtacctgaacctgatcaactactacaagggccagtacatcctgaccctgagcgaggacatcgtggacggccacgagagagccatgctgaagagactgctgagaatcgacagcaagtgcctgcacttcacccccaaggactggagcaagagaggcaagtggtag

SEQ ID NO: 256649 - protein, 546 aa, Artificial Sequence
  derived and/or modified sequence
MAEVVSPVPGAGRREPGEVGRARGPPVADPGVALSPQGEIIEGCRLPVLRRNQDNEDEWPLAEILSVKDISGRKLFYVHYIDFNKRLDEWVTHERLDLKKIQFPKKEAKTPTKNGLPGSRPGSPEREVPASAQASGKTLPIPVQITLRFNLPKEREAIPGGEPDQPLSSSSCLQPNHRSTKRKVEVVSPATPVPSETAPASVFPQNGAARRAVAAQPGRKRKSNCLGTDEDSQDSSDGIPSAPRMTGSLVSDRSHDDIVTRMKNIECIELGRHRLKPWYFSPYPQELTTLPVLYLCEFCLKYGRSLKCLQRHLTKCDLRHPPGNEIYRKGTISFFEIDGRKNKSYSQNLCLLAKCFLDHKTLYYDTDPFLFYVMTEYDCKGFHIVGYFSKEKESTEDYNVACILTLPPYQRRGYGKLLIEFSYELSKVEGKTGTPEKPLSDLGLLSYRSYWSQTILEILMGLKSESGERPQITINEISEITSIKKEDVISTLQYLNLINYYKGQYILTLSEDIVDGHERAMLKRLLRIDSKCLHFTPKDWSKRGKW

SEQ ID NO: 256650 - DNA, 1641 bp, Artificial Sequence
  derived and/or modified sequence
atggccgaagtcgtgagccccgtgcccggtgctggcaggcgcgagcccggcgaggtgggtagggcccgaggtccaccagtcgctgatcctggcgtggctttgtccccacaaggcgaaatcattgaagggtgtagactgccagtcctgcgccgaaaccaagacaatgaggatgaatggcccctcgccgaaatactgtccgtcaaggacattagcggcagaaaactgttttacgtacattacattgacttcaacaaacgacttgatgagtgggttacacatgaaaggttagatcttaaaaagattcagttccctaagaaggaagccaaaacacctaccaagaacgggttgcctggttctaggccaggatcgccagagcgagaggtcccagcctctgcccaggccagcggcaaaacactgccaattcctgtacagatcactctcagattcaacctccctaaagaacgagaagcaatccctggcggagagccagaccagccgctctcaagcagttcttgtcttcaaccaaatcataggagtactaaacggaaggtggaggtggtatcacccgctaccccggtgccctccgaaaccgcaccagcttctgtcttccctcagaatggtgccgcccggagagctgtcgccgctcagcctgggcggaaaaggaagtccaattgtctagggactgacgaagactctcaggactcctccgacgggattccttccgcgccacgtatgactgggtccctggtgagcgatcggtctcacgatgacatagttacccgaatgaagaacattgaatgtattgagcttggacgccaccgcctgaagccctggtacttcagtccatacccacaggaactgacgactctgcctgtgctttatctctgcgagttttgtctgaagtacggaagatccctgaaatgtctgcagaggcatctcactaagtgtgatctgcgccacccaccagggaatgagatatacagaaagggcactatctcatttttcgaaatcgacggacggaaaaataagagttatagccaaaatctttgcttgctggctaagtgtttcttagatcataaaacattgtactatgataccgatcccttcttgttttatgtgatgactgagtacgattgcaagggcttccacatcgttgggtattttagcaaggagaaggagtctaccgaggactataatgtggcttgcatcttgacactgcccccataccagaggaggggctacggcaagcttcttattgagttctcctacgagctcagtaaggtggagggcaaaaccggcacgcctgaaaagcccctttcagatctcggactcctcagctatcgctcctactggagccagaccatcctcgagatactgatggggctgaaaagcgaatcaggtgaaaggccccagattaccatcaatgagatatctgaaatcacatccattaaaaaagaagacgtgatttcaacactgcaatatcttaatctgattaactattataaggggcagtacatcctgacgctttctgaggatatcgtggacggacatgaaagagccatgctgaaaagactgctgagaattgactccaagtgcttgcacttcacgcctaaagattggtctaagcgcggcaagtggtag

SEQ ID NO: 256651 - DNA, 2296 bp, Artificial Sequence
  derived and/or modified sequence
agaccgccactggctgtgcacgttatggggtttccacctagggctcggcctgaggcttgtaacactccgttttcccccgagtcacaggggcagtcttgcccctcgcagctgggtcgcggtgtctctcaaaggtccccctctacaggggcttcgtgaggcccgggcccacagggcgctcggtcccggaagtgacgtctcccagaggggccggaagtggcagtggagggagggaagatggcggaggtggtgagtccggtgcccggggcggggcggagggagccaggggaggtgggtagagcccgaggccccccagtagccgaccctggcgtcgcgctgtctccccagggggagataatcgagggctgccgcctacccgtgctgcggcggaaccaggacaacgaagatgagtggcccctggccgagatcctgagcgtgaaggacatcagtggccggaagcttttctacgtccattacattgacttcaacaaacgtctggatgaatgggtgacgcatgagcggctggacctaaagaagatccagttccccaagaaagaggccaagacccccactaagaacggacttcctgggtcccgtcctggctctccagagagagaggtgccggcctcggcgcaggccagcgggaagaccttgccaatcccggtccagatcacactccgcttcaacctgcccaaggagcgggaggccattcccggtggcgagcctgaccagccgctctcctccagctcctgcctgcagcccaaccaccgctcaacgaaacggaaggtggaggtggtttcaccagcaactccagtgcccagcgagacagccccggcctcggtttttccccagaatggagccgcccgtagggcagtggcagcccagccaggacggaagcgaaaatcgaattgtttgggcactgatgaggactcccaggacagctctgatggaataccgtcagcaccacgcatgactggcagcctggtgtctgatcgaagccacgacgacatcgtcacccggatgaagaacattgagtgcattgagctgggccggcaccgcctcaagccgtggtacttctccccgtacccacaggaactcaccacattgcctgtcctctacctgtgcgagttctgcctcaagtacggccgtagtctcaagtgtcttcagcgtcatttgaccaagtgtgacctacgacatcctccaggcaatgagatttaccgcaagggcaccatctccttctttgagattgatggacgtaagaacaagagttattcccagaacctgtgtcttttggccaagtgtttccttgaccataagacactgtactatgacacagaccctttcctcttctacgtcatgacagagtatgactgtaagggcttccacatcgtgggctacttctccaaggagaaagaatcaacggaagactacaatgtggcctgcatcctaaccctgcctccctaccagcgccggggctacggcaagctgctgatcgagttcagctatgaactctccaaagtggaagggaaaacagggacccctgagaagcccctctcagaccttggcctcctatcctatcgaagctactggtcccagaccatcctggagatcctgatggggctgaagtcggagagcggggagaggccacagatcaccatcaatgagattagtgaaatcaccagcatcaagaaggaggatgtcatctccactctgcagtacctcaatctcatcaactactacaagggccagtacatcctcacactgtcagaggacatcgtggatggccatgagcgggccatgctcaagcggctcctgcggatcgactccaagtgtctgcacttcactcccaaggactggagcaagagggggaagtggtgaccagacactgcccactgcagtgccaagacggcagcaggactggggctgatagcccaccccgcccccactgcagctcccacaaagcactctaagggagatggggctgaggacagctcaaaaaggagaggacaggcctggcaggggcccactggtgcccagcaccaaggcgagctccgggctcagaccaactccaaggtcagctggccacaggcccaggcctcctctgaagcagggaccagagggagccaggcagctgtgtacagtgagaagggatccggatgggggagctctgtacagagggctggtgattgtaaaaatttcttttgtaaagtagaagttgggggtggggtgggtgctggctgcaaaaatttctggcttctcttacccctattgcccccggcaataaattgtttctatatgc

SEQ ID NO: 256652 - DNA, 2237 bp, Artificial Sequence
  derived and/or modified sequence
agcttcgcacccggtgggcgtcacgtgacggactcagtagaccgccactggctgtgcacgttatggggtttccacctagggctcggcctgaggcttgtaacactccgttttcccccgagtcacaggggcagtcttgcccctcgcagctgggtcgcggtgtctctcaaaggtccccctctacaggggcttcgtgaggcccgggcccacagggcgctcggtcccggaagtgacgtctcccagaggggccggaagtggcagtggagggagggaagatggcggaggtgggggagataatcgagggctgccgcctacccgtgctgcggcggaaccaggacaacgaagatgagtggcccctggccgagatcctgagcgtgaaggacatcagtggccggaagcttttctacgtccattacattgacttcaacaaacgtctggatgaatgggtgacgcatgagcggctggacctaaagaagatccagttccccaagaaagaggccaagacccccactaagaacggacttcctgggtcccgtcctggctctccagagagagaggtgccggcctcggcgcaggccagcgggaagaccttgccaatcccggtccagatcacactccgcttcaacctgcccaaggagcgggaggccattcccggtggcgagcctgaccagccgctctcctccagctcctgcctgcagcccaaccaccgctcaacgaaacggaaggtggaggtggtttcaccagcaactccagtgcccagcgagacagccccggcctcggtttttccccagaatggagccgcccgtagggcagtggcagcccagccaggacggaagcgaaaatcgaattgtttgggcactgatgaggactcccaggacagctctgatggaataccgtcagcaccacgcatgactggcagcctggtgtctgatcgaagccacgacgacatcgtcacccggatgaagaacattgagtgcattgagctgggccggcaccgcctcaagccgtggtacttctccccgtacccacaggaactcaccacattgcctgtcctctacctgtgcgagttctgcctcaagtacggccgtagtctcaagtgtcttcagcgtcatttgaccaagtgtgacctacgacatcctccaggcaatgagatttaccgcaagggcaccatctccttctttgagattgatggacgtaagaacaagagttattcccagaacctgtgtcttttggccaagtgtttccttgaccataagacactgtactatgacacagaccctttcctcttctacgtcatgacagagtatgactgtaagggcttccacatcgtgggctacttctccaaggagaaagaatcaacggaagactacaatgtggcctgcatcctaaccctgcctccctaccagcgccggggctacggcaagctgctgatcgagttcagctatgaactctccaaagtggaagggaaaacagggacccctgagaagcccctctcagaccttggcctcctatcctatcgaagctactggtcccagaccatcctggagatcctgatggggctgaagtcggagagcggggagaggccacagatcaccatcaatgagattagtgaaatcaccagcatcaagaaggaggatgtcatctccactctgcagtacctcaatctcatcaactactacaagggccagtacatcctcacactgtcagaggacatcgtggatggccatgagcgggccatgctcaagcggctcctgcggatcgactccaagtgtctgcacttcactcccaaggactggagcaagagggggaagtggtgaccagacactgcccactgcagtgccaagacggcagcaggactggggctgatagcccaccccgcccccactgcagctcccacaaagcactctaagggagatggggctgaggacagctcaaaaaggagaggacaggcctggcaggggcccactggtgcccagcaccaaggcgagctccgggctcagaccaactccaaggtcagctggccacaggcccaggcctcctctgaagcagggaccagagggagccaggcagctgtgtacagtgagaagggatccggatgggggagctctgtacagagggctggtgattgtaaaaatttcttttgtaaagtagaagttgggggtggggtgggtgctggctgcaaaaatttctggcttctcttacccctattgcccccggcaataaattgtttctatatgcca

SEQ ID NO: 256653 - DNA, 1641 bp, Artificial Sequence
  derived and/or modified sequence
atggccgaggtggtgtcccctgtgcctggagctggaagaagagagcccggggaggtgggccgggcccggggcccccctgtggccgaccccggggtggccctgagcccccagggcgagatcatcgagggctgccgcctgcctgtgctgcggaggaaccaggacaatgaagatgagtggcccctggccgagatcctgtctgtgaaggacatcagcggcaggaagctgttctacgtgcactacatcgacttcaacaagaggctggatgagtgggtgacccatgagcggctggacctgaagaagatccagttccccaagaaggaggccaagacccccaccaagaatggcctgcccggcagcaggcctggcagccctgagcgggaggtgcctgccagcgcccaggccagcggcaagaccctgcccatccctgtgcagatcaccctgcgcttcaacctgcccaaggagcgggaggccatccctggaggagagccagaccagcccctgagcagcagcagctgcctgcagcccaaccacaggagcaccaagaggaaggtggaggtggtgtccccagccacccctgtgcccagcgagacagccccagcctctgtgttcccccagaatggagctgcccggcgggctgtggccgcccagcccggcaggaagaggaagagcaactgcctgggcacagatgaggacagccaggacagcagtgatggcatccccagcgcccccaggatgacaggcagcctggtgtctgacaggagccatgatgacatcgtgaccaggatgaagaacatcgagtgcatcgagctgggccgccaccggctgaagccctggtacttcagcccctacccccaggagctgaccaccctgcctgtgctgtacctgtgtgagttctgcctgaagtatggccgcagcctgaagtgcctgcagaggcacctgaccaagtgtgacctgcggcaccccccaggaaatgagatctacaggaagggcaccatctccttctttgaaattgatggcaggaagaacaagagctacagccagaacctgtgcctgctggccaagtgcttcctggaccacaagaccctgtactatgacacagaccccttcctgttctacgtgatgacagaatatgactgcaagggcttccacatcgtgggctacttcagcaaggagaaggagagcacagaggactacaacgtggcctgcatcctgaccctgcccccctaccagaggcggggctacggcaagctgctgattgagttctcctatgagctgagcaaggtggagggcaagacaggcaccccagagaagcccctgagtgacctgggcctgctgagctaccgcagctactggagccagaccatcctggagatcctgatgggcctgaagtctgagagcggggagcggccccagatcaccatcaatgagatcagcgagatcaccagcatcaagaaggaggatgtgatcagcaccctgcagtacctgaacctgatcaactactacaagggccagtacatcctgaccctgtctgaagatattgtggatggccacgagcgggccatgctgaagaggctgctgagaattgacagcaagtgcctgcacttcacccccaaggactggagcaagaggggcaagtggtag

SEQ ID NO: 256654 - DNA, 1641 bp, Artificial Sequence
  derived and/or modified sequence
atggccgaggtggtgagccccgtgcccggcgccggccggcgggagcccggcgaggtgggccgcgcacgcggaccgccggtcgccgatcccggcgtggcgctctctcctcaaggagaaatcattgagggttgccgtctaccggtgctgcgcaggaaccaggacaacgaagacgaatggcctctggcagaaatcctgagcgtcaaggatatcagtggccggaaactgttttacgtacattatatagactttaacaagcgtttggacgaatgggtgacacacgagcgactagacctcaaaaagatccagttccccaaaaaggaagccaagacccccaccaaaaatggactgccgggctctcgtcctggttcacctgagcgggaagtcccagcctctgcgcaggccagcgggaagacactgcctattcctgtgcagatcaccctaagatttaatcttcctaaggaaagggaggccatacctggaggagaacccgaccaacccctgtcaagcagctcttgcttacagcccaaccaccgcagcacgaaaagaaaggtggaagtcgtgagcccagccactcccgttccgagcgagacggccccggcaagtgtgttcccccagaacggagcagcaaggcgagccgtggccgctcaaccaggccgtaaaagaaagagtaactgtctcggcacagacgaggactcccaagattcctcggatggaattccctccgccccgagaatgactgggtctctggtctccgatcgatcgcatgacgacatcgttacaagaatgaaaaacattgagtgcatagagctgggccggcaccgcctcaagccatggtatttcagcccttaccctcaggagctgacaaccctcccagtgctgtacctgtgcgagttttgcctcaagtacggacggagcctgaagtgcttacagcgacatcttacaaaatgtgacctgaggcatccacctggaaatgagatttatcggaagggaactatctcctttttcgagatcgacggacgaaaaaataagtcttacagccagaatttgtgtctgctggcgaaatgctttctggatcacaaaaccctatattacgacactgaccctttcctgttttatgtcatgactgagtatgattgcaaggggtttcacattgtaggttatttctccaaagaaaaggagtcgaccgaggactacaacgtggcatgtatcctgaccttgcccccataccagcgcaggggctacggcaaattgttgatcgagttcagctacgagctgtcgaaggtcgagggaaaaactggaacgccagagaaaccgctgagtgacttaggccttctctcttaccgctcctattggagccagacaattctggagattctgatgggcttaaaatctgaatccggggaaagaccacagattacaataaatgagattagcgagatcacaagcattaagaaggaagacgtcattagcaccctacaatacctcaacctgatcaactattacaaggggcagtacattttaacactctctgaggatattgtcgatgggcacgaacgcgcaatgctgaagcggttgctaagaattgattcaaaatgtctccactttacacctaaggattggtccaagagaggaaaatggtag

SEQ ID NO: 256655 - DNA, 1641 bp, Artificial Sequence
  derived and/or modified sequence
atggctgaggtcgtctcccccgtcccaggggctgggaggagagagccaggagaggtgggcagggccagaggcccacctgtagccgatcccggagttgcactgagcccccagggggagataattgaaggttgccgactccccgtcctccgccgtaaccaggataatgaagacgaatggcctctagcagaaatcctttccgtcaaggacatttctgggaggaaattgttctatgtgcattacattgactttaacaaacgtctggacgagtgggtcacccatgagcgactggacctgaagaaaattcagtttcctaaaaaggaggcgaaaacccccacaaagaatggactccctggctcaaggccaggctcaccggagagagaggtgcccgcatcagcccaagcatctggaaagaccttgcctattcctgtacagattactctcaggttcaatctgcctaaggagagagaggcgatcccgggaggcgagcctgatcaaccattaagtagtagctcttgtctccagcccaatcatcgaagcacaaagcgtaaggtggaagtggtgagccccgcaacacccgttccaagtgaaactgcaccagcatctgtgttcccacagaatggagccgctaggagagcagtagctgcacagccagggcgaaagcggaagtccaattgtttggggactgatgaagactcccaggactcatccgacggaataccatctgctcctagaatgacggggtcccttgttagtgataggtcccatgacgatatcgtaacccgtatgaagaacatcgaatgtatcgaactgggcagacaccgactaaagccgtggtacttctctccataccctcaggagctgaccacgctgcctgttctgtacctgtgcgagttctgtctgaagtacgggagatccctcaagtgtctgcagcgccatctgacaaaatgcgacttgcgccacccccctggaaatgaaatatataggaaaggcaccatcagcttctttgaaatagatggcaggaagaacaaaagttatagtcagaatctttgtctccttgctaagtgctttctggatcacaaaaccttgtattacgatactgacccttttctgttctacgtcatgactgagtatgactgcaaaggtttccatatcgtcggatacttttctaaggaaaaggaaagcactgaagactacaatgtggcctgtattctgaccttgcccccttaccagcgacgcggatatggcaagctgttaattgaattctcatacgagctcagcaaggttgaaggaaagaccggcactcccgaaaaaccgctgtcggacttggggttgctttcatacaggtcatattggtcacaaactatcctggagattctcatgggcttgaagagcgaaagtggagagaggccacagatcacgatcaatgaaatcagtgaaattaccagtatcaaaaaagaagatgtgatttcaacactgcagtacctgaatcttattaattattataagggacagtatatcctgaccctctcggaggatatcgtagacggccatgagcgcgctatgctgaaacgcttgcttaggattgacagcaaatgtcttcattttacaccgaaagactggtctaaacggggtaagtggtag

SEQ ID NO: 256656 - DNA, 1641 bp, Artificial Sequence
  derived and/or modified sequence
atggccgaggtggtgagccccgtgcccggcgccggcagaagagagcccggcgaggtgggcagagccagaggcccccccgtggccgaccccggcgtggccctgagcccccagggcgagatcatcgagggctgcagactgcccgtgctgagaagaaaccaggacaacgaggacgagtggcccctggccgagatcctgagcgtgaaggacatcagcggcagaaagctgttctacgtgcactacatcgacttcaacaagagactggacgagtgggtgacccacgagagactggacctgaagaagatccagttccccaagaaggaggccaagacccccaccaagaacggcctgcccggcagcagacccggcagccccgagagagaggtgcccgccagcgcccaggccagcggcaagaccctgcccatccccgtgcagatcaccctgagattcaacctgcccaaggagagagaggccatccccggcggcgagcccgaccagcccctgagcagcagcagctgcctgcagcccaaccacagaagcaccaagagaaaggtggaggtggtgagccccgccacccccgtgcccagcgagaccgcccccgccagcgtgttcccccagaacggcgccgccagaagagccgtggccgcccagcccggcagaaagagaaagagcaactgcctgggcaccgacgaggacagccaggacagcagcgacggcatccccagcgcccccagaatgaccggcagcctggtgagcgacagaagccacgacgacatcgtgaccagaatgaagaacatcgagtgcatcgagctgggcagacacagactgaagccctggtacttcagcccctacccccaggagctgaccaccctgcccgtgctgtacctgtgcgagttctgcctgaagtacggcagaagcctgaagtgcctgcagagacacctgaccaagtgcgacctgagacacccccccggcaacgagatctacagaaagggcaccatcagcttcttcgagatcgacggcagaaagaacaagagctacagccagaacctgtgcctgctggccaagtgcttcctggaccacaagaccctgtactacgacaccgaccccttcctgttctacgtgatgaccgagtacgactgcaagggcttccacatcgtgggctacttcagcaaggagaaggagagcaccgaggactacaacgtggcctgcatcctgaccctgcccccctaccagagaagaggctacggcaagctgctgatcgagttcagctacgagctgagcaaggtggagggcaagaccggcacccccgagaagcccctgagcgacctgggcctgctgagctacagaagctactggagccagaccatcctggagatcctgatgggcctgaagagcgagagcggcgagagaccccagatcaccatcaacgagatcagcgagatcaccagcatcaagaaggaggacgtgatcagcaccctgcagtacctgaacctgatcaactactacaagggccagtacatcctgaccctgagcgaggacatcgtggacggccacgagagagccatgctgaagagactgctgagaatcgacagcaagtgcctgcacttcacccccaaggactggagcaagagaggcaagtggtag

SEQ ID NO: 256657 - DNA, 726 bp, Artificial Sequence
  derived and/or modified sequence
atgagcggcttccagatcaacctgaaccccctgaaggagcccctgggcttcatcaaggtgctggagtggatcgccagcatcttcgccttcgccacctgcggcggcttcaagggccagaccgagatccaggtgaactgcccccccgccgtgaccgagaacaagaccgtgaccgccaccttcggctaccccttcagactgaacgaggccagcttccagcccccccccggcgtgaacatctgcgacgtgaactggaaggactacgtgctgatcggcgactacagcagcagcgcccagttctacgtgaccttcgccgtgttcgtgttcctgtactgcatcgccgccctgctgctgtacgtgggctacaccagcctgtacctggacagcagaaagctgcccatgatcgacttcgtggtgaccctggtggccaccttcctgtggctggtgagcaccagcgcctgggccaaggccctgaccgacatcaagatcgccaccggccacaacatcatcgacgagctgcccccctgcaagaagaaggccgtgctgtgctacttcggcagcgtgaccagcatgggcagcctgaacgtgagcgtgatcttcggcttcctgaacatgatcctgtggggcggcaacgcctggttcgtgtacaaggagaccagcctgcacagccccagcaacaccagcgccccccacagccagggcggcatccccccccccaccggcatctag

SEQ ID NO: 256658 - DNA, 726 bp, Artificial Sequence
  derived and/or modified sequence
atgtccggattccaaatcaacttgaatcccctcaaggaacctcttggctttattaaagtgcttgaatggatcgccagcattttcgctttcgccacttgcggcggcttcaaggggcaaacagaaatacaagtgaattgccctcctgccgtgacggaaaataaaacggttactgccaccttcggctatccttttagactcaatgaagcatctttccagcctccacccggggtaaacatctgcgacgttaactggaaggattacgtgctcattggcgactatagctcatctgcacaattctatgtaactttcgctgtatttgtgttcctgtactgtatcgctgctctgctgctttacgtgggatacacttcactttacctggactctagaaagctacctatgattgatttcgtcgtgacattagttgccacctttctttggcttgtatcaacatctgcctgggctaaggctcttactgatatcaaaatcgcaactggccacaacatcattgatgagctgccaccgtgcaagaagaaggcggtgctgtgctactttggtagcgtaacatccatgggatccctgaacgtgtctgtcatcttcgggtttctgaacatgatcctgtggggcggcaacgcatggttcgtgtacaaggaaacctctctgcattctccaagcaatacctctgccccacattctcagggaggaatccccccacccaccggaatctag

SEQ ID NO: 256659 - DNA, 726 bp, Artificial Sequence
  derived and/or modified sequence
atgagcggcttccagatcaacctgaaccccctgaaggagcccctgggcttcatcaaggtgctggagtggatcgccagcatctttgcctttgccacctgtggcggcttcaagggccagacagagatccaggtgaactgccccccagctgtgacagagaacaagacagtgacagccaccttcggctaccccttccggctgaatgaggccagcttccagcccccacctggggtgaacatctgtgatgtgaactggaaggactatgtgctgattggagactacagcagcagcgcccagttctacgtgacctttgctgtgtttgtgttcctgtactgcatcgccgccctgctgctgtatgtgggctacaccagcctgtacctggacagcaggaagctgcccatgattgactttgtggtgaccctggtggccaccttcctgtggctggtgtccaccagcgcctgggccaaggccctgacagacatcaagatcgccaccggccacaacatcattgatgagctgcccccctgcaagaagaaggctgtgctgtgctacttcggctctgtgacctccatgggcagcctgaatgtgtctgtcatcttcggcttcctgaacatgatcctgtggggcggcaatgcctggtttgtgtacaaggagaccagcctgcacagccccagcaacaccagcgccccccacagccagggcggcatccccccacccaccggcatctag

SEQ ID NO: 256660 - DNA, 726 bp, Artificial Sequence
  derived and/or modified sequence
atgagcggcttccagatcaacctgaaccccctgaaggagcccctgggatttatcaaagttttagaatggatcgcctcaatcttcgcattcgcaacttgtggaggctttaaaggtcagacagaaattcaggtaaattgccccccggccgttacagagaataagactgttactgccacatttggatatcccttccggctgaacgaagcttcctttcagccacccccaggcgttaatatctgtgatgtaaattggaaggattatgtgctcatcggggattactccagtagcgcccagttctatgtcacattcgccgttttcgtcttcctttactgcatagctgccctgctcttgtatgttgggtacacgtccctgtacctcgatagccgcaaactaccgatgatcgactttgtagtgacattagttgcaacattcctgtggctggttagcacctctgcctgggcgaaggcactgaccgatatcaaaatcgctactgggcacaacattatcgacgaattgcctccttgcaagaagaaagccgtgctgtgctacttcggatcagtcacctcgatgggcagtctgaacgtctccgtaatttttggcttcctgaacatgatcctgtggggtggcaacgcgtggttcgtgtacaaagaaacaagcctgcactcccctagcaacacctcagcaccgcatagtcagggcggtattcccccacctaccgggatttag

SEQ ID NO: 256661 - DNA, 726 bp, Artificial Sequence
  derived and/or modified sequence
atgtcaggcttccagatcaacctgaaccctctgaaggagcctctcggttttattaaagtcctggaatggattgcctcaattttcgcttttgccacttgtggcggttttaagggacagaccgaaattcaggtcaattgcccgccagccgtgacagaaaataagactgttaccgcaacgtttgggtacccattcagactgaacgaggcaagcttccaaccacccccaggagtcaatatttgtgacgtcaattggaaggattatgttctaatcggagactacagctcgtccgcccagttctacgtgactttcgccgtcttcgttttcctgtactgcattgcggctctgttactctatgtgggatacacatcattatacctcgattccagaaagctgcctatgattgatttcgtcgtgacgttggtcgcaacctttctctggttggttagcacttcagcttgggccaaggcactgacggacatcaagatcgctacaggccataacatcattgacgagttgccaccttgtaagaaaaaagcagtgctttgttatttcggcagcgtgacttctatggggtccctcaacgtcagcgtgatctttgggtttctgaacatgatcttgtgggggggaaacgcctggttcgtatataaagagacaagcttgcactcgccatccaacacaagtgcccctcattctcagggcggtattcctccaccaaccggaatttag

SEQ ID NO: 256662 - protein, 120 aa, Artificial Sequence
  derived and/or modified sequence
MAVTGDDTDEETELAPSHMAAATGDMPTYQIRAPTAALPQGVVMAASPGSLHSPQQLAEEATRKRELRLMKNREAARECRRKKKEYVKCLENRVAVLENQNKTLIEELKALKDLYCHKVE

SEQ ID NO: 256663 - DNA, 363 bp, Artificial Sequence
  derived and/or modified sequence
atggcagtgaccggcgacgacacggatgaagaaacagagctcgcccccagtcacatggctgcagctacaggggacatgccgacataccagatccgcgcgcccaccgccgcactgcctcagggcgtggtgatggcagcttctcctgggtcccttcatagtccacagcagttagccgaagaagcaacccgaaagcgggaattacggcttatgaaaaatagagaggctgccagagagtgccggcggaagaagaaagagtacgtgaagtgcttagagaaccgcgttgctgtactcgaaaaccagaacaaaaccctgatagaagaactgaaggcgctgaaggatttatattgccacaaagttgagtag

SEQ ID NO: 256664 - DNA, 363 bp, Artificial Sequence
  derived and/or modified sequence
atggctgtgactggagatgacacagatgaggagacagagctggcccccagccacatggctgctgccactggagacatgcccacctaccagatccgggcccccacagctgccctgccccagggcgtggtgatggccgccagccctggcagcctgcacagcccccagcagctggccgaggaggccaccaggaagcgggagctgcggctgatgaagaaccgggaggccgcccgggagtgcaggaggaagaagaaggagtatgtgaagtgcctggagaacagagtggccgtgctggagaaccagaacaagaccctgattgaggagctgaaggccctgaaggacctgtactgccacaaggtggagtag

SEQ ID NO: 256665 - DNA, 363 bp, Artificial Sequence
  derived and/or modified sequence
atggccgtgaccggcgacgacaccgacgaggagaccgagctggccccctcgcatatggctgccgcaactggggatatgcctacctaccaaatcagagcacccacagctgctctgccccaaggggtggtgatggctgccagtcccgggagcctgcattccccacaacagctcgccgaagaagcaacacggaaacgggagctgaggctgatgaaaaatcgcgaagcggcccgagagtgcaggaggaagaagaaagagtatgtgaagtgtctggagaatagagtcgccgtcttggagaatcaaaataaaactctgatcgaagagctgaaggcgctcaaggacctgtactgccataaggtggagtag

SEQ ID NO: 256666 - DNA, 363 bp, Artificial Sequence
  derived and/or modified sequence
atggcagtcacaggggatgatacagacgaggagaccgaactggcaccgtcccacatggccgcagcgacaggcgatatgccaacctatcagatccgagctccaaccgccgctctgccccagggcgtagtgatggccgcttccccaggctctctgcattccccccagcagctggcagaagaagcgactagaaagcgggaactccggctgatgaagaacagggaggccgcaagagagtgtcggaggaaaaagaaggagtatgtaaaatgcctagaaaatagagtcgctgtgctggaaaaccagaacaagacgttgatcgaagagttaaaggcactgaaggacctctactgtcacaaggtggagtag

SEQ ID NO: 256667 - DNA, 1182 bp, Artificial Sequence
  derived and/or modified sequence
tggaacactttatgttgaactgtggtagaggaaacaagacagttctgtctgcagaagcccattatggctgtaactggagatgacacagatgaggaaactgaacttgccccaagtcacatggctgctgccactggtgacatgccaacttaccagatccgagctcctactgctgctttgccacagggagtggtgatggctgcatcgcccggaagtttgcacagtccccagcagctggcagaagaagcaacacgcaaacgagagctgaggctaatgaaaaacagggaagctgcccgggagtgtcgcaggaagaagaaagaatatgtcaaatgtcttgaaaatcgtgtggctgtgcttgaaaaccaaaacaagactctcattgaggaactcaaggccctcaaagatctttattgccataaagtagagtaactgtctttgacttggaccttgtttactctaatcaaggcaggagatgcagcagtcctacttattgccatgtggacttgtgggaaggacacgtgtgacccttaagaatccagtttggattagtgtttgaaattgaattgggaatgttgttccaggatgtggaatgcagccgtgatcacacttaccgagcttactttgatctgtttgtcaatagcatgcaaaaaatgctttgtttgccctttgcttctgctttttttcagggaagctgccaaagaatgtcgacgtcgaaagaaagaatatgtaaaatgtctggagagccgagttgcagtgctggaagtccagaacaagaagcttatagaggaacttgaaaccttgaaagacatttgttctcccaaaacagattactagaaatatttaactatgaactgaaggcagcatgtatagttgcttttgaaggaatacaatatatagctggcaagaatggtggcttcttttctttgtatcattcatcttcttctttaatcacttaacattcctaaaatgcttcactgtacgtagttaagtcgtagctataacttcaaattttttaaaagagacaaactgtaaaaaatgtgtgtattcttaaaatgcaatatttgtaaggcttgttccaatgccacatacttgcagctcccattctatgtgtcatcaatagtgtcctatgcaataaaattatttgcaggtctttaaatcattttaggaaaggatgatcaaaaataa

SEQ ID NO: 256668 - DNA, 651 bp, Artificial Sequence
  derived and/or modified sequence
gagtcatgttgtgatttagtcagttcctttccgctttgtaaaatgctgctgacagatttagagttaactagctcaccactgcctctgcctccaagctgccttttagactgaatagcttttcttgttagccctactttaacatttcttttgaagtggttgtctgcttgaagagggaaacacgtcatgaaactgtaatgcatgaacagaactcaggagttgtctggccagcttagtggtaagatcgagcctcctactgaggccgtccctgcatgcgcctgatgaggaaactgaacttgccccaagtcacatggctgctgccactggtgacatgccaacttaccagatccgagctcctactgctgctttgccacagggagtggtgatggctgcatcgcccggaagtttgcacagtccccagcagctggcagaagaagcaacacgcaaacgagagctgaggctaatgaaaaacagggaagctgcccgggagtgtcgcaggaagaagaaagaatatgtcaaatgtcttgaaaatcgtgtggctgtgcttgaaaaccaaaacaagactctcattgaggaactcaaggccctcaaagatctttattgccataaagtagagtaactgtctttgacttggaccttgtttactctaatcaa

SEQ ID NO: 256669 - DNA, 363 bp, Artificial Sequence
  derived and/or modified sequence
atggccgtgaccggcgacgacaccgacgaggagaccgagctggcccccagccacatggccgccgccaccggcgacatgcccacctaccagatcagagcccccaccgccgccctgccccagggcgtggtgatggccgccagccccggcagcctgcacagcccccagcagctggccgaggaggccaccagaaagagagagctgagactgatgaagaacagagaggccgccagagagtgcagaagaaagaagaaggagtacgtgaagtgcctggagaacagagtggccgtgctggagaaccagaacaagaccctgatcgaggagctgaaggccctgaaggacctgtactgccacaaggtggagtag

SEQ ID NO: 256670 - protein, 109 aa, Artificial Sequence
  derived and/or modified sequence
MAVTGDDTAATGDMPTYQIRAPTAALPQGVVMAASPGSLHSPQQLAEEATRKRELRLMKNREAAKECRRRKKEYVKCLESRVAVLEVQNKKLIEELETLKDICSPKTDY

SEQ ID NO: 256671 - DNA, 291 bp, Artificial Sequence
  derived and/or modified sequence
atgcccacctatcagattcgggcacccactgcggccttgccccagggagttgtgatggctgcctcccccggatctttacattcaccgcagcagctcgccgaagaggcaacacgaaagcgggagctgcgcctaatgaaaaatcgcgaggccgcaaaggagtgcagaagaagaaaaaaagaatatgtcaaatgtctggaatccagggtggcagtcctcgaagtccagaataaaaaactcatagaggagctggaaacccttaaagacatttgttctcccaagacggattattag

SEQ ID NO: 256672 - DNA, 330 bp, Artificial Sequence
  derived and/or modified sequence
atggccgtaaccggcgatgacacagcggcaaccggggatatgccaacttaccagattagggcccctacggcagccttaccgcagggcgtggttatggccgcttcccccggctccttgcatagcccccaacagttggccgaagaggctacgcgtaaacgggagctgcgcttaatgaagaatagagaagccgctaaggagtgccgacgcagaaagaaagagtacgtgaagtgcctggagtcacgcgttgccgttcttgaggtgcagaacaaaaaactcatcgaggagctcgaaaccctaaaggacatttgctctcccaaaacagactattag

SEQ ID NO: 256673 - DNA, 291 bp, Artificial Sequence
  derived and/or modified sequence
atgcccacctaccagatccgggcccccacagctgccctgccccagggcgtggtgatggccgccagccctggcagcctgcacagcccccagcagctggccgaggaggccaccaggaagcgggagctgcggctgatgaagaaccgggaggccgccaaggaatgtagaagaaggaagaaggagtatgtgaagtgcctggagagccgggtggccgtgctggaggtgcagaacaagaagctgattgaggagctggagaccctgaaggacatctgcagccccaagacagactactag

SEQ ID NO: 256674 - DNA, 330 bp, Artificial Sequence
  derived and/or modified sequence
atggctgtgactggagatgacacagctgccactggagacatgcccacctaccagatccgggcccccacagctgccctgccccagggcgtggtgatggccgccagccctggcagcctgcacagcccccagcagctggccgaggaggccaccaggaagcgggagctgcggctgatgaagaaccgggaggccgccaaggagtgcagaagaaggaagaaggagtatgtgaagtgcctggagagccgggtggccgtgctggaggtgcagaacaagaagctgattgaggagctggagaccctgaaggacatctgcagccccaagacagactactag

SEQ ID NO: 256675 - DNA, 291 bp, Artificial Sequence
  derived and/or modified sequence
atgcccacctaccagatccgggcccccaccgccgccctgccccagggagtcgtgatggcagcatctccagggagcctgcactcgccacagcagctggcagaagaggcaacgcggaagcgagaactgagactcatgaaaaatcgtgaggcagccaaggaatgcaggaggcggaagaaagagtatgtcaaatgcttagagtctagggtggccgttctcgaagtgcagaacaaaaagttgattgaggagttggaaacgctgaaggacatctgcagccccaagaccgactactag

SEQ ID NO: 256676 - DNA, 330 bp, Artificial Sequence
  derived and/or modified sequence
atggccgtgaccggcgacgacaccgccgccaccggcgacatgcccacataccagattcgggctcccaccgccgcattaccacagggagtggtaatggccgcctccccgggctccctgcattctccccagcaactggccgaggaagctaccaggaagcgggagctcagacttatgaaaaatcgagaggcggccaaagaatgcaggcgaagaaagaaagaatacgttaagtgtcttgaatctcgagtggccgtgcttgaggtgcagaacaaaaagctcatcgaggagttagagaccctcaaggatatctgctcgccaaagactgattactag

SEQ ID NO: 256677 - DNA, 291 bp, Artificial Sequence
  derived and/or modified sequence
atgcctacttaccaaatcagagctccgaccgccgctctcccccaaggcgtcgtaatggccgcatcccctggctccctgcacagtcctcagcagttggcagaagaggccactcggaagcgggagcttaggctcatgaagaatagggaagctgcaaaggagtgtcgcaggaggaaaaaagagtacgtgaaatgcctagaatcaagggtggcggtcctggaggtgcaaaataaaaaattgattgaggaattggaaaccctgaaagatatttgtagccctaaaacagattattag

SEQ ID NO: 256678 - DNA, 330 bp, Artificial Sequence
  derived and/or modified sequence
atggctgtcacaggcgacgacactgccgctaccggagatatgccaacctatcagatccgagcccctacagccgctctgccacagggcgtggtgatggccgcatcaccaggcagccttcatagtccccagcaattggccgaggaggccacccgtaagcgagaactccgactcatgaagaatcgcgaggcggcaaaggagtgccggcgtcgaaagaaagaatacgtcaagtgtctagagtctcgggtggctgtcctcgaagtgcagaataagaaattgatcgaagagttggagaccctgaaagatatttgcagcccaaaaacagactattag

SEQ ID NO: 256679 - DNA, 1049 bp, Artificial Sequence
  derived and/or modified sequence
actttatgttgaactgtggtagaggaaacaagacagttctgtctgcagaagcccattatggctgtaactggagatgacacagctgccactggtgacatgccaacttaccagatccgagctcctactgctgctttgccacagggagtggtgatggctgcatcgcccggaagtttgcacagtccccagcagctggcagaagaagcaacacgcaaacgagagctgaggctaatgaaaaacagggaagctgccaaagaatgtcgacgtcgaaagaaagaatatgtaaaatgtctggagagccgagttgcagtgctggaagtccagaacaagaagcttatagaggaacttgaaaccttgaaagacatttgttctcccaaaacagattactagaaatatttaactatgaactgaaggcagcatgtatagttgcttttgaaggaatacaatatatagctggcaagaatggtggcttcttttctttgtatcattcatcttcttctttaatcacttaacattcctaaaatgcttcactgtacgtagttaagtcgtagctataacttcaaattttttaaaagagacaaactgtaaaaaatgtgtgtattcttaaaatgcaatatttgtaaggcttgttccaatgccacatacttgcagctcccattctatgtgtcatcaatagtgtcctatgcaataaaattatttgcaggtctttaaatcattttaggaaaggatgatcaaaaataatgcatccagcagtacaataaaagtaaaccacaaaaaaatacctcaggaaagaatagaaagaaagtctatctaatgacatgcctatatgagaagaatagcctagatatgaatatatggcatttgcagatttttatattagttgctttgttaaaaaaaaaaagattgtattgctgtccttgaatgccatagtcaaagagagtttttaatagaaccatgttggttgcactttgtagtgtttggtgctcatttaaatatctgaacatttactacagtttttaactctactgtgtaatataaaagatcttgcagaa

SEQ ID NO: 256680 - DNA, 291 bp, Artificial Sequence
  derived and/or modified sequence
atgcccacctaccagatcagagcccccaccgccgccctgccccagggcgtggtgatggccgccagccccggcagcctgcacagcccccagcagctggccgaggaggccaccagaaagagagagctgagactgatgaagaacagagaggccgccaaggagtgcagaagaagaaagaaggagtacgtgaagtgcctggagagcagagtggccgtgctggaggtgcagaacaagaagctgatcgaggagctggagaccctgaaggacatctgcagccccaagaccgactactag

SEQ ID NO: 256681 - DNA, 330 bp, Artificial Sequence
  derived and/or modified sequence
atggccgtgaccggcgacgacaccgccgccaccggcgacatgcccacctaccagatcagagcccccaccgccgccctgccccagggcgtggtgatggccgccagccccggcagcctgcacagcccccagcagctggccgaggaggccaccagaaagagagagctgagactgatgaagaacagagaggccgccaaggagtgcagaagaagaaagaaggagtacgtgaagtgcctggagagcagagtggccgtgctggaggtgcagaacaagaagctgatcgaggagctggagaccctgaaggacatctgcagccccaagaccgactactag

SEQ ID NO: 256682 - protein, 121 aa, Artificial Sequence
  derived and/or modified sequence
MAVTGDDTDEETELAPSHMAAATGDMPTYQIRAPTAALPQGVVMAASPGSLHSPQQLAEEATRKRELRLMKNREAAKECRRRKKEYVKCLESRVAVLEVQNKKLIEELETLKDICSPKTDY

SEQ ID NO: 256683 - DNA, 366 bp, Artificial Sequence
  derived and/or modified sequence
atggcggtgaccggcgacgacaccgatgaagaaacagagctggctcctagccatatggcggctgcaacaggggacatgcccacataccagatccgcgctccaacagctgcactcccccagggagtagtgatggccgcttctcccgggtcccttcatagtcctcagcagctcgcagaagaagcgacccgtaagagagagttacgcttgatgaagaatcgcgaggcagctaaggagtgtagacgacgcaaaaaagagtatgtgaagtgtctggagtcacgcgtggcagtattagaggtgcagaataagaaactcattgaggagctggaaaccctcaaggacatatgttccccaaagactgattattag

SEQ ID NO: 256684 - DNA, 366 bp, Artificial Sequence
  derived and/or modified sequence
atggctgtgactggagatgacacagatgaggagacagagctggcccccagccacatggctgctgccactggagacatgcccacctaccagatccgggcccccacagctgccctgccccagggcgtggtgatggccgccagccctggcagcctgcacagcccccagcagctggccgaggaggccaccaggaagcgggagctgcggctgatgaagaaccgggaggccgccaaggagtgcagaagaaggaagaaggagtatgtgaagtgcctggagagccgggtggccgtgctggaggtgcagaacaagaagctgattgaggagctggagaccctgaaggacatctgcagccccaagacagactactag

SEQ ID NO: 256685 - DNA, 366 bp, Artificial Sequence
  derived and/or modified sequence
atggccgtgaccggcgacgacaccgacgaggagaccgagctggccccaagccatatggcggccgctacaggtgacatgccgacgtatcagattcgcgctcctaccgcagcattaccccagggggtggtgatggccgctagccccggatcgctgcatagcccgcagcaactagccgaggaggctaccagaaaaagagagctccgcctgatgaagaaccgcgaagcggctaaagagtgtcggcgccggaagaaagaatacgtgaaatgcctggaaagccgcgtggccgtgctagaggtgcagaacaagaagttaatcgaggagttggagacactcaaagacatctgttccccaaagaccgactactag

SEQ ID NO: 256686 - DNA, 366 bp, Artificial Sequence
  derived and/or modified sequence
atggcagtgactggcgacgacacggacgaagagactgagctggcaccatcacacatggctgccgctacaggggacatgccaacataccagatcagagcgccaactgcggcactacctcagggcgtggttatggccgcttctcccggaagcctccattccccgcaacagctggcagaggaggctacaaggaagagggaactgcgtctgatgaaaaatcgcgaggcggcaaaagagtgtcgcagaagaaaaaaagaatacgtcaagtgccttgaatccagggtggccgtgctcgaagtccagaacaagaaactaatcgaagagctggagacactcaaggatatatgcagtccaaaaactgattattag

SEQ ID NO: 256687 - DNA, 429 bp, Artificial Sequence
  derived and/or modified sequence
tggaacactttatgttgaactgtggtagaggaaacaagacagttctgtctgcagaagcccattatggctgtaactggagatgacacagatgaggaaactgaacttgccccaagtcacatggctgctgccactggtgacatgccaacttaccagatccgagctcctactgctgctttgccacagggagtggtgatggctgcatcgcccggaagtttgcacagtccccagcagctggcagaagaagcaacacgcaaacgagagctgaggctaatgaaaaacagggaagctgccaaagaatgtcgacgtcgaaagaaagaatatgtaaaatgtctggagagccgagttgcagtgctggaagtccagaacaagaagcttatagaggaacttgaaaccttgaaagacatttgttctcccaaaacagattactag

SEQ ID NO: 256688 - DNA, 366 bp, Artificial Sequence
  derived and/or modified sequence
atggccgtgaccggcgacgacaccgacgaggagaccgagctggcccccagccacatggccgccgccaccggcgacatgcccacctaccagatcagagcccccaccgccgccctgccccagggcgtggtgatggccgccagccccggcagcctgcacagcccccagcagctggccgaggaggccaccagaaagagagagctgagactgatgaagaacagagaggccgccaaggagtgcagaagaagaaagaaggagtacgtgaagtgcctggagagcagagtggccgtgctggaggtgcagaacaagaagctgatcgaggagctggagaccctgaaggacatctgcagccccaagaccgactactag

SEQ ID NO: 256689 - protein, 108 aa, Artificial Sequence
  derived and/or modified sequence
MAVTGDDTAATGDMPTYQIRAPTAALPQGVVMAASPGSLHSPQQLAEEATRKRELRLMKNREAARECRRKKKEYVKCLENRVAVLENQNKTLIEELKALKDLYCHKVE

SEQ ID NO: 256690 - DNA, 327 bp, Artificial Sequence
  derived and/or modified sequence
atggcagtgacgggagacgatacagcagccactggagatatgcctacgtaccaaatccgcgctcctacagccgccttgccacaaggtgtagttatggctgccagccctggttccctgcacagcccccagcagctggccgaggaggctactcggaaacgggaattgcgactcatgaagaacagggaagccgcaagggagtgcagaaggaaaaagaaagagtatgttaaatgccttgagaatagagtggctgttctagaaaatcagaataaaacgttaatcgaagaactcaaggctctgaaggacttgtactgccataaggtagagtag

SEQ ID NO: 256691 - DNA, 327 bp, Artificial Sequence
  derived and/or modified sequence
atggctgtgactggagatgacacagctgccactggagacatgcccacctaccagatccgggcccccacagctgccctgccccagggcgtggtgatggccgccagccctggcagcctgcacagcccccagcagctggccgaggaggccaccaggaagcgggagctgcggctgatgaagaaccgggaggccgcccgggagtgcaggaggaagaagaaggagtatgtgaagtgcctggagaacagagtggccgtgctggagaaccagaacaagaccctgattgaggagctgaaggccctgaaggacctgtactgccacaaggtggagtag

SEQ ID NO: 256692 - DNA, 327 bp, Artificial Sequence
  derived and/or modified sequence
atggccgtgaccggcgacgacaccgccgccaccggcgacatgcccacttatcagatccgcgctcctaccgcggcccttccccaaggggtggtgatggcggcatcccctggatcactgcactccccccagcagctggctgaggaggccacacgaaagcgagaactccgcctgatgaaaaatcgcgaagcagcccgagagtgtagacggaaaaagaaagaatatgtgaagtgtctggaaaacagagtggctgtcctggagaatcaaaataaaactctgattgaggagctgaaggcgctgaaagacctgtactgtcataaggtcgaatag

SEQ ID NO: 256693 - DNA, 327 bp, Artificial Sequence
  derived and/or modified sequence
atggctgtgactggggatgatacagccgctacaggggatatgccgacttatcaaattcgtgcaccaactgctgctttgccacagggggtggtgatggccgcaagcccagggagcctgcatagcccccagcaactcgcggaagaggccacccgtaagcgagagctccggctgatgaagaaccgcgaggctgctcgggagtgcaggcggaagaagaaggagtacgtcaagtgccttgagaatagagttgcagtgctcgagaatcagaataagacattgatagaggagttgaaagctttgaaagacctatattgtcacaaggtcgagtag

SEQ ID NO: 256694 - DNA, 1895 bp, Artificial Sequence
  derived and/or modified sequence
tgtggtagaggaaacaagacagttctgtctgcagaagcccattatggctgtaactggagatgacacagctgccactggtgacatgccaacttaccagatccgagctcctactgctgctttgccacagggagtggtgatggctgcatcgcccggaagtttgcacagtccccagcagctggcagaagaagcaacacgcaaacgagagctgaggctaatgaaaaacagggaagctgcccgggagtgtcgcaggaagaagaaagaatatgtcaaatgtcttgaaaatcgtgtggctgtgcttgaaaaccaaaacaagactctcattgaggaactcaaggccctcaaagatctttattgccataaagtagagtaactgtctttgacttggaccttgtttactctaatcaaggcaggagatgcagcagtcctacttattgccatgtggacttgtgggaaggacacgtgtgacccttaagaatccagtttggattagtgtttgaaattgaattgggaatgttgttccaggatgtggaatgcagccgtgatcacacttaccgagcttactttgatctgtttgtcaatagcatgcaaaaaatgctttgtttgccctttgcttctgctttttttcagggaagctgccaaagaatgtcgacgtcgaaagaaagaatatgtaaaatgtctggagagccgagttgcagtgctggaagtccagaacaagaagcttatagaggaacttgaaaccttgaaagacatttgttctcccaaaacagattactagaaatatttaactatgaactgaaggcagcatgtatagttgcttttgaaggaatacaatatatagctggcaagaatggtggcttcttttctttgtatcattcatcttcttctttaatcacttaacattcctaaaatgcttcactgtacgtagttaagtcgtagctataacttcaaattttttaaaagagacaaactgtaaaaaatgtgtgtattcttaaaatgcaatatttgtaaggcttgttccaatgccacatacttgcagctcccattctatgtgtcatcaatagtgtcctatgcaataaaattatttgcaggtctttaaatcattttaggaaaggatgatcaaaaataatgcatccagcagtacaataaaagtaaaccacaaaaaaatacctcaggaaagaatagaaagaaagtctatctaatgacatgcctatatgagaagaatagcctagatatgaatatatggcatttgcagatttttatattagttgctttgttaaaaaaaaaaagattgtattgctgtccttgaatgccatagtcaaagagagtttttaatagaaccatgttggttgcactttgtagtgtttggtgctcatttaaatatctgaacatttactacagtttttaactctactgtgtaatataaaagatcttgcagaagttcttagtgttggtttaatattacctaatgaaagtgatgacatattttttatatctggaatgagcctgttgggatcgcattgcataccttcggggtacaagtcagtttctacactgggtgctgatccttgcacgcgccctttctaccatctcacggtggggatggccgcagggctgtgcacccagaagaagatggctgttagcgtttcggccttcataatggcctgagactttctttctgtaggtggtctggagctgtccggctggtggccccctattttgccatttagcgaacaaccacaggaattttaaaaacaaaaacatcccaagattttttcatttcaaaatgcttcaaagtccacattagatcagatactccgctgtcggcacattcagctgaggttcattacaatcgagactgcaatgtgatctatgtttcatcttgtttttataataaa

SEQ ID NO: 256695 - DNA, 327 bp, Artificial Sequence
  derived and/or modified sequence
atggccgtgaccggcgacgacaccgccgccaccggcgacatgcccacctaccagatcagagcccccaccgccgccctgccccagggcgtggtgatggccgccagccccggcagcctgcacagcccccagcagctggccgaggaggccaccagaaagagagagctgagactgatgaagaacagagaggccgccagagagtgcagaagaaagaagaaggagtacgtgaagtgcctggagaacagagtggccgtgctggagaaccagaacaagaccctgatcgaggagctgaaggccctgaaggacctgtactgccacaaggtggagtag

SEQ ID NO: 256696 - protein, 112 aa, Artificial Sequence
  derived and/or modified sequence
MNRTQELSGQLSAATGDMPTYQIRAPTAALPQGVVMAASPGSLHSPQQLAEEATRKRELRLMKNREAARECRRKKKEYVKCLENRVAVLENQNKTLIEELKALKDLYCHKVE

SEQ ID NO: 256697 - DNA, 339 bp, Artificial Sequence
  derived and/or modified sequence
atgaacagaacccaagagctgtccgggcagctgagcgctgcaactggcgacatgcccacctaccagattagagctccaactgctgccctcccacaaggggtggtaatggccgcgtctcctggctcgctccactcacctcaacagctggcggaggaggccaccaggaaaagggaactccgcctcatgaaaaaccgcgaggcagcaagggaatgtaggagaaaaaagaaggagtacgtaaaatgcctggagaaccgtgttgctgttcttgagaaccaaaacaaaacacttatcgaggagctgaaagctctcaaagatctgtactgtcacaaagtagaatag

SEQ ID NO: 256698 - DNA, 339 bp, Artificial Sequence
  derived and/or modified sequence
atgaacagaacccaggagctgagcggccagctgtctgctgccactggagacatgcccacctaccagatccgggcccccacagctgccctgccccagggcgtggtgatggccgccagccctggcagcctgcacagcccccagcagctggccgaggaggccaccaggaagcgggagctgcggctgatgaagaaccgggaggccgcccgggagtgcaggaggaagaagaaggagtatgtgaagtgcctggagaacagagtggccgtgctggagaaccagaacaagaccctgattgaggagctgaaggccctgaaggacctgtactgccacaaggtggagtag

SEQ ID NO: 256699 - DNA, 339 bp, Artificial Sequence
  derived and/or modified sequence
atgaaccggacccaggagctgagcggccagctgagcgccgccaccggcgatatgcccacatatcaaattcgcgctccgacagccgccttaccacaaggcgtggtgatggccgcttctccggggtcactgcattccccccagcaactcgccgaggaggcaacccgcaagcgagagctgaggttaatgaaaaaccgcgaagctgctcgtgagtgtaggcgcaaaaagaaggagtatgtcaaatgtctggagaaccgagtggccgtgttggagaatcagaataagacactcatcgaagaattgaaagcccttaaggatctatactgccataaagtggagtag

SEQ ID NO: 256700 - DNA, 339 bp, Artificial Sequence
  derived and/or modified sequence
atgaacaggacacaggaactgtccggacaactaagcgccgcaactggagacatgcccacgtaccagattcgagcaccgacagcagccctgccccaaggagttgttatggctgcgagccccggatcgttacacagcccacagcaattggctgaggaggcaactcggaaaagagaactccggttaatgaagaatagagaagctgccagagagtgccgccgtaaaaaaaaggagtatgtgaagtgtctggagaaccgcgtagcagtgcttgagaatcagaataaaactttgatagaggagttgaaagccctcaaggatttatattgccataaagtggagtag

SEQ ID NO: 256701 - DNA, 626 bp, Artificial Sequence
  derived and/or modified sequence
gtaaaatgctgctgacagatttagagttaactagctcaccactgcctctgcctccaagctgccttttagactgaatagcttttcttgttagccctactttaacatttcttttgaagtggttgtctgcttgaagagggaaacacgtcatgaaactgtaatgcatgaacagaactcaggagttgtctggccagcttagtgctgccactggtgacatgccaacttaccagatccgagctcctactgctgctttgccacagggagtggtgatggctgcatcgcccggaagtttgcacagtccccagcagctggcagaagaagcaacacgcaaacgagagctgaggctaatgaaaaacagggaagctgcccgggagtgtcgcaggaagaagaaagaatatgtcaaatgtcttgaaaatcgtgtggctgtgcttgaaaaccaaaacaagactctcattgaggaactcaaggccctcaaagatctttattgccataaagtagagtaactgtctttgacttggaccttgtttactctaatcaaggcaggagatgcagcagtcctacttattgccatgtggacttgtgggaaggacacgtgtgacccttaagaatccagtttggattagtgtttg

SEQ ID NO: 256702 - DNA, 339 bp, Artificial Sequence
  derived and/or modified sequence
atgaacagaacccaggagctgagcggccagctgagcgccgccaccggcgacatgcccacctaccagatcagagcccccaccgccgccctgccccagggcgtggtgatggccgccagccccggcagcctgcacagcccccagcagctggccgaggaggccaccagaaagagagagctgagactgatgaagaacagagaggccgccagagagtgcagaagaaagaagaaggagtacgtgaagtgcctggagaacagagtggccgtgctggagaaccagaacaagaccctgatcgaggagctgaaggccctgaaggacctgtactgccacaaggtggagtag

SEQ ID NO: 256703 - DNA, 288 bp, Artificial Sequence
  derived and/or modified sequence
atgcccacataccaaatccgcgcgccaacggcagccttgccccagggtgtggtgatggcggcatctcccggatctctgcactctccgcagcaactggccgaggaagccaccaggaaaagagagctcaggttaatgaagaatcgtgaggccgcaagagagtgccgacgaaagaaaaaagagtacgtcaaatgcttagaaaaccgagtagcagtgttggaaaaccaaaataagactctgatcgaggagcttaaagcactgaaagacctgtattgtcacaaagttgaatag

SEQ ID NO: 256704 - DNA, 288 bp, Artificial Sequence
  derived and/or modified sequence
atgcccacctatcaaatcagggcacccaccgctgcccttccccaaggtgttgtcatggccgcgagtcctggcagcctgcatagcccacagcaactggcagaggaagctaccaggaagcgggagcttagactgatgaaaaatagggaagcggctagggaatgtagacggaagaagaaggagtacgtgaaatgcctggaaaatagagtggccgtcctcgagaaccaaaacaagacacttattgaggagctgaaggctctcaaggatctctattgccacaaagtcgaatag

SEQ ID NO: 256705 - DNA, 309 bp, Artificial Sequence
  derived and/or modified sequence
atggctgcagccacgggcgacatgcccacataccaaatcagagccccaactgcggccctacctcagggagtggtcatggccgcctctcccggttccctgcactctcctcagcagctcgccgaggaagcaactcggaagcgcgagctccggctaatgaagaaccgggaagctgctcgcgagtgcagacgaaagaagaaggagtatgtaaagtgtttggagaatcgcgtggccgtgttggaaaatcagaataaaaccctgatcgaggaattaaaggccctcaaggacttgtattgccataaggttgagtag

SEQ ID NO: 256706 - DNA, 288 bp, Artificial Sequence
  derived and/or modified sequence
atgcccacctaccagatccgggcccccacagctgccctgccccagggcgtggtgatggccgccagccctggcagcctgcacagcccccagcagctggccgaggaggccaccaggaagcgggagctgcggctgatgaagaaccgggaggccgccagagaatgtagaaggaagaagaaggagtatgtgaagtgcctggagaacagagtggccgtgctggagaaccagaacaagaccctcatcgaggagctgaaggccctgaaggacctgtactgccacaaggtggagtag

SEQ ID NO: 256707 - DNA, 309 bp, Artificial Sequence
  derived and/or modified sequence
atggctgctgccactggagacatgcccacctaccagatccgggcccccacagctgccctgccccagggcgtggtgatggccgccagccctggcagcctgcacagcccccagcagctggccgaggaggccaccaggaagcgggagctgcggctgatgaagaaccgggaggccgcccgggagtgcaggaggaagaagaaggagtatgtgaagtgcctggagaacagagtggccgtgctggagaaccagaacaagaccctgattgaggagctgaaggccctgaaggacctgtactgccacaaggtggagtag

SEQ ID NO: 256708 - DNA, 288 bp, Artificial Sequence
  derived and/or modified sequence
atgcccacctaccagatccgggcccccaccgccgccctgccccagggggttgttatggccgcttcacccgggagcctgcatagccctcagcagctggcggaagaggcaacacggaagagagagctgagacttatgaaaaatcgtgaggcagctcgggaatgtagacgaaaaaagaaagaatatgttaagtgtctggaaaatcgggttgccgtcctggaaaatcagaacaaaactctgatcgaggaactgaaagctctgaaggatctgtactgtcacaaggtagagtag

SEQ ID NO: 256709 - DNA, 288 bp, Artificial Sequence
  derived and/or modified sequence
atgcccacctaccagatccgggcccccaccgccgccctgccccagggggtggtaatggccgcttctcctggcagcctgcactctcctcagcaattggccgaggaagctaccagaaagcgagagctgagactgatgaaaaaccgagaggcggcccgagagtgtaggaggaaaaagaaggagtacgtaaagtgtctggagaacagagtcgccgtgttagaaaatcagaataaaactttaatagaagagttaaaggcactgaaggacctgtattgtcacaaggtagagtag

SEQ ID NO: 256710 - DNA, 309 bp, Artificial Sequence
  derived and/or modified sequence
atggccgccgccaccggcgacatgcccacctaccagatccgggcccccactgctgctctgccccagggagtcgtgatggcggcctcacctggaagcctccacagtccccaacaactagcagaggaggctactcggaaacgagagctccggcttatgaaaaatcgagaggccgctagagaatgtaggcgcaaaaaaaaggagtacgtgaaatgtctagagaatcgcgtggctgtgctcgaaaaccagaataagaccctgatcgaagagctgaaagccctcaaggacttatattgtcacaaggtggaatag

SEQ ID NO: 256711 - DNA, 288 bp, Artificial Sequence
  derived and/or modified sequence
atgcccacctaccagatccgcgctcccacagcagcactcccacagggtgtggttatggcagcctctcccggttctctccactctccacagcaactggctgaggaggctacccggaagcgcgaattacggctgatgaagaatagggaggccgcacgggagtgtaggaggaagaagaaagaatacgtaaagtgcctggagaatagagtcgcagtgctcgagaatcagaacaagacattgattgaagagcttaaagcacttaaggacctatattgtcacaaggtcgagtag

SEQ ID NO: 256712 - DNA, 288 bp, Artificial Sequence
  derived and/or modified sequence
atgcccacctatcagattagggctccgacagccgctctgccccaaggagtggtcatggccgcaagtccgggaagcttgcattctccacagcagttggccgaggaggctactcgtaaacgcgaactaagacttatgaagaatcgcgaggccgctcgcgagtgccgcaggaagaagaaagagtatgtgaaatgccttgagaaccgagtggcagtgttagaaaaccaaaataagaccctgattgaagaactgaaagccctgaaagacctctattgtcacaaagtggaatag

SEQ ID NO: 256713 - DNA, 309 bp, Artificial Sequence
  derived and/or modified sequence
atggccgcagcgacaggggacatgcctacctatcagattcgcgctcctactgccgcattgcctcaaggagttgttatggcagctagccctggaagcctgcattctccccaacagctggccgaggaggcaaccaggaaacgggaattgcgtctcatgaagaaccgggaggccgctcgcgagtgcagacggaaaaaaaaggagtatgtaaagtgtctggagaacagagttgcagtgctcgaaaatcagaataagactctgatagaggaactgaaggctttgaaggatctctattgtcacaaggttgagtag

SEQ ID NO: 256714 - DNA, 1625 bp, Artificial Sequence
  derived and/or modified sequence
cagatttagagttaactagctcaccactgcctctgcctccaagctgccttttagactgaatagcttttcttgttagccctactttaacatttcttttgaagtggttgtctgcttgaagagggaaacacgtcatgaaactgtaatgcatgaacagaactcaggagttgtctggccagcttagtggtaagatcgagcctcctactgaggccgtccctgcatgcgcctgctgccactggtgacatgccaacttaccagatccgagctcctactgctgctttgccacagggagtggtgatggctgcatcgcccggaagtttgcacagtccccagcagctggcagaagaagcaacacgcaaacgagagctgaggctaatgaaaaacagggaagctgcccgggagtgtcgcaggaagaagaaagaatatgtcaaatgtcttgaaaatcgtgtggctgtgcttgaaaaccaaaacaagactctcattgaggaactcaaggccctcaaagatctttattgccataaagtagagtaactgtctttgacttggaccttgtttactctaatcaaggcaggagatgcagcagtcctacttattgccatgtggacttgtgggaaggacacgtgtgacccttaagaatccagtttggattagtgtttgaaattgaattgggaatgttgttccaggatgtggaatgcagccgtgatcacacttaccgagcttactttgatctgtttgtcaatagcatgcaaaaaatgctttgtttgccctttgcttctgctttttttcagggaagctgccaaagaatgtcgacgtcgaaagaaagaatatgtaaaatgtctggagagccgagttgcagtgctggaagtccagaacaagaagcttatagaggaacttgaaaccttgaaagacatttgttctcccaaaacagattactagaaatatttaactatgaactgaaggcagcatgtatagttgcttttgaaggaatacaatatatagctggcaagaatggtggcttcttttctttgtatcattcatcttcttctttaatcacttaacattcctaaaatgcttcactgtacgtagttaagtcgtagctataacttcaaattttttaaaagagacaaactgtaaaaaatgtgtgtattcttaaaatgcaatatttgtaaggcttgttccaatgccacatacttgcagctcccattctatgtgtcatcaatagtgtcctatgcaataaaattatttgcaggtctttaaatcattttaggaaaggatgatcaaaaataatgcatccagcagtacaataaaagtaaaccacaaaaaaatacctcaggaaagaatagaaagaaagtctatctaatgacatgcctatatgagaagaatagcctagatatgaatatatggcatttgcagatttttatattagttgctttgttaaaaaaaaaaagattgtattgctgtccttgaatgccatagtcaaagagagtttttaatagaaccatgttggttgcactttgtagtgtttggtgctcatttaaatatctgaacatttactacagtttttaactctactgtgtaatataaaagatcttgcagaagttcttagtgttggtttaatattacctaat

SEQ ID NO: 256715 - DNA, 1416 bp, Artificial Sequence
  derived and/or modified sequence
cggtcgggctcgccgtctccacctcctcgcgtccgtaatcagtgacgaggtccgctacgtaaatccctttgcggcggctgccactggtgacatgccaacttaccagatccgagctcctactgctgctttgccacagggagtggtgatggctgcatcgcccggaagtttgcacagtccccagcagctggcagaagaagcaacacgcaaacgagagctgaggctaatgaaaaacagggaagctgcccgggagtgtcgcaggaagaagaaagaatatgtcaaatgtcttgaaaatcgtgtggctgtgcttgaaaaccaaaacaagactctcattgaggaactcaaggccctcaaagatctttattgccataaagtagagtaactgtctttgacttggaccttgtttactctaatcaaggcaggagatgcagcagtcctacttattgccatgtggacttgtgggaaggacacgtgtgacccttaagaatccagtttggattagtgtttgaaattgaattgggaatgttgttccaggatgtggaatgcagccgtgatcacacttaccgagcttactttgatctgtttgtcaatagcatgcaaaaaatgctttgtttgccctttgcttctgctttttttcagggaagctgccaaagaatgtcgacgtcgaaagaaagaatatgtaaaatgtctggagagccgagttgcagtgctggaagtccagaacaagaagcttatagaggaacttgaaaccttgaaagacatttgttctcccaaaacagattactagaaatatttaactatgaactgaaggcagcatgtatagttgcttttgaaggaatacaatatatagctggcaagaatggtggcttcttttctttgtatcattcatcttcttctttaatcacttaacattcctaaaatgcttcactgtacgtagttaagtcgtagctataacttcaaattttttaaaagagacaaactgtaaaaaatgtgtgtattcttaaaatgcaatatttgtaaggcttgttccaatgccacatacttgcagctcccattctatgtgtcatcaatagtgtcctatgcaataaaattatttgcaggtctttaaatcattttaggaaaggatgatcaaaaataatgcatccagcagtacaataaaagtaaaccacaaaaaaatacctcaggaaagaatagaaagaaagtctatctaatgacatgcctatatgagaagaatagcctagatatgaatatatggcatttgcagatttttatattagttgctttgttaaaaaaaaaaagattgtattgctgtccttgaatgccatagtcaaagagagtttttaatagaaccatgttggttgcactttgtagtgtttggtgctcatttaaatatctgaacatttactacagtttttaact

SEQ ID NO: 256716 - DNA, 288 bp, Artificial Sequence
  derived and/or modified sequence
atgcccacctaccagatcagagcccccaccgccgccctgccccagggcgtggtgatggccgccagccccggcagcctgcacagcccccagcagctggccgaggaggccaccagaaagagagagctgagactgatgaagaacagagaggccgccagagagtgcagaagaaagaagaaggagtacgtgaagtgcctggagaacagagtggccgtgctggagaaccagaacaagaccctgatcgaggagctgaaggccctgaaggacctgtactgccacaaggtggagtag

SEQ ID NO: 256717 - DNA, 309 bp, Artificial Sequence
  derived and/or modified sequence
atggccgccgccaccggcgacatgcccacctaccagatcagagcccccaccgccgccctgccccagggcgtggtgatggccgccagccccggcagcctgcacagcccccagcagctggccgaggaggccaccagaaagagagagctgagactgatgaagaacagagaggccgccagagagtgcagaagaaagaagaaggagtacgtgaagtgcctggagaacagagtggccgtgctggagaaccagaacaagaccctgatcgaggagctgaaggccctgaaggacctgtactgccacaaggtggagtag

SEQ ID NO: 256718 - protein, 113 aa, Artificial Sequence
  derived and/or modified sequence
MNRTQELSGQLSAATGDMPTYQIRAPTAALPQGVVMAASPGSLHSPQQLAEEATRKRELRLMKNREAAKECRRRKKEYVKCLESRVAVLEVQNKKLIEELETLKDICSPKTDY

SEQ ID NO: 256719 - DNA, 342 bp, Artificial Sequence
  derived and/or modified sequence
atgaaccggacacaggaactgtctggccagttatctgccgccactggagacatgcctacttaccaaatacgtgcacccaccgctgccctgcctcagggtgtagtcatggccgcctcgccgggttcactgcatagtcctcagcaactcgcagaggaagccacacgcaaacgggaactgcgacttatgaagaatcgggaggccgctaaggagtgcaggaggcggaaaaaggaatacgtgaagtgtttggaaagccgggtggccgtcctggaagtgcagaacaaaaagctcattgaggagttggagacactcaaagatatctgctcgcccaaaaccgattactag

SEQ ID NO: 256720 - DNA, 342 bp, Artificial Sequence
  derived and/or modified sequence
atgaacagaacccaggagctgagcggccagctgtctgctgccactggagacatgcccacctaccagatccgggcccccacagctgccctgccccagggcgtggtgatggccgccagccctggcagcctgcacagcccccagcagctggccgaggaggccaccaggaagcgggagctgcggctgatgaagaaccgggaggccgccaaggagtgcagaagaaggaagaaggagtatgtgaagtgcctggagagccgggtggccgtgctggaggtgcagaacaagaagctgattgaggagctggagaccctgaaggacatctgcagccccaagacagactactag

SEQ ID NO: 256721 - DNA, 342 bp, Artificial Sequence
  derived and/or modified sequence
atgaaccggacccaggagctgagcggccagctgagcgccgccaccggggacatgcctacatatcagatacgggccccaacagcggccctcccacagggagtggtaatggccgcatcaccaggatcactccattctcctcaacagctagcggaggaggctactaggaaacgcgaactgcggctaatgaagaatcgtgaagctgccaaggagtgtaggcggcgcaaaaaggagtatgtgaaatgcttagaatccagagtcgccgtcctggaggtacagaacaagaagctgatcgaggagctggagaccttaaaggatatttgcagccccaaaacagactattag

SEQ ID NO: 256722 - DNA, 342 bp, Artificial Sequence
  derived and/or modified sequence
atgaataggacgcaggagctgagcggccagctctccgccgctaccggggacatgcctacttaccagatcagagcacccactgccgcactgccgcaaggagtcgtgatggccgcatcgcccggatcactccactcgccacaacagctggctgaagaagcaactcgaaaacgggagctcaggctcatgaagaatagggaggccgctaaggagtgccggagacgaaaaaaggaatatgtaaaatgtttagaatccagggtggctgtgttggaggttcaaaataagaagctcattgaagagctggagaccctgaaagatatatgttcaccaaaaactgattattag

SEQ ID NO: 256723 - DNA, 469 bp, Artificial Sequence
  derived and/or modified sequence
cttttgaagtggttgtctgcttgaagagggaaacacgtcatgaaactgtaatgcatgaacagaactcaggagttgtctggccagcttagtgctgccactggtgacatgccaacttaccagatccgagctcctactgctgctttgccacagggagtggtgatggctgcatcgcccggaagtttgcacagtccccagcagctggcagaagaagcaacacgcaaacgagagctgaggctaatgaaaaacagggaagctgccaaagaatgtcgacgtcgaaagaaagaatatgtaaaatgtctggagagccgagttgcagtgctggaagtccagaacaagaagcttatagaggaacttgaaaccttgaaagacatttgttctcccaaaacagattactagaaatatttaactatgaactgaaggcagcatgtatagttgcttttgaaggaatacaatatatagctggcaagaa

SEQ ID NO: 256724 - DNA, 342 bp, Artificial Sequence
  derived and/or modified sequence
atgaacagaacccaggagctgagcggccagctgagcgccgccaccggcgacatgcccacctaccagatcagagcccccaccgccgccctgccccagggcgtggtgatggccgccagccccggcagcctgcacagcccccagcagctggccgaggaggccaccagaaagagagagctgagactgatgaagaacagagaggccgccaaggagtgcagaagaagaaagaaggagtacgtgaagtgcctggagagcagagtggccgtgctggaggtgcagaacaagaagctgatcgaggagctggagaccctgaaggacatctgcagccccaagaccgactactag

SEQ ID NO: 256725 - DNA, 633 bp, Artificial Sequence
  derived and/or modified sequence
atgggcatcgtgcagatctgcaagggcgagtacttctggctggagcccaagaacgccttcgagaacttccaggagcccgacatcggcctggtggccctggccttcctgcagggcagcttcgcctacggcggctggaacttcctgaactacgtgaccgaggagctggtggacccctacaagaacctgcccagagccatcttcatcagcatccccctggtgaccttcgtgtacgtgttcgccaacgtggcctacgtgaccgccatgagcccccaggagctgctggccagcaacgccgtggccgtgaccttcggcgagaagctgctgggcgtgatggcctggatcatgcccatcagcgtggccctgagcaccttcggcggcgtgaacggcagcctgcacctgctgagcgccgtgctgagatggagccccagaggcccccccagccagtgcgtgggccacgaccccagagaggccctgcaccccaaccccagccccgccctgcacatgcacctgcaccccgccgacgccggccaccagagacacgtgcacacccaccagctgtgcggcctgcaccagctgcccctgctgtggggccacggctgctggaccgacagccccagcctggaggaggcctag

SEQ ID NO: 256726 - DNA, 999 bp, Artificial Sequence
  derived and/or modified sequence
atgggcatcgtgcagatctgcaagggcgagtacttctggctggagcccaagaacgccttcgagaacttccaggagcccgacatcggcctggtggccctggccttcctgcagggcagcttcgcctacggcggctggaacttcctgaactacgtgaccgaggagctggtggacccctacaagaacctgcccagagccatcttcatcagcatccccctggtgaccttcgtgtacgtgttcgccaacgtggcctacgtgaccgccatgagcccccaggagctgctggccagcaacgccgtggccgtgaccttcggcgagaagctgctgggcgtgatggcctggatcatgcccatcagcgtggccctgagcaccttcggcggcgtgaacggcagcctgttcaccagcagcagactgttcttcgccggcgccagagagggccacctgcccagcgtgctggccatgatccacgtgaagagatgcacccccatccccgccctgctgttcacctgcatcagcaccctgctgatgctggtgaccagcgacatgtacaccctgatcaactacgtgggcttcatcaactacctgttctacggcgtgaccgtggccggccagatcgtgctgagatggaagaagcccgacatccccagacccatcaagatcaacctgctgttccccatcatctacctgctgttctgggccttcctgctggtgttcagcctgtggagcgagcccgtggtgtgcggcatcggcctggccatcatgctgaccggcgtgcccgtgtacttcctgggcgtgtactggcagcacaagcccaagtgcttcagcgacttcatcgagctgctgaccctggtgagccagaagatgtgcgtggtggtgtaccccgaggtggagagaggcagcggcaccgaggaggccaacgaggacatggaggagcagcagcagcccatgtaccagcccacccccaccaaggacaaggacgtggccggccagccccagccctag

SEQ ID NO: 256727 - DNA, 912 bp, Artificial Sequence
  derived and/or modified sequence
atgggaatcgtccagatctgtaaaggggagtacttttggctggaacccaaaaatgcatttgaaaatttccaagagccggatatcggactcgtggcactggccttcctgcaggggtcctttgcctacggagggtggaacttcctcaattacgttacggaagaactcgtggatccttataaaaacctgcctcgggcgatttttatcagcatcccgctcgtcacgttcgtctacgtgttcgccaacgttgcctatgtgacggccatgagtccccaggagctgcttgcttctaatgcggttgctgtgacgtttggcgagaaactgctcggtgtgatggcttggataatgcccataagcgtcgcgctgtccaccttcggcggcgtgaacggatcgctgtttacctcctctcggctgtttttcgccggagcccgtgaggggcacctcccatctgtgctggccatgatacatgtcaagcgctgtacaccgatcccagccctgctctttacatgtattagcacattacttatgctcgttacctcagacatgtacaccctgatcaactacgtcggcttcatcaattatctcttttacggggttacagtggctggccagatagttctgcgatggaagaaaccagatatccctcgccctatcaaaatcaatctcctcttcccaatcatttatctattgttttgggcattcctcctggtgttttcactttggtccgaacctgtcgtgtgtggtatcggcctcgcaattatgctcacgggcgtgccagtttactttctgggtgtgtattggcaacacaagcctaaatgtttttctgatttcatcgagttgcttacactcgtgagtcagaaaatgtgtgttgtggtctatcccgaggtagagggcttaagggacaggggagggtag

SEQ ID NO: 256728 - DNA, 633 bp, Artificial Sequence
  derived and/or modified sequence
atggggatcgttcagatttgcaagggagagtacttctggcttgagccaaaaaacgcattcgaaaacttccaggaacctgacatcggccttgtggcgcttgcctttctacagggcagtttcgcatatggcggctggaattttctcaactatgtgacagaggagctggttgatccgtacaagaatctgcctagggctattttcatctctatccctctagtgacgtttgtttatgtcttcgctaacgtggcatacgtgaccgctatgtcaccccaggaactcctcgccagtaatgccgtcgccgtcaccttcggcgagaaacttttgggagtgatggcctggataatgccaatctccgtggcgctgagtacattcggaggggtgaatggttcgctccacctgctgagcgctgttctacgttggtcaccaagaggaccaccttctcaatgcgtggggcatgatccccgggaggctttgcatcccaacccatctcctgcccttcatatgcacctgcacccggccgacgccggccaccagcgccacgtccacacccaccagctttgtgggctgcatcagctccccctcctttgggggcacggatgttggacagattccccatcattggaagaagcatag

SEQ ID NO: 256729 - DNA, 999 bp, Artificial Sequence
  derived and/or modified sequence
atgggcattgtgcagatatgtaagggcgaatacttttggttggagcccaagaacgcttttgagaactttcaggagccagacattggactggtcgctttagctttcctccagggcagtttcgcttacggggggtggaacttcctcaattacgtgaccgaggaactggtcgacccgtataagaaccttcccagagccatttttatttccattcctctggtcacttttgtgtacgtgttcgctaatgtggcttacgtgaccgcaatgtccccgcaagagctcctcgccagcaacgccgtcgcagttacctttggagagaagctgctaggagtaatggcctggatcatgcccatctcagtggctctgtctacttttggaggggtgaatggtagtctctttacgtcttcgcggctgttctttgcaggcgcccgggaagggcatctccccagtgtcttagccatgattcatgttaaacgctgtacccctatccctgcccttctgtttacctgcatcagcacccttctcatgttggtgacatcagacatgtatacactcataaactacgtgggcttcatcaactacctcttctatggcgttactgttgcaggccagatcgtattgcgctggaagaaacctgacataccaagacctatcaagataaatctgttgttcccaataatctacctgttgttttgggcctttttgcttgtgtttagcctgtggtcagagccagtagtgtgcggaattggcctggccatcatgctcaccggagtacccgtgtatttcctcggagtttactggcaacacaaacccaagtgcttcagtgacttcatagagctgttgactttagtgtcgcaaaaaatgtgtgtcgtcgtgtatccagaggtcgaacgcggttcaggaaccgaggaggctaacgaggacatggaagagcagcagcagcctatgtatcagccgacacctaccaaggacaaggacgtggctggacagccccagccgtag

SEQ ID NO: 256730 - DNA, 912 bp, Artificial Sequence
  derived and/or modified sequence
atgggcatcgtgcagatctgcaagggggagtacttctggctggagcccaagaatgcctttgagaacttccaggagccagacatcggcctggtggccctggccttcctgcagggcagctttgcctacggcggctggaacttcctgaactacgtgacagaggagctggtggacccctacaagaacctgccccgggccatcttcatcagcatccccctggtgacctttgtgtatgtgtttgccaacgtggcctacgtgacagccatgagcccccaggagctgctggccagcaatgctgtggccgtgacctttggagagaagctgctgggcgtgatggcctggatcatgcccatctctgtggccctgagcaccttcggcggcgtgaatggcagcctcttcaccagcagccgcctcttctttgctggggcccgggagggccacctgcccagcgtgctggccatgattcatgtgaagcgctgcacccccatcccagccctgctcttcacctgcatcagcaccctgctgatgctggtgaccagtgacatgtacaccctcatcaactacgtgggcttcatcaactacctgttctacggcgtgacagtggccggccagatcgtgctgcgctggaagaagccagacatcccccggcccatcaagatcaacctgctcttccccatcatctacctgctcttctgggccttcctgctggtgttcagcctgtggagcgagcctgtggtgtgtggcatcggcctggccatcatgctgactggagtgcctgtgtacttcctgggcgtgtactggcagcacaagcccaagtgcttcagtgacttcatcgagctgctgaccctggtgtcccagaagatgtgtgtggtggtgtacccagaggtggagggcctgcgggaccggggcggctag

SEQ ID NO: 256731 - DNA, 633 bp, Artificial Sequence
  derived and/or modified sequence
atgggcatcgtgcagatctgcaagggggagtacttctggctggagcccaagaatgcctttgagaacttccaggagccagacatcggcctggtggccctggccttcctgcagggcagctttgcctacggcggctggaacttcctgaactacgtgacagaggagctggtggacccctacaagaacctgccccgggccatcttcatcagcatccccctggtgacctttgtgtatgtgtttgccaacgtggcctacgtgacagccatgagcccccaggagctgctggccagcaatgctgtggccgtgacctttggagagaagctgctgggcgtgatggcctggatcatgcccatctctgtggccctgagcaccttcggcggcgtgaatggcagcctgcacctgctgtctgctgtgctgcgctggagcccccggggcccccccagccagtgtgtgggccatgacccccgggaggccctgcaccccaaccccagccctgccctgcacatgcacctgcacccagcagatgctggccaccagagacatgtgcacacccaccagctgtgtggcctgcaccagctgcccctgctgtggggccacggctgctggacagacagccccagcctggaggaggcctag

SEQ ID NO: 256732 - DNA, 999 bp, Artificial Sequence
  derived and/or modified sequence
atgggcatcgtgcagatctgcaagggggagtacttctggctggagcccaagaatgcctttgagaacttccaggagccagacatcggcctggtggccctggccttcctgcagggcagctttgcctacggcggctggaacttcctgaactacgtgacagaggagctggtggacccctacaagaacctgccccgggccatcttcatcagcatccccctggtgacctttgtgtatgtgtttgccaacgtggcctacgtgacagccatgagcccccaggagctgctggccagcaatgctgtggccgtgacctttggagagaagctgctgggcgtgatggcctggatcatgcccatctctgtggccctgagcaccttcggcggcgtgaatggcagcctcttcaccagcagccgcctcttctttgctggggcccgggagggccacctgcccagcgtgctggccatgattcatgtgaagcgctgcacccccatcccagccctgctcttcacctgcatcagcaccctgctgatgctggtgaccagtgacatgtacaccctcatcaactacgtgggcttcatcaactacctgttctacggcgtgacagtggccggccagatcgtgctgcgctggaagaagccagacatcccccggcccatcaagatcaacctgctcttccccatcatctacctgctcttctgggccttcctgctggtgttcagcctgtggagcgagcctgtggtgtgtggcatcggcctggccatcatgctgactggagtgcctgtgtacttcctgggcgtgtactggcagcacaagcccaagtgcttcagtgacttcatcgagctgctgaccctggtgtcccagaagatgtgtgtggtggtgtacccagaggtggagcggggcagcggcacagaggaggccaatgaagacatggaggagcagcagcagcccatgtaccagcccacccccaccaaggacaaggatgtggccggccagccccagccctag

SEQ ID NO: 256733 - DNA, 912 bp, Artificial Sequence
  derived and/or modified sequence
atgggcatcgtgcagatctgcaagggcgagtacttctggctggagcccaaaaatgcgttcgaaaactttcaggagcctgacattggattggtggcactggccttccttcaggggtccttcgcatacggagggtggaactttctcaattacgtcactgaggagctggtagacccttacaagaacctgccacgggctattttcatttcaattccgctggtgacttttgtatacgtgtttgccaatgtggcctatgtcactgctatgtcacctcaggagttgctcgcaagcaatgccgttgcagttacctttggagagaagctgctgggcgtgatggcatggattatgcccatttcagttgcacttagtacctttggaggcgtgaatggctcactgtttacaagctcacgcttgttcttcgctggcgcaagagagggccatttaccctcagtcctggccatgatccacgtcaagaggtgcacacctatacctgccctgttgttcacctgcatatcgactctgcttatgttggtgacatctgacatgtacacactgatcaactatgtgggcttcatcaactatctgttctacggcgtcacggtggccggccagattgtgctgcgttggaagaaaccggatataccccggcctattaaaatcaacctcttgttccctattatttatctcctcttctgggcttttttgctcgtgttcagcctatggtcggagcccgtcgtgtgcggcatcgggttggcgatcatgttgaccggtgtgcccgtttacttcttgggagtgtattggcaacacaaacccaaatgtttttcagattttatagaactattgaccctggtgagtcagaagatgtgcgtggttgtgtatccagaggtggagggtcttcgagacagagggggatag

SEQ ID NO: 256734 - DNA, 633 bp, Artificial Sequence
  derived and/or modified sequence
atgggcatcgtgcagatctgcaagggcgagtacttctggctggagccaaagaatgcgttcgagaactttcaggagccggacatcggacttgtggcactggccttcctgcagggctcattcgcttatggaggctggaactttttgaattatgttaccgaggagctcgttgacccatacaagaacctccctcgtgccatcttcatttctatacccttagttaccttcgtgtacgttttcgcaaatgtggcgtatgttacagcaatgtcgccccaggagcttctggcttctaatgctgttgcagtgacatttggcgaaaaactattgggggtgatggcctggataatgcctattagcgttgcactgtccacatttggtggggtgaacggaagcttgcacctgttgagcgcagtgttaagatggtcaccgcgggggccccctagtcagtgcgtgggacatgacccgcgcgaggctctccatcctaaccctagtcccgctcttcatatgcatctccacccagctgacgctggtcaccaacggcatgtgcacactcaccaactctgtgggctgcaccagctgcccttgttatgggggcatggctgttggacagattcgccctccctggaagaggcatag

SEQ ID NO: 256735 - DNA, 999 bp, Artificial Sequence
  derived and/or modified sequence
atgggcatcgtgcagatctgcaagggcgagtacttctggctggagccaaagaatgctttcgaaaattttcaggagccggatataggcctggtggcccttgcatttctgcagggatccttcgcctatgggggctggaatttcctgaactacgtgaccgaggaactggtggatccttataagaacctccctagggctatcttcattagcattcctctggtcacattcgtctatgtgtttgctaacgtcgcgtacgtcactgctatgagtccacaggagctcctcgcttctaacgccgttgctgtgacatttggagagaagctgctcggcgtgatggcctggattatgccaatttctgtggccctgtcaacttttggcggtgtgaacggatccctgtttacgagcagtaggctgttctttgctggcgcccgggaggggcacctgccatcagtgctggccatgatccacgtcaagaggtgtactccaatccctgctctgctatttacttgcatctcaacgctactcatgctggtaacttccgacatgtatactctcatcaactatgttgggttcattaactaccttttctacggagtcaccgtggccggacagattgttctgaggtggaagaagcccgatattccccgccctataaagatcaacttactgttcccaatcatataccttcttttctgggctttcctccttgttttcagcctctggagtgagccagtggtctgcggaattggtctggccatcatgctgaccggcgtgcctgtttacttcctgggagtgtactggcagcacaaacctaagtgcttttcggattttatcgagcttcttaccctggtgagtcaaaaaatgtgtgtagtggtctaccccgaggttgagagaggttctggaacagaagaagccaacgaagacatggaggaacaacagcaaccgatgtatcagcctacacccaccaaagacaaggacgtggccggtcagcctcaaccttag

SEQ ID NO: 256736 - DNA, 912 bp, Artificial Sequence
  derived and/or modified sequence
atgggtatagtgcagatctgtaagggggagtatttctggttagagcccaaaaacgcgttcgaaaatttccaggagcctgatattgggctggtggcactggccttccttcagggaagttttgcctatgggggttggaactttttgaactatgtgacagaggagctggtggatccctacaaaaacttaccgagggctatttttatttccatacctcttgtcacattcgtctacgtatttgcgaacgttgcctacgtaactgcaatgtctccacaggagcttctggctagcaacgccgttgcagtcacatttggggaaaaactgctcggagtgatggcctggattatgcctatatctgtggctctgtcaaccttcggtggggttaacggaagtttattcaccagcagcagactgtttttcgctggggctcgtgagggccacctgccttccgtgctcgctatgattcatgtcaaaagatgcacacccatacccgctctgttgtttacttgcatttctactctcttgatgctcgtgacatccgatatgtatacccttattaactacgtggggtttatcaactatttgttctatggcgtgactgtggccggacagatcgtactgagatggaaaaaacccgacatccccagacccattaaaataaatctcctcttcccaataatatacctcttgttctgggcattcttactcgtgtttagtctttggtctgagcctgtggtctgcgggatcgggctggcaattatgctgacaggcgtgcctgtgtatttccttggcgtctactggcagcacaaaccaaagtgctttagcgactttattgagttactgaccttggttagccagaagatgtgcgtcgtggtgtacccggaagtggagggcctccgtgaccgcggtggttag

SEQ ID NO: 256737 - DNA, 633 bp, Artificial Sequence
  derived and/or modified sequence
atgggaattgtgcagatttgtaagggggaatatttttggctggagccgaagaacgccttcgagaattttcaggagcctgatatcgggctcgttgctctagcattcctgcagggttccttcgcgtatggcggatggaacttcctgaactacgtgaccgaggagctggtcgatccatataagaacctcccccgagctatatttatctccatcccacttgttacttttgtatatgtgttcgcaaatgtggcctatgttactgctatgtctccccaggagctcctggcttcaaatgcagtggccgtgaccttcggcgaaaagctgttgggggtcatggcatggattatgcctatatctgtggcactgtctactttcggcggagtgaacggaagccttcacctgctgtcagctgtgctcaggtggagtcccagaggcccaccctcccaatgtgtcggtcatgatccacgcgaggcattgcatccaaatccttcacctgctctccatatgcacttgcaccccgctgatgccggacaccagagacacgtgcacacgcaccagctgtgcgggctgcatcagttacccttgctttggggccacggctgttggacagactcccctagccttgaagaagcgtag

SEQ ID NO: 256738 - DNA, 999 bp, Artificial Sequence
  derived and/or modified sequence
atggggattgtgcagatttgcaagggcgagtacttttggcttgaacctaaaaatgcgtttgagaactttcaagaacctgatatagggctcgttgctctggcattcttacaaggctcattcgcctatggaggttggaactttctcaactatgtgaccgaagagcttgtcgacccctacaagaacctccctagggccatctttatctccatacctttggttacttttgtgtacgtcttcgcaaatgtggcctacgttacagccatgagtccgcaggagttattggctagcaacgcggtggcagttacctttggggagaagttgctcggcgtcatggcttggattatgccaatttcggtggcgctgtctacattcggtggcgtgaatggatcactgttcacctccagtcggctgttttttgcaggagcccgagaaggccacttgcctagtgttctggccatgatacacgttaaacgatgtacgccgattcccgcattgttatttacctgcatatcgaccctgctcatgttggtgactagtgacatgtacacgttaattaactatgtcggctttataaattacctgttctatggcgtcactgttgccggtcagatcgttttacggtggaaaaagccggacatacctcgacccatcaagatcaaccttctcttccccataatatatctgctcttttgggcatttctcctggtgttcagcctgtggtctgaaccagtggtatgcggcatcgggttggccatcatgctgacaggcgtgcccgtatattttctgggcgtctattggcaacacaagcctaagtgtttttccgactttatcgaattactcactttagtcagccagaaaatgtgtgtggttgtgtaccctgaagttgaaaggggatctgggacagaagaagccaacgaggatatggaagagcaacagcagcccatgtatcagccaactccaaccaaagacaaagacgtggcgggacagccacaaccatag

SEQ ID NO: 256739 - DNA, 912 bp, Artificial Sequence
  derived and/or modified sequence
atgggcatcgtgcagatctgcaagggcgagtacttctggctggagcccaagaacgccttcgagaacttccaggagcccgacatcggcctggtggccctggccttcctgcagggcagcttcgcctacggcggctggaacttcctgaactacgtgaccgaggagctggtggacccctacaagaacctgcccagagccatcttcatcagcatccccctggtgaccttcgtgtacgtgttcgccaacgtggcctacgtgaccgccatgagcccccaggagctgctggccagcaacgccgtggccgtgaccttcggcgagaagctgctgggcgtgatggcctggatcatgcccatcagcgtggccctgagcaccttcggcggcgtgaacggcagcctgttcaccagcagcagactgttcttcgccggcgccagagagggccacctgcccagcgtgctggccatgatccacgtgaagagatgcacccccatccccgccctgctgttcacctgcatcagcaccctgctgatgctggtgaccagcgacatgtacaccctgatcaactacgtgggcttcatcaactacctgttctacggcgtgaccgtggccggccagatcgtgctgagatggaagaagcccgacatccccagacccatcaagatcaacctgctgttccccatcatctacctgctgttctgggccttcctgctggtgttcagcctgtggagcgagcccgtggtgtgcggcatcggcctggccatcatgctgaccggcgtgcccgtgtacttcctgggcgtgtactggcagcacaagcccaagtgcttcagcgacttcatcgagctgctgaccctggtgagccagaagatgtgcgtggtggtgtaccccgaggtggagggcctgagagacagaggcggctag

SEQ ID NO: 256740 - protein, 1173 aa, Artificial Sequence
  derived and/or modified sequence
MAGAQPGVHALQLKPVCVSDSLKKGTKFVKWDDDSTIVTPIILRTDPQGFFFYWTDQNKETELLDLSLVKDARCGRHAKAPKDPKLRELLDVGNIGRLEQRMITVVYGPDLVNISHLNLVAFQEEVAKEWTNEVFSLATNLLAQNMSRDAFLEKAYTKLKLQVTPEGRIPLKNIYRLFSADRKRVETALEACSLPSSRNDSIPQEDFTPEVYRVFLNNLCPRPEIDNIFSEFGAKSKPYLTVDQMMDFINLKQRDPRLNEILYPPLKQEQVQVLIEKYEPNNSLARKGQISVDGFMRYLSGEENGVVSPEKLDLNEDMSQPLSHYFINSSHNTYLTAGQLAGNSSVEMYRQVLLSGCRCVELDCWKGRTAEEEPVITHGFTMTTEISFKEVIEAIAECAFKTSPFPILLSFENHVDSPKQQAKMAEYCRLIFGDALLMEPLEKYPLESGVPLPSPMDLMYKILVKNKKKSHKSSEGSGKKKLSEQASNTYSDSSSMFEPSSPGAGEADTESDDDDDDDDCKKSSMDEGTAGSEAMATEEMSNLVNYIQPVKFESFEISKKRNKSFEMSSFVETKGLEQLTKSPVEFVEYNKMQLSRIYPKGTRVDSSNYMPQLFWNAGCQMVALNFQTMDLAMQINMGMYEYNGKSGYRLKPEFMRRPDKHFDPFTEGIVDGIVANTLSVKIISGQFLSDKKVGTYVEVDMFGLPVDTRRKAFKTKTSQGNAVNPVWEEEPIVFKKVVLPTLACLRIAVYEEGGKFIGHRILPVQAIRPGYHYICLRNERNQPLTLPAVFVYIEVKDYVPDTYADVIEALSNPIRYVNLMEQRAKQLAALTLEDEEEVKKEADPGETPSEAPSEARTTPAENGVNHTTTLTPKPPSQALHSQPAPGSVKAPAKTEDLIQSVLTEVEAQTIEELKQQKSFVKLQKKHYKEMKDLVKRHHKKTTDLIKEHTTKYNEIQNDYLRRRAALEKSAKKDSKKKSEPSSPDHGSSTIEQDLAALDAEMTQKLIDLKDKQQQQLLNLRQEQYYSEKYQKREHIKLLIQKLTDVAEECQNNQLKKLKEICEKEKKELKKKMDKKRQEKITEAKSKDKSQMEEEKTEMIRSYIQEVVQYIKRLEEAQSKRQEKLVEKHKEIRQQILDEKPKGEGSSSFLSETCHEDPSVSPNFTPPNPQALKW

SEQ ID NO: 256741 - protein, 1093 aa, Artificial Sequence [sequence omitted]

SEQ ID NO: 256742 - DNA, 3522 bp, Artificial Sequence
  derived and/or modified sequence
atggctggcgcacagcccggggtccacgcgttacagctcaagccagtgtgcgtgtccgacagtctaaagaagggcaccaaatttgtgaaatgggacgatgatagcacaatcgtgacccccatcatccttcgtaccgatccacaagggtttttcttttactggactgatcagaataaggagacagaactgctggatctctctctggtgaaggacgcccgctgcggaagacatgctaaggctcctaaggacccaaaattacgggaactactcgacgtgggaaatatcggccgtctggaacagaggatgattacagtggtctacggccccgatctagtaaatataagtcacctgaaccttgttgcctttcaagaggaagtggccaaggaatggacgaatgaggtgttcagcctggcgactaatctgctggcgcagaatatgtcgcgggatgcttttctggaaaaggcttacactaaactgaagctacaggttactcctgagggtaggattcctctgaaaaatatctatcgcctgttttcagctgaccgcaagcgagtggaaaccgcactggaggcttgctcactcccgtccagtcgaaacgatagcattccccaggaagatttcactccagaggtttaccgagtgttccttaataacctgtgcccccggccagaaattgataacatttttagcgaattcggcgctaagtccaagccatacttaactgtggaccaaatgatggacttcataaatcttaaacagcgcgaccccagattgaatgagatcctttatccacctcttaagcaggagcaggtgcaagtgctgattgagaaatacgagcccaataattctctggctcgtaaaggccaaatcagtgtcgatggatttatgaggtacctgagcggagaggagaatggagtggtttcaccggaaaagctggacctaaacgaggacatgagccagcctctttcacactactttattaactcttcgcacaacacctacctgaccgctggccaattggccggaaactcttctgtggaaatgtaccgacaggtactcctgtctgggtgcagatgcgtggaacttgattgttggaaagggcgaaccgccgaggaggagccggtgattactcatggctttactatgacaacagagattagtttcaaagaagtgattgaagccatcgccgaatgcgcctttaagacaagccctttcccaattctcttatcctttgagaaccacgttgattcaccaaaacagcaggcgaagatggctgagtattgtcggttaattttcggggacgccctgctaatggaacctctggaaaagtaccccctggagagtggggtccccctgcccagcccaatggacctcatgtacaagatactggttaaaaacaagaagaaatcccacaagagcagcgagggctcaggtaagaagaagctaagcgagcaagcctctaatacttatagcgactcgtcttctatgtttgaacccagctctcctggtgctggggaggctgacactgagtccgacgacgacgacgatgatgacgactgtaaaaaatcatcaatggacgagggcacagctggctctgaggccatggccactgaagagatgtccaacctggtgaactatattcagccagtgaaattcgagtcttttgaaatttcaaagaagcgcaataagagcttcgagatgtcatcatttgtggagaccaaaggattggagcaactgacaaagagcccagtggagttcgtcgagtacaacaagatgcagctgagtcgcatttacccgaagggtactcgagttgatagctccaattacatgcctcagttgttttggaatgcgggatgtcagatggtggccctgaactttcagactatggatctggcgatgcaaatcaacatgggtatgtacgagtacaacggcaaaagtggttataggctcaagcctgagttcatgaggcggcccgataaacattttgaccctttcacggaaggcatcgtggacggaatcgttgccaacaccctgtccgtgaaaattatatctggccagtttttgtctgacaagaaagtgggcacttatgttgaagtagacatgttcgggttgccagtggacaccagacggaaggcttttaaaacgaaaacctcccaggggaatgctgtgaaccccgtgtgggaggaggaacctattgttttcaagaaagtggttcttcccactctggcttgccttagaatcgccgtttacgaagagggtggcaagttcatcggtcaccgaatactgccggtgcaagccatcagacctggataccactacatttgcttgaggaatgagcggaaccagccacttaccctgccggcagtctttgtttacatcgaagtgaaagactatgttcccgacacatacgctgacgttattgaggcgttgtccaatccaatccggtatgtcaacctaatggaacagagggcaaaacaactcgcagccctgacccttgaagatgaggaagaggtcaaaaaggaagctgatcctggagaaacaccttctgaggccccgtctgaggcacggactacacccgccgagaatggcgttaaccatacgaccaccctgacaccaaagcccccgtcccaggcgcttcacagtcaaccggccccaggtagcgttaaggccccagcaaagacagaagaccttatccagtccgtcttgactgaggtcgaggcccagaccattgaagaactcaaacagcaaaagagtttcgtcaaacttcagaagaagcattataaggagatgaaggatttggtaaagcgccaccacaagaagacaaccgaccttatcaaggaacacacaacaaagtataacgagatacagaatgattacctcagaagacgggcagcactggaaaagagcgctaaaaaagatagcaagaagaagagcgaaccttcctctcccgatcatggctcctccactatagagcaggacttggccgcgctggacgccgaaatgactcagaagctgattgacctgaaagataagcagcagcagcagctactgaacctgcgccaagagcagtactactcagagaaatatcaaaagcgagaacacatcaagctcttgatccaaaaacttactgacgtcgccgaagaatgtcagaacaaccaactgaagaaactcaaagaaatctgcgaaaaggaaaaaaaggagctaaagaagaagatggataagaaaaggcaagagaagattaccgaagccaaaagtaaggacaagagccagatggaagaggagaagacagaaatgatccggtcatacattcaagaggtggttcagtacattaagcgactcgaagaagcccagtccaaacggcaagaaaaattagtcgagaaacacaaagagatacggcagcaaattctggacgagaaaccaaaaggtgagggatcttccagctttctgagtgagacctgccacgaagacccttcagtgagccccaacttcacaccaccgaatccacaggcattgaaatggtag

SEQ ID NO: 256743 - DNA, 3522 bp, Artificial Sequence
  derived and/or modified sequence
atggccggggcgcagccaggagtccatgccctccagctgaagcctgtgtgcgtatccgatagcttgaaaaaagggacgaagtttgttaagtgggacgatgactctaccatagtaacacctataattctccggacagacccccagggtttcttcttttattggactgaccagaacaaagagactgaacttctcgacctgtcactcgtgaaagacgcgcgttgtgggaggcacgctaaagcccctaaggacccaaagctgcgggagctgctggacgtgggcaacattgggagactggagcaaagaatgattactgtggtgtacggcccagacctagtcaacattagccacctcaatctcgtcgcgttccaggaagaggtcgccaaggagtggaccaacgaagtattctctctggccacgaatcttctggcccagaatatgagtagggatgccttcctggagaaggcctataccaaactcaagttacaggtgacaccggaggggcgcatccctctgaaaaacatatatcgccttttttcggccgaccgcaagagagtcgaaaccgcccttgaagcttgcagcctgcccagcagccgcaatgatagcattccccaggaagatttcactcccgaggtgtatagggtttttctgaacaatctttgcccccgcccagaaatagacaatatcttttccgaatttggagccaagagcaagccgtacctaaccgttgaccagatgatggactttattaatctcaagcagcgggatccccgcctgaacgagatcctctatccccccctgaaacaggagcaagttcaggtgttgatcgagaaatacgagccgaataactcccttgccagaaaaggccaaatatccgttgatgggttcatgaggtatctttcaggggaggaaaatggagtcgtctcccctgagaaacttgatctgaacgaggacatgagccaaccgctgtcccactattttattaacagctcacataacacatacctgactgccgggcagctggcaggcaacagctcagttgaaatgtaccggcaggtgctcctgtcggggtgtagatgcgtggagctcgattgttggaaagggcgtaccgccgaagaggagcctgttattacgcatggcttcacaatgacaactgaaatttcatttaaggaagtgattgaggccatcgcggagtgcgcctttaagaccagcccattcccaatacttctgtcattcgagaaccacgtggactcacccaagcagcaggccaaaatggcagagtattgtagactgattttcggcgacgcccttttaatggagccactggagaaatatcctctggagtctggcgtgccacttccctcccccatggatttaatgtataagatcctggttaagaacaagaagaagtcacataagtcatccgaaggcagtgggaagaagaaactatcagagcaggcttcaaacacttatagtgattcttctagtatgtttgaaccctctagccctggagccggagaggccgacacagagagcgatgatgacgacgacgacgatgactgtaaaaagagctctatggacgagggcaccgcaggatcagaagctatggctacagaagagatgagcaatctggtgaattacatccagcccgtaaagtttgagagcttcgagatcagtaaaaagagaaataaaagtttcgaaatgagtagctttgttgagacgaagggcctggagcagctgacgaaatcccctgtcgagttcgtcgagtacaataagatgcagctgtctcggatctatcctaaggggacccgagtcgactctagtaattatatgccacagctcttctggaacgcaggttgtcaaatggttgccctcaacttccagactatggatctggccatgcaaataaacatggggatgtatgaatacaacggcaagtccggatataggttgaagcctgagttcatgaggcgacctgataagcactttgatccttttacagagggaatagtggacggcatcgtcgccaacacgctttccgtgaagattatatctgggcagttcctatccgataaaaaagtgggcacttatgttgaggttgacatgtttgggttgccggtggacacgcggcgcaaagcctttaaaacaaaaacctcccaaggcaacgccgtgaatccagtatgggaggaagaaccgatcgtgtttaaaaaagtcgttttgccgactctggcttgtctgcgcatcgctgtgtatgaggagggcggtaaattcattgggcacagaatcctgcctgtgcaagccatccgccctggctaccattatatctgtctgcggaatgagcgcaaccagccgctgaccttgcccgccgttttcgtgtatattgaggtgaaagattatgttccggacacctatgctgatgtcattgaggccctgagcaaccccatccgctatgtgaatttgatggagcaacgagccaaacagcttgcagccctgacactggaggatgaagaggaagttaaaaaagaggcggaccctggcgaaacgcctagcgaggcacctagcgaggcccgcaccacccctgctgaaaacggggtgaatcataccacaacattgaccccaaagcctccctcacaagcgctgcatagccagcccgccccaggttccgtaaaagcaccagcaaagactgaggatctaatccagagcgtgctgactgaagtggaagcccagaccatagaggaattaaagcagcagaaatccttcgtgaaacttcaaaaaaaacactataaggaaatgaaggaccttgtgaaacgacaccataagaagacaacggacctgatcaaagagcacaccactaaatataacgagattcagaatgactatctcaggaggagggcagcacttgaaaagtccgcaaaaaaggactctaaaaagaagtctgagccttcctctcctgaccatggtagttctacgattgagcaggatctggcagctcttgacgctgaaatgacgcagaaactgatcgaccttaaggataagcaacagcagcaattgctgaatctccggcaggagcagtactacagtgagaaataccagaaacgggagcatatcaagctgctgattcagaagctcacagacgttgccgaagagtgccagaataaccagcttaagaagctgaaggaaatatgcgaaaaggagaaaaaagaactgaaaaaaaaaatggacaaaaaaaggcaggagaaaatcaccgaagctaagtctaaggataagagtcaaatggaagaagagaaaacagagatgatccggtcctacatacaggaggtggtgcagtacataaaacggctggaggaggctcaatccaagaggcaggagaagttggtggagaaacataaagagatcaggcaacagattctcgatgaaaagcctaagggagaaggatcctcgagctttctctcagagacctgccatgaagatccatcagtctctcctaacttcacccccccaaacccccaggcacttaagtggtag

SEQ ID NO: 256744 - DNA, 3282 bp, Artificial Sequence
  derived and/or modified sequence
actcaagacccaaagctgcgggaactgttggatgtaggcaacattgggagactcgaacagcgtatgatcacagtggtatatggcccagacctagtgaacatttctcaccttaacctggtagcattccaggaggaagtcgccaaggagtggaccaacgaagtcttttcgctggctacgaacttactggcccagaatatgagtcgcgacgccttcttagaaaaagcttacaccaagctgaagctgcaggtaactccagaaggccgtatccctctgaaaaacatctacagattattctctgcagacaggaagagggtggagaccgccctggaagcatgctcactgccaagcagcagaaatgattctattccacaggaagatttcacgcctgaagtctacagagtctttctcaacaacctgtgccctaggcctgaaattgataacattttcagtgaattcggcgcaaagtctaagccttatctgactgtggatcagatgatggattttataaatctgaagcaaagggaccctcgactgaacgagatcctgtatccacccttaaaacaggagcaggtgcaggtgctgatcgagaagtatgagcccaataacagcctcgctaggaaggggcagatctccgtcgacgggtttatgcgctacctcagcggagaagagaacggcgtggtgtctccagaaaaattggatctgaacgaggatatgtctcaacctttatctcactactttataaattcgtctcacaatacttatttgactgccggacaactcgctggaaactctagtgtggaaatgtaccggcaggtgttgctcagcggatgtcggtgtgtggagcttgattgctggaaaggtcgaacagcggaggaggagcccgttattacccacggcttcaccatgacgacagagataagttttaaggaggtgatagaggcaatcgcagagtgcgcatttaaaacctcacccttcccaattctactctcattcgagaatcacgttgacagtccgaagcagcaggctaaaatggctgagtactgccgtctcatctttggggacgccctactcatggagccattggagaaatatcctctggaatccggcgtgcctctaccttctcctatggatctgatgtataagattttggtgaagaataaaaagaagagccataagtcaagcgagggctctggaaagaagaagctgtccgagcaggctagcaacacctattctgactcgtcctcgatgtttgagccttctagtcccggtgccggcgaagcagacaccgaatcagatgacgacgatgacgacgacgattgcaagaaatccagtatggacgagggtaccgcgggcagtgaagctatggcgaccgaggagatgagcaatctcgtgaactatattcagccggtcaagttcgagagcttcgagatctccaagaagagaaataagtcttttgagatgagctcctttgttgaaaccaaggggctcgaacaattgaccaaaagccctgtggagtttgtggaatataacaagatgcaactgagccggatctatccaaaggggacacgcgttgacagctctaactatatgccgcagctgttctggaatgcaggatgccagatggtggctctgaacttccagaccatggacctggcaatgcaaattaatatggggatgtatgagtacaatgggaaatctggatacaggctgaaacccgagttcatgaggcgacctgataaacactttgacccttttactgaggggatcgtcgatgggattgtagcaaacacgctgtccgtgaagattatttccggccagttcttatccgataagaaggtgggcacctacgtggaggtggatatgtttggtctgcccgtggatacaagacgcaaggcatttaaaactaaaacctcgcaaggtaacgcagtcaacccagtgtgggaggaggagccaattgtcttcaagaaggttgttctgcccactcttgcctgcctcaggatcgccgtttacgaagagggaggtaagtttatcggccatcgtatcctaccagtgcaggccatccgcccaggataccattatatctgcctcaggaacgaacgaaaccagccactcaccctgcctgctgttttcgtttatatagaggtgaaagattatgtgcctgatacttatgcggatgtgattgaggcgttgagcaaccctatcaggtacgttaacctgatggagcagcgcgcgaaacaattggccgccctgactctcgaggatgaggaggaagtgaaaaaggaggccgatcccggagagacaccttctgaagccccttctgaggctagaacgacccccgctgagaatggtgttaaccacaccaccacactgactccgaaacccccttctcaagccctacacagccagccggcacctggatccgtaaaagctccagcaaagaccgaggacctgatccagagtgtgctgaccgaggtagaggctcaaactattgaagagctgaaacaacagaaaagcttcgtaaagcttcaaaagaagcattacaaagagatgaaagatctggtgaaacggcatcataagaagaccaccgatctcatcaaggagcacacaacaaagtacaacgaaatccagaacgactacctgagaaggagagccgcgctggagaaatccgcaaaaaaggactccaaaaaaaaaagcgaacctagcagtccagaccacggttcaagcaccatcgagcaggacctggccgcgctggacgccgagatgacccagaagctgattgacctaaaggacaagcaacaacaacagttgctcaacctccgtcaggaacagtattacagcgaaaagtaccaaaagcgggaacatattaaattgctgatccaaaagctaacggatgtggcagaggaatgtcagaacaatcagctgaagaagctgaaagagatttgtgagaaagaaaagaaagagttaaaaaagaagatggataagaaaaggcaggagaagattacagaagctaaaagcaaggacaagtctcagatggaggaagagaagaccgaaatgataagatcttatatccaggaagtcgtgcagtatattaaacgccttgaggaagctcagtcaaagcgacaggaaaagctcgtagagaaacataaggagatcagacagcagatattagacgaaaaaccgaaaggtgagggctcaagctcattcctcagtgagacctgccatgaggatccaagcgtctctccaaattttacacccccaaacccacaggcgttgaagtggtag

SEQ ID NO: 256745 - DNA, 3522 bp, Artificial Sequence
  derived and/or modified sequence
atggccggggcccagcccggggtgcacgccctgcagctgaagcctgtgtgtgtgtctgacagcctgaagaagggcaccaagtttgtgaagtgggatgatgacagcaccatcgtgacccccatcatcctgaggacagacccccagggcttcttcttctactggacagaccagaacaaggagacagagctgctggacctgagcctggtgaaggatgcccgctgtggcagacatgccaaggcccccaaggaccccaagctgcgggagctgctggatgtgggcaacatcggccgcctggagcagaggatgatcaccgtggtgtatggccctgacctggtgaacatcagccacctgaacctggtggccttccaggaggaggtggccaaggagtggaccaatgaggtgttcagcctggccaccaacctgctggcccagaacatgagcagagatgccttcctggagaaggcctacaccaagctgaagctgcaggtgaccccagagggccgcatccccctgaagaacatctaccgcctcttctctgctgacaggaagagggtggagacagccctggaggcctgcagcctgcccagcagcagaaatgacagcatcccccaggaggacttcaccccagaggtgtacagagtcttcctgaacaacctgtgccccaggcctgagattgacaacatcttcagcgagtttggagccaagagcaagccctacctgactgtggaccagatgatggacttcatcaacctgaagcagagggacccccggctgaatgagatcctgtacccacccctgaagcaggagcaggtgcaggtgctgattgagaagtatgagcccaacaacagcctggccaggaagggccagatctctgtggatggcttcatgagatacctgagcggggaggagaatggagtggtgtccccagagaagctggacctgaatgaagacatgagccagcccctgagccactacttcatcaacagcagccacaacacctacctgacagctggccagctggccggcaacagctctgtggagatgtaccggcaggtgctgctgagcggctgccgctgtgtggagctggactgctggaagggccgcacagctgaggaggagcccgtcatcacccacggcttcaccatgaccacagagatctccttcaaggaggtgattgaggccatcgcagaatgtgccttcaagaccagccccttccccatcctgctgagctttgagaaccacgtggacagccccaagcagcaggccaagatggccgagtactgccgcctcatctttggagatgccctgctgatggagcccctggagaagtaccccctggagagcggcgtgcccctgcccagccccatggacctgatgtacaagatcctggtgaagaacaagaagaagagccacaagagcagcgagggcagcggcaagaagaagctgtctgagcaggccagcaacacctacagcgacagcagctccatgtttgagcccagcagccctggggccggggaggccgacacagaaagtgatgatgatgatgatgatgatgactgcaagaagagctccatggatgagggcacagctggcagcgaggccatggccacagaggagatgagcaacctggtgaactacatccagcctgtgaagtttgagagctttgagatcagcaagaagaggaacaagagctttgagatgagcagctttgtggagaccaagggcctggagcagctgaccaagagccctgtggagtttgtggagtacaacaagatgcagctgagccgcatctaccccaagggcaccagggtggacagcagcaactacatgccccagctgttctggaatgccggctgccagatggtggccctgaacttccagaccatggacctggccatgcagatcaacatgggcatgtatgagtacaacgggaagagcggctaccgcctgaagccagagttcatgaggaggccagacaagcactttgaccccttcacagagggcatcgtggatggcatcgtggccaacaccctgtctgtgaagatcatcagcggccagttcctgagtgacaagaaggtgggcacctacgtggaggtggacatgtttggcctgcctgtggacaccaggaggaaggccttcaagaccaagaccagccagggcaatgctgtgaaccctgtgtgggaggaggagcccatcgtgttcaagaaggtggtgctgcccaccctggcctgcctgagaattgctgtgtatgaggagggcggcaagttcatcggccaccgcatcctgcctgtgcaggccatccggcccggctaccactacatctgcctgagaaatgaaagaaaccagcccctgaccctgcctgctgtgtttgtgtacatcgaggtgaaggactatgtgcctgacacctatgcagatgtgattgaggccctgagcaaccccatccgctacgtgaacctgatggagcagagggccaagcagctggccgccctgaccctggaggatgaggaggaggtgaagaaggaggccgaccccggggagaccccatctgaggcccccagcgaggcccggaccaccccagcagaaaatggagtgaaccacaccaccaccctgacccccaagccacccagccaggccctgcacagccagcctgcccctggctctgtgaaggccccagccaagacagaagatctcatccagagcgtgctgacagaggtggaggcccagaccatcgaggagctgaagcagcagaagagctttgtgaagctgcagaagaagcactacaaggagatgaaggacctggtgaagaggcaccacaagaagaccacagacctgatcaaggagcacaccaccaagtacaatgagatccagaatgactacctgcggcggcgggccgccctggagaagagcgccaagaaggacagcaagaagaagtctgagcccagcagcccagaccacggcagcagcaccatcgagcaggacctggccgccctggatgctgagatgacccagaagctgattgacctgaaggacaagcagcagcagcagctgctgaacctgcggcaggagcagtactacagcgagaagtaccagaagcgggagcacatcaagctgctgatccagaagctgacagatgtggccgaggagtgccagaacaaccagctgaagaagctgaaggagatctgtgagaaggagaagaaggagctgaagaagaagatggacaagaagaggcaggagaagatcacagaggccaagagcaaggacaagagccagatggaggaggagaagacagagatgatccgcagctacatccaggaggtggtgcagtacatcaagaggctggaggaggcccagagcaagaggcaggagaagctggtggagaagcacaaggagatccggcagcagatcctggatgagaagcccaagggggagggcagcagcagcttcctgtctgagacctgccacgaggaccccagcgtgagccccaacttcaccccacccaacccccaggccctgaagtggtag

SEQ ID NO: 256746 - DNA, 3282 bp, Artificial Sequence
  derived and/or modified sequence
acccaggaccccaagctgcgggagctgctggatgtgggcaacatcggccgcctggagcagaggatgatcaccgtggtgtatggccctgacctggtgaacatcagccacctgaacctggtggccttccaggaggaggtggccaaggagtggaccaatgaggtgttcagcctggccaccaacctgctggcccagaacatgagcagagatgccttcctggagaaggcctacaccaagctgaagctgcaggtgaccccagagggccgcatccccctgaagaacatctaccgcctcttctctgctgacaggaagagggtggagacagccctggaggcctgcagcctgcccagcagcagaaatgacagcatcccccaggaggacttcaccccagaggtgtacagagtcttcctgaacaacctgtgccccaggcctgagattgacaacatcttcagcgagtttggagccaagagcaagccctacctgactgtggaccagatgatggacttcatcaacctgaagcagagggacccccggctgaatgagatcctgtacccacccctgaagcaggagcaggtgcaggtgctgattgagaagtatgagcccaacaacagcctggccaggaagggccagatctctgtggatggcttcatgagatacctgagcggggaggagaatggagtggtgtccccagagaagctggacctgaatgaagacatgagccagcccctgagccactacttcatcaacagcagccacaacacctacctgacagctggccagctggccggcaacagctctgtggagatgtaccggcaggtgctgctgagcggctgccgctgtgtggagctggactgctggaagggccgcacagctgaggaggagcccgtcatcacccacggcttcaccatgaccacagagatctccttcaaggaggtgattgaggccatcgcagaatgtgccttcaagaccagccccttccccatcctgctgagctttgagaaccacgtggacagccccaagcagcaggccaagatggccgagtactgccgcctcatctttggagatgccctgctgatggagcccctggagaagtaccccctggagagcggcgtgcccctgcccagccccatggacctgatgtacaagatcctggtgaagaacaagaagaagagccacaagagcagcgagggcagcggcaagaagaagctgtctgagcaggccagcaacacctacagcgacagcagctccatgtttgagcccagcagccctggggccggggaggccgacacagaaagtgatgatgatgatgatgatgatgactgcaagaagagctccatggatgagggcacagctggcagcgaggccatggccacagaggagatgagcaacctggtgaactacatccagcctgtgaagtttgagagctttgagatcagcaagaagaggaacaagagctttgagatgagcagctttgtggagaccaagggcctggagcagctgaccaagagccctgtggagtttgtggagtacaacaagatgcagctgagccgcatctaccccaagggcaccagggtggacagcagcaactacatgccccagctgttctggaatgccggctgccagatggtggccctgaacttccagaccatggacctggccatgcagatcaacatgggcatgtatgagtacaacgggaagagcggctaccgcctgaagccagagttcatgaggaggccagacaagcactttgaccccttcacagagggcatcgtggatggcatcgtggccaacaccctgtctgtgaagatcatcagcggccagttcctgagtgacaagaaggtgggcacctacgtggaggtggacatgtttggcctgcctgtggacaccaggaggaaggccttcaagaccaagaccagccagggcaatgctgtgaaccctgtgtgggaggaggagcccatcgtgttcaagaaggtggtgctgcccaccctggcctgcctgagaattgctgtgtatgaggagggcggcaagttcatcggccaccgcatcctgcctgtgcaggccatccggcccggctaccactacatctgcctgagaaatgaaagaaaccagcccctgaccctgcctgctgtgtttgtgtacatcgaggtgaaggactatgtgcctgacacctatgcagatgtgattgaggccctgagcaaccccatccgctacgtgaacctgatggagcagagggccaagcagctggccgccctgaccctggaggatgaggaggaggtgaagaaggaggccgaccccggggagaccccatctgaggcccccagcgaggcccggaccaccccagcagaaaatggagtgaaccacaccaccaccctgacccccaagccacccagccaggccctgcacagccagcctgcccctggctctgtgaaggccccagccaagacagaagatctcatccagagcgtgctgacagaggtggaggcccagaccatcgaggagctgaagcagcagaagagctttgtgaagctgcagaagaagcactacaaggagatgaaggacctggtgaagaggcaccacaagaagaccacagacctgatcaaggagcacaccaccaagtacaatgagatccagaatgactacctgcggcggcgggccgccctggagaagagcgccaagaaggacagcaagaagaagtctgagcccagcagcccagaccacggcagcagcaccatcgagcaggacctggccgccctggatgctgagatgacccagaagctgattgacctgaaggacaagcagcagcagcagctgctgaacctgcggcaggagcagtactacagcgagaagtaccagaagcgggagcacatcaagctgctgatccagaagctgacagatgtggccgaggagtgccagaacaaccagctgaagaagctgaaggagatctgtgagaaggagaagaaggagctgaagaagaagatggacaagaagaggcaggagaagatcacagaggccaagagcaaggacaagagccagatggaggaggagaagacagagatgatccgcagctacatccaggaggtggtgcagtacatcaagaggctggaggaggcccagagcaagaggcaggagaagctggtggagaagcacaaggagatccggcagcagatcctggatgagaagcccaagggggagggcagcagcagcttcctgtctgagacctgccacgaggaccccagcgtgagccccaacttcaccccacccaacccccaggccctgaagtggtag

SEQ ID NO: 256747 - DNA, 3522 bp, Artificial Sequence
  derived and/or modified sequence
atggccggcgcccagcccggcgtgcacgccctgcagctgaagcccgtgtgtgtttccgactcacttaaaaaagggaccaaattcgttaagtgggacgacgactctacgatcgtcacacctataatcctccgcaccgaccctcagggattctttttctactggacagaccaaaacaaagagaccgagctgttagatttgtcactcgtcaaggatgctaggtgtggcaggcacgccaaggcacccaaagacccaaagctcagagagctcctggatgtcggaaatataggcagactggagcaacggatgattactgtggtgtacgggccagacttggttaacatttcccacctaaatctggttgccttccaggaagaagtagcaaaagagtggacaaatgaagtgttttctctcgccacgaacctgttagcccagaacatgagccgagatgcatttctcgagaaggcgtacacaaaactgaagctgcaggtgacaccagagggccggattcctttgaaaaacatataccgtttgttttcggctgatcgcaagcgtgttgagaccgcattagaggcctgttcacttcctagtagtcggaatgactcaataccgcaggaagatttcaccccagaagtgtatagagtatttcttaacaatctttgtcccaggcccgaaatagataatatcttttctgagttcggcgctaagagcaaaccttacctaaccgttgaccaaatgatggattttatcaatctaaagcagagggacccacgactcaatgagatcctctaccctcccctcaagcaggaacaggtgcaggtcctgatagagaagtatgagcccaacaactcactcgccaggaaagggcagatctccgtcgatggcttcatgcggtatcttagcggagaggaaaacggagtcgtgtcaccagagaaactcgaccttaacgaagatatgtctcagccgcttagccattatttcattaatagctcacataatacctacttaactgccggccagttagctggtaactcgagcgtggagatgtatcgccaagttctcttatccggatgtcgctgtgtggagctggactgctggaaaggacggaccgccgaagaagaaccagtcataacacatgggttcacgatgactaccgagatctctttcaaagaagtcatcgaggccattgccgagtgtgctttcaagactagcccttttccaattttgctgagttttgaaaaccacgtggattcacccaagcagcaggctaagatggccgaatactgcaggctgatcttcggcgacgctctcctgatggaaccactcgagaagtacccacttgaatctggtgtacccctccccagcccaatggacctgatgtacaagatcctggtgaaaaataagaaaaaaagccacaaaagcagcgaggggagtgggaaaaagaagttatcggagcaggcttctaatacttattccgacagctcctctatgtttgaaccaagtagccccggtgccggagaggccgataccgagtctgatgatgacgacgatgatgatgattgtaaaaagtcttccatggacgagggtactgcaggatctgaagctatggccaccgaagaaatgtccaaccttgtgaactatatccagcctgtgaaatttgagagctttgagatcagcaaaaaacggaacaagtcatttgaaatgagttcttttgtggaaactaagggactagagcagctcaccaagtctcctgtggagttcgttgaatacaataagatgcagttatcccgcatctacccgaagggtacaagggtagacagttccaactatatgccacagcttttctggaatgctggctgtcagatggtggcactgaacttccagacgatggacctggccatgcagattaacatggggatgtatgagtacaatggtaagagcggataccgactgaaacctgagtttatgcgcagacctgataagcattttgacccatttactgaaggtattgtggacggtattgtggcgaataccttatcagtcaagatcatttctggccaattcctgagcgacaagaaagtaggaacatatgttgaggttgacatgttcggtctgcctgtggatactagaaggaaggctttcaagacaaaaacatcccagggaaatgccgtgaatcctgtgtgggaagaggagcccatcgtgttcaagaaagttgttctgcccactctggcgtgcctacgtatcgcagtctatgaggaggggggtaagttcatcggccaccgaattttgccagtgcaggccatccgtcctgggtaccactacatttgtttgagaaatgaaagaaatcagccactcactctgccggcagtgttcgtctatatcgaggtcaaggattacgtgccagatacttatgcagacgtgattgaggccctgagcaaccccattagatatgtgaacctgatggagcagcgagccaagcaactcgcggctctaacactcgaggacgaagaggaggtaaaaaaggaggccgatcctggcgagactccctcggaagctccatccgaggcaagaacaactcctgccgagaacggcgttaaccacaccaccactctgactcccaagcccccgagccaagccctgcattctcagcctgctcccggcagcgttaaggcccctgctaaaacagaagacttgattcagagtgtgctaaccgaagttgaggcgcaaaccatcgaggagctgaagcaacaaaaatcatttgtcaaactccagaagaagcactataaagagatgaaagacctggttaaacggcaccacaagaagactacggacttaatcaaggaacacacaactaagtacaacgagatccaaaatgattacctgcgccggcgggctgcactcgagaagagtgctaaaaaggacagcaagaaaaagtccgaaccttcaagcccggaccacggatcctctaccatagaacaagatttggcagccctcgatgcggagatgacacagaagcttattgatttaaaggacaagcaacagcaacaactcctgaatctgaggcaggagcaatattactctgagaagtaccagaaaagggaacatattaaactactcattcagaagcttacagatgtggctgaagagtgccagaacaaccagcttaaaaagctgaaagaaatctgtgaaaaagaaaagaaggagcttaagaaaaagatggataagaagcgtcaggagaagataaccgaggctaagtccaaagataaatcccagatggaggaggaaaaaaccgagatgattcgcagttacatccaggaagtggtacaatatattaaaaggctggaggaggcccagtccaaacggcaggagaaactggtcgagaaacataaggagatcagacagcagatcttagacgagaaacccaaaggcgagggctcctcatctttcttaagcgagacctgccacgaggatccgagcgtgtctcctaacttcacgcctcccaatccacaggccctgaaatggtag

SEQ ID NO: 256748 - DNA, 3522 bp, Artificial Sequence
  derived and/or modified sequence
atggccggcgcccagcccggcgtgcacgccctgcagctgaagcccgtgtgtgtttcagattcactgaagaaaggcaccaagttcgtcaagtgggatgacgacagtactattgtcacccccattattctgcgaacagatccgcaaggatttttcttctattggactgaccagaataaggagaccgaactgctggatctctctttagtgaaggatgcccgatgtgggaggcacgccaaggcccccaaagatccaaagctgcgtgaacttctcgatgttggtaacattgggaggctggaacagcgcatgattacagtcgtatacggtcccgatctcgtcaatatctcccacttaaacctggtggcctttcaagaagaagtcgctaaagagtggaccaacgaagtgttttctttagcaacgaatctgctcgctcagaacatgtctcgcgatgccttcctcgaaaaagcgtatactaaacttaagctgcaggttacccccgagggacgtattcctctgaaaaacatttacaggctgttcagtgccgatcgaaagcgagtggagaccgccctggaagcgtgctcactgccttcttcacgcaacgacagtattcctcaagaggacttcacacccgaggtttaccgggtttttctgaacaacctgtgccctcgcccggagattgacaatatttttagtgagtttggggccaaaagtaagccctatctgaccgtggaccaaatgatggatttcatcaatctcaaacaaagagaccccaggctcaatgagatcctctacccgccacttaagcaggaacaggtacaagtactcattgagaagtatgagcctaataattccctcgcccgtaagggtcagatctcggttgacgggttcatgaggtatctgtcaggagaggagaatggagtcgtgtcccccgagaagctggatctgaatgaagatatgagccaaccactatcacattattttataaatagctctcacaacacttatctgactgcaggtcagctcgctggcaactccagcgtggaaatgtatcggcaggttctacttagcgggtgccgctgcgtggagctggattgctggaaggggcgaactgccgaggaagagccagtcattacccatggatttacaatgacaaccgagataagttttaaagaagtaatcgaggccatcgcagaatgcgcctttaaaactagcccctttcctatcctgctatcattcgaaaatcatgtcgattcccccaaacagcaggccaagatggccgaatactgtaggctgatcttcggagacgccctgctgatggaaccattggaaaagtaccctctggaaagtggagtcccattaccatcaccaatggatctaatgtacaaaatactggtcaaaaacaagaaaaagagtcataagagtagtgagggtagtggtaaaaagaaactctcagagcaagcaagtaacacttacagtgactcctcttcgatgtttgaaccctcatctcccggggcgggggaagccgacaccgagtcggatgacgatgatgacgatgacgactgtaaaaagtcatctatggacgaaggtactgccggctccgaggcgatggccacggaggagatgagcaatctcgtgaactacattcagccagtaaagtttgaaagcttcgaaattagcaagaagagaaacaagtccttcgagatgagttcctttgtagaaactaaagggctagagcagctgacaaagtcccctgttgagttcgtagaatacaataaaatgcagcttagccgcatttatcctaaggggacccgagtggacagcagtaattatatgccacaactgttctggaacgctgggtgccagatggtggcactgaactttcagactatggacctggctatgcagatcaacatggggatgtacgaatacaatggcaaaagtgggtaccgattgaaacctgaatttatgaggcgacctgacaagcactttgacccatttaccgaggggatcgtcgacggcatcgttgcgaataccctgagcgtgaagatcattagtggccaattcctctccgacaagaaggtgggtacttacgtcgaagtggacatgttcggcctcccagtggatacccgccgcaaggcattcaagaccaagacgagccaagggaatgccgtgaaccccgtttgggaggaagaacctattgtgttcaagaaggtcgtactacccacgcttgcctgtctccgaatcgctgtctatgaggaaggagggaagttcatcgggcataggattctgccggttcaggctatcagaccaggctaccactatatatgtctccgcaatgagcggaaccaaccactgaccctgcccgccgtctttgtctacatagaggtgaaagattatgtgccagatacatatgccgacgtcatagaggcactgagcaatccgatacgctatgtgaacctaatggagcagagagcgaaacaactggcggccttaactcttgaggacgaggaagaagtgaagaaagaggccgatccaggagaaaccccgagcgaagccccgtctgaagccagaaccacgccagcggaaaacggagtgaaccataccaccacccttacacccaagcccccgagccaggcactccacagtcagccagctcccggaagcgtgaaagctcctgccaagactgaggaccttatacaaagtgtgctcactgaagtcgaggctcagactattgaggagctcaagcagcagaagagctttgtcaaactgcagaagaaacactataaggagatgaaagacctggtgaaacgccatcacaaaaagaccacggatttgattaaggagcacaccacaaaatataacgagatccagaacgactatcttaggaggagagcagctttagaaaagagcgctaagaaggactcaaagaagaaatcggagccatcatccccagaccatgggagttctacaattgaacaggacctggctgctctggatgccgagatgactcaaaagctcatcgatctaaaagataagcaacagcaacagctgcttaacttgagacaggaacagtattactccgagaagtatcagaagcgggaacatattaagctgctcattcaaaagttaacagatgtggccgaggagtgtcagaacaaccagctgaagaagctgaaagagatatgtgaaaaagaaaaaaaagaactcaaaaaaaaaatggacaagaagagacaagagaaaatcacagaagcaaaaagcaaagataaatcgcaaatggaagaggaaaaaactgaaatgattcggtcatatattcaggaggtggttcagtacatcaaaaggctggaggaagcgcaaagtaagcgccaggaaaagctcgtggagaagcataaagaaatccggcaacagattctggatgagaaaccaaagggagaggggtcctcatcgttcctgtcagagacatgccacgaagatcctagtgtatctcccaacttcacgcctccgaatccacaagccttgaagtggtag

SEQ ID NO: 256749 - DNA, 3282 bp, Artificial Sequence
  derived and/or modified sequence
acccaggaccccaagctgcgggagctgctggacgtgggcaacatcgggaggctggagcaacgcatgatcacggtggtctatggaccagacttagtaaatattagtcacctgaaccttgtagcttttcaggaggaggtcgccaaggagtggaccaacgaggttttttcccttgccacaaacttactggcccagaatatgagccgggacgccttccttgaaaaggcctacactaagcttaaactgcaggttacccctgaaggtcgcatccccctgaaaaatatttaccggctattttccgcagaccgaaagcgagtcgagaccgcccttgaggcgtgtagcctgccttccagtagaaatgattccattccgcaggaggactttactcctgaggtgtaccgggtctttctgaataacctgtgcccacgccccgagattgacaatattttttcagaatttggtgctaaaagtaaaccctacttgactgtggaccagatgatggactttattaatctaaagcaacgggatccgcggttaaatgagatcctttatccaccactgaagcaagagcaggtccaggttttgatcgagaagtatgagcctaataattctttggcacggaaaggacagattagcgttgatggcttcatgcgttatctgagcggggaggaaaacggagtcgtcagcccagaaaagctggatttaaacgaggacatgtcccagccgctctcacactatttcatcaactcttcgcacaacacataccttaccgcaggtcagctggcaggcaacagcagcgtggagatgtacaggcaagtgcttcttagtggctgcagatgtgtcgagctggactgttggaagggtagaacagcggaagaggagcccgtaatcacgcacggatttacaatgacgactgaaatcagctttaaggaagtgatcgaggcaattgcagaatgtgcttttaagacctctccattccccattcttctatccttcgagaatcatgtggattctccaaagcagcaggcgaaaatggcggagtattgtcgtctgattttcggggatgctctgctgatggagcccctggagaagtacccacttgaatctggggtccccctgccgagcccaatggatcttatgtataagattcttgtcaagaataaaaagaagtctcataaaagtagcgagggaagtgggaagaagaaactctcggagcaggcgtccaacacctactcagattcgtcctcgatgtttgaaccttcctctcctggcgctggcgaggcagatacggaatccgatgatgacgatgacgacgatgattgtaaaaagagctcaatggacgagggaaccgctggaagcgaggctatggccaccgaagaaatgagtaatttagtgaattacatacaacctgtgaagtttgagagcttcgaaattagtaagaaacgcaataagagttttgagatgtcaagcttcgttgaaactaaagggctggagcagttgactaaatctcctgtagagttcgtggaatataataagatgcaactctctcggatttatcctaaggggacaagggtggactcctcaaattatatgcctcagttgttctggaacgccggatgccagatggttgctttgaatttccagacaatggacctcgcgatgcaaatcaatatgggaatgtacgagtacaacggcaaaagtggctatcgcctgaagcccgagtttatgaggcgacccgataaacatttcgacccgtttactgaaggaatagttgacgggatcgtcgctaacacgttgagcgttaagatcatcagtggacagtttctgtctgataaaaaggtgggaacttacgtcgaagtagatatgttcggtctgcccgtggacacgcgccgcaaggcgtttaagaccaaaacctctcagggcaacgccgtgaatcctgtctgggaagaggagcctattgtgtttaaaaaagttgtactgccaaccctcgcctgtctgagaattgccgtctacgaggagggaggaaaattcatcggccatagaatcctgcccgtacaggccatccgccccgggtaccactacatctgtcttagaaacgagcggaaccaacccctgacgctcccggccgttttcgtgtacatagaagtcaaggactacgttccagatacatacgccgatgttattgaagctctgtctaatccaatccgctacgtcaacctcatggagcagcgcgccaagcaacttgctgcactgaccctggaagacgaagaagaggtgaaaaaggaggccgaccctggtgagactccatccgaagctccttctgaggcccggacgacacccgccgagaatggtgttaaccacacaaccaccctgacccctaagccaccttcacaggctttacactctcaacctgccccaggatctgttaaggcgccggctaagaccgaagacctaattcaatctgtattgactgaagtggaggcccagacaatcgaggagctcaagcagcagaagtctttcgtgaaattacagaagaagcattacaaagaaatgaaagatttggttaagagacatcataaaaagaccactgatttgattaaggaacacacaaccaagtacaacgaaatccagaatgattatctgcggaggagagctgccctcgagaaatccgctaaaaaggattctaagaagaagtccgagcctagttcaccagatcatgggagctcgacaatcgaacaagatctggctgcactggacgcagagatgacccagaagctgatagacctgaaggataaacagcagcagcagctgcttaatctacgccaggaacaatactattcagagaagtaccaaaagcgggagcacatcaagctgcttatccagaaacttacagacgtagccgaggagtgtcagaacaaccagcttaagaaacttaaagaaatctgcgagaaggaaaagaaggagttgaagaaaaagatggataagaaaaggcaagagaagatcacggaagccaaatccaaggataaaagccagatggaggaggagaagactgagatgattcgttcttatatccaggaagtcgtacagtacataaagcgtctggaggaggctcagagtaaacggcaggaaaaactcgttgaaaaacacaaagagatcaggcagcagattctggacgagaagcctaagggcgaggggagctcatcattcctgagcgaaacctgccacgaagatccctccgtaagcccaaatttcactccgcccaacccgcaggccctgaagtggtag

SEQ ID NO: 256750 - DNA, 3854 bp, Artificial Sequence
  derived and/or modified sequence
cagatggccggggctcaacccggagtgcacgccttgcaactcaagcccgtgtgcgtgtccgacagcctcaagaagggcaccaaattcgtcaagtgggatgatgactcaactattgttactccaattattttgaggactgaccctcagggatttttcttttactggacagatcaaaacaaggagacagagctactggatctcagccttgtcaaagatgccagatgtgggagacacgccaaagctcccaaggaccccaaattacgtgaacttttggatgtggggaacatcgggcgcctggagcagcgcatgatcacagtggtgtatgggcctgacctcgtgaacatctcccatttgaatctcgtggctttccaagaagaagtggccaaggaatggacaaatgaggttttcagtttggcaacaaacctgctggcccaaaacatgtccagggatgcatttctggaaaaagcctatactaaacttaagctgcaagtcactccagaagggcgtattcctctcaaaaacatatatcgcttgttttcagcagatcggaagcgagttgaaactgctttagaggcttgtagtcttccatcttcaaggaatgattcaatacctcaagaagatttcactccagaagtgtacagagttttcctcaacaacctttgccctcgacctgaaattgataacatcttttcagaatttggtgcaaaaagcaaaccatatcttaccgttgatcagatgatggattttatcaaccttaagcagcgagatcctcggcttaatgaaatactttatccacctctaaaacaagagcaagtccaagtattgattgagaagtatgaacccaacaacagcctcgccagaaaaggacaaatatcagtggatgggttcatgcgctatctgagtggagaagaaaacggagtcgtttcacctgagaaactggatttgaatgaagacatgtctcagcccctttctcactatttcattaattcctcgcacaacacctacctcacagctggccaactggctggaaactcctctgttgagatgtatcgccaagtgctcctgtctggttgtcgctgtgtggagctggactgctggaagggacggactgcagaagaggaacctgtcatcacccatggcttcaccatgacaactgaaatatctttcaaggaagtgatagaagcaattgcggagtgtgcatttaagacttcaccttttccaattctcctttcgtttgagaaccatgtggattccccaaagcagcaagccaagatggcggagtactgccgactgatctttggggatgcccttctcatggagcccctggaaaaatatccactggaatctggagttcctcttccaagccctatggatttaatgtataaaattttggtgaaaaataagaagaaatcacacaagtcatcagaaggaagcggcaaaaagaagctctcagaacaagcctccaacacctacagtgactcctccagcatgttcgagccctcatccccaggagccggagaagctgatacggaaagtgacgacgacgatgatgatgatgactgtaaaaaatcttcaatggatgaggggactgctggaagtgaggctatggccacagaagaaatgtctaatctggtgaactatattcagccagtcaagtttgagtcatttgaaatttcaaaaaaaagaaataaaagttttgaaatgtcttccttcgtggaaaccaaaggacttgaacaactcaccaagtctccagtggaatttgtagaatataacaaaatgcagcttagcaggatatatccaaaaggaacacgtgtggattcatccaactatatgcctcagctcttctggaatgcaggttgtcagatggtggcacttaatttccagacaatggacctggctatgcaaataaatatggggatgtatgaatacaacgggaagagtggctacagattgaagccagagttcatgaggaggcctgacaagcattttgatccatttactgaaggcatcgtagatgggatagtggcaaacactttgtctgttaagattatttcaggtcagtttctttctgataagaaagttgggacttacgtggaagtagatatgtttggtttgcctgtggatacaaggaggaaggcatttaagaccaaaacatcccaaggaaatgctgtgaatcctgtctgggaagaagaacctattgtgttcaaaaaggtggttcttcctactctggcctgtttgagaatagcagtttatgaagaaggaggtaaattcattggccaccgtatcttgccagtgcaagccattcggccaggctatcactatatctgtctaaggaatgaaaggaaccagcctctgacgctgcctgctgtctttgtctacatagaagtgaaagactatgtgccagacacatatgcagatgtcatcgaagctttatcaaacccaatccgatatgtgaacctgatggaacagagagctaagcaattggctgctttgacactggaagatgaagaagaagtaaagaaagaggctgatcctggagaaacaccatcagaggctccaagtgaagcgagaacgactccagcagaaaatggggtgaatcacactacaaccctgacacccaagccaccctcccaggctctccacagccagccagctccaggttctgtaaaggcacctgccaaaacagaagatcttattcagagtgtcttaacagaagtggaagcacagaccatcgaagaactaaagcaacagaaatcgtttgtgaaacttcaaaagaaacactacaaagaaatgaaagacctggttaagagacaccacaagaaaaccactgaccttatcaaagaacacactaccaagtataatgaaattcagaatgactacttgagaaggagagccgctttggaaaagtccgccaaaaaggacagtaagaaaaaatcggaacccagcagccctgatcatggttcatcaacgattgagcaagacctcgctgctctggatgctgaaatgacccaaaagttaatagacttgaaggacaaacaacagcagcagctgcttaatcttcggcaagaacagtattatagtgaaaaataccagaagcgagaacatattaaactgcttattcaaaagttgacggatgtcgcagaagagtgtcagaacaatcagttaaagaagctcaaagaaatctgtgagaaagaaaagaaagaattaaagaagaaaatggataaaaagaggcaggagaagataacagaagctaaatccaaagacaaaagtcagatggaagaggagaagacagagatgatccggtcatatatccaggaagtggtgcagtatatcaagaggctagaagaagcgcaaagtaaacggcaagaaaaactcgtagagaaacacaaggaaatacgtcagcagatcctggatgaaaagcccaagggggaaggttcctcctcattcttgtcggaaacttgccatgaggatccctctgtttcccccaactttactccccccaaccctcaagctctcaagtggtgaccaccgtccttccggccaggtaggactggatgggaggggtcgcttttgagagaagggtggtgtgtagccatccagttttcaggcatcacggacttgctcgtttgtccttcatcctccctttctctacattcccatcttttttttctgctaaagttcccagccacacccatgatcatttcctcatcctttctgccttcctctggtattaatttctccatcattgtgctctctcttcctgacataaatctcattcttccatattgtcttcttcctctttctccattttgtttctctattggcaaatttggcttcctttttaatctggattt

SEQ ID NO: 256751 - DNA, 7295 bp, Artificial Sequence
  derived and/or modified sequence
cagcgagcgagggtggcggggaaggggggcgggggggaggaggagggaggagggaaaagagcggttagggggggcgccgggcgtgtgtcactcgctctctccctctgtgtatagaggatgtgctgaatggtgcgctttgaggcggcggcggcggaggagcagaatccgccgcgactggcagcctcggctgaccggctcggcttctcttcgccttccgaggctcctcatccaccgcgggctccagacctcgcgtcccgcccggggcatggccgggcgctgcgcccccgcgcgctctgcctgctgagcggcgccggagggaggtgcggaggccgggaggccggggaggccggcggggagcagagtcgagcgcctccggagcagagaaaggagcccgcgccccgcgccccgcgccccgcgcacggtccccagtccctgccgcgctcgcccgggccgcccggagcccagatgagcccagatggccggggctcaacccggagtgcacgccttgcaactcaagcccgtgtgcgtgtccgacagcctcaagaagggcaccaaattcgtcaagtgggatgatgactcaactattgttactccaattattttgaggactgaccctcagggatttttcttttactggacagatcaaaacaaggagacagagctactggatctcagccttgtcaaagatgccagatgtgggagacacgccaaagctcccaaggaccccaaattacgtgaacttttggatgtggggaacatcgggcgcctggagcagcgcatgatcacagtggtgtatgggcctgacctcgtgaacatctcccatttgaatctcgtggctttccaagaagaagtggccaaggaatggacaaatgaggttttcagtttggcaacaaacctgctggcccaaaacatgtccagggatgcatttctggaaaaagcctatactaaacttaagctgcaagtcactccagaagggcgtattcctctcaaaaacatatatcgcttgttttcagcagatcggaagcgagttgaaactgctttagaggcttgtagtcttccatcttcaaggaatgattcaatacctcaagaagatttcactccagaagtgtacagagttttcctcaacaacctttgccctcgacctgaaattgataacatcttttcagaatttggtgcaaaaagcaaaccatatcttaccgttgatcagatgatggattttatcaaccttaagcagcgagatcctcggcttaatgaaatactttatccacctctaaaacaagagcaagtccaagtattgattgagaagtatgaacccaacaacagcctcgccagaaaaggacaaatatcagtggatgggttcatgcgctatctgagtggagaagaaaacggagtcgtttcacctgagaaactggatttgaatgaagacatgtctcagcccctttctcactatttcattaattcctcgcacaacacctacctcacagctggccaactggctggaaactcctctgttgagatgtatcgccaagtgctcctgtctggttgtcgctgtgtggagctggactgctggaagggacggactgcagaagaggaacctgtcatcacccatggcttcaccatgacaactgaaatatctttcaaggaagtgatagaagcaattgcggagtgtgcatttaagacttcaccttttccaattctcctttcgtttgagaaccatgtggattccccaaagcagcaagccaagatggcggagtactgccgactgatctttggggatgcccttctcatggagcccctggaaaaatatccactggaatctggagttcctcttccaagccctatggatttaatgtataaaattttggtgaaaaataagaagaaatcacacaagtcatcagaaggaagcggcaaaaagaagctctcagaacaagcctccaacacctacagtgactcctccagcatgttcgagccctcatccccaggagccggagaagctgatacggaaagtgacgacgacgatgatgatgatgactgtaaaaaatcttcaatggatgaggggactgctggaagtgaggctatggccacagaagaaatgtctaatctggtgaactatattcagccagtcaagtttgagtcatttgaaatttcaaaaaaaagaaataaaagttttgaaatgtcttccttcgtggaaaccaaaggacttgaacaactcaccaagtctccagtggaatttgtagaatataacaaaatgcagcttagcaggatatatccaaaaggaacacgtgtggattcatccaactatatgcctcagctcttctggaatgcaggttgtcagatggtggcacttaatttccagacaatggacctggctatgcaaataaatatggggatgtatgaatacaacgggaagagtggctacagattgaagccagagttcatgaggaggcctgacaagcattttgatccatttactgaaggcatcgtagatgggatagtggcaaacactttgtctgttaagattatttcaggtcagtttctttctgataagaaagttgggacttacgtggaagtagatatgtttggtttgcctgtggatacaaggaggaaggcatttaagaccaaaacatcccaaggaaatgctgtgaatcctgtctgggaagaagaacctattgtgttcaaaaaggtggttcttcctactctggcctgtttgagaatagcagtttatgaagaaggaggtaaattcattggccaccgtatcttgccagtgcaagccattcggccaggctatcactatatctgtctaaggaatgaaaggaaccagcctctgacgctgcctgctgtctttgtctacatagaagtgaaagactatgtgccagacacatatgcagatgtcatcgaagctttatcaaacccaatccgatatgtgaacctgatggaacagagagctaagcaattggctgctttgacactggaagatgaagaagaagtaaagaaagaggctgatcctggagaaacaccatcagaggctccaagtgaagcgagaacgactccagcagaaaatggggtgaatcacactacaaccctgacacccaagccaccctcccaggctctccacagccagccagctccaggttctgtaaaggcacctgccaaaacagaagatcttattcagagtgtcttaacagaagtggaagcacagaccatcgaagaactaaagcaacagaaatcgtttgtgaaacttcaaaagaaacactacaaagaaatgaaagacctggttaagagacaccacaagaaaaccactgaccttatcaaagaacacactaccaagtataatgaaattcagaatgactacttgagaaggagagccgctttggaaaagtccgccaaaaaggacagtaagaaaaaatcggaacccagcagccctgatcatggttcatcaacgattgagcaagacctcgctgctctggatgctgaaatgacccaaaagttaatagacttgaaggacaaacaacagcagcagctgcttaatcttcggcaagaacagtattatagtgaaaaataccagaagcgagaacatattaaactgcttattcaaaagttgacggatgtcgcagaagagtgtcagaacaatcagttaaagaagctcaaagaaatctgtgagaaagaaaagaaagaattaaagaagaaaatggataaaaagaggcaggagaagataacagaagctaaatccaaagacaaaagtcagatggaagaggagaagacagagatgatccggtcatatatccaggaagtggtgcagtatatcaagaggctagaagaagcgcaaagtaaacggcaagaaaaactcgtagagaaacacaaggaaatacgtcagcagatcctggatgaaaagcccaagggggaaggttcctcctcattcttgtcggaaacttgccatgaggatccctctgtttcccccaactttactccccccaaccctcaagctctcaagtggtgaccaccgtccttccggccagctgcaggtggagctggagcaagaataccaagacaaattcaaaagactgcccctcgagattttggaattcgtgcaggaagccatgaaaggaaagatcagtgaagacagcaatcacggttctgcccctctctccctgtcctcagaccctggaaaagtgaaccacaagactccctccagtgaggagctgggaggagacatcccaggaaaagaatttgatactcctctgtgaatgctcctgccaggccttcagaaattgcatggccactccagcgtcatcggactctctcttattacaaagatcactgcccaggaccatcttcccgagaagcatcccttagcctaaaatccacaccaaagggagagttccagaggaatccatgaagaattcccatgcccaggctccatgtgtcatgtggaaacctccacaggtctgctagtgaagaatgcatgtatgtgagatttttgttttctttccaatagcaaattcaaagcaagcaacttgcaggctccatggaacttttaatgaaggacagtgtcttctttgaagaaaatcaagctcgtgtttttattcgaagctctggtgtaaaatatttcaaagtcatagaaatagtttgagaaatgcatagcattatttaacactattgaacagccgactttgagcattgtttcttctaactgcccctcaactaccattatcttcaagtcaacatgcatattacattttcatcctttgctttgcaagcactggtggcttgcagtttgctaatttatttatcatagagtcatcaatgtatttgttgctgacatggttttattagatactgtagtgattcaaataagttttctatttgaaaaaaaaaatcacttgattgtatccttgcccagtgaagccatcctaagacttagcaatatggattgtacatttggctgcatgagcaagtcggccgcacacttccagacagtgtgctgtttgaattgactatttgcactcaaagtctgggtattcattggttattggcctgaaatgatcaaataactacaaatgatctgttgaataaaaatagttgagctgatatatgttaagcagatattcaatcagaatgaacaggttccggtggttattttgccgtttgacattttttatggttcatttatttttaatatagagaggaagattgaatatttatctagagaatacaaagacccacatgtaaatgataggtattatctccatgtatatatgtacccacttagtcatgtaagtgcatatacacatacacacacatgagtgtagacatgtgtttattaattgacaatgacccaaatctcttccacaagacttaaaaccaaattcagggacaaatggatagagaagaaaagggtcaaacatcgagattacatggatgttaaattatatggagacgctaagaaataattgatggagccattgatgcaaaccgaagtagatttagaacttatatgaatttgatttatattttgcaagatcaaaaattagatgttaagtatcagattttaagcttgttttaatggtcaaaaaattaggacagaaataatatggacatttattagtatcttccataatttttaagtctgacacatttctattttattctaacataaaaaaacttccattatatatttactaagtatatttaattcacttaactctgtctttataagttcctattttagatggaataagagaaacaaattatatcaaggtaaaactgatcaaaagcataattgaaagttctgaaaaaagaaaaataataatatgtagaaaaatgtaacttagagagtaacacatgaacattgaagttaaaacccagaagccagatgctcacagttttattttactttaaaataaacctgtctgactgtagctttgtgaaatatcttaaaacgcaaaaaccaattgtgtcctgaaaattgtttcaagaatttaatatttttatgaaaattattttatttaactttaagcaataactagagattacaattaaattttaatcaaaatgaaggcttagttcaaacataaggaaacagtgtttgattaaaaaaaacacatctagtaagacgtaaggggaaaatcacatcctctttggagatgattatattttgatctgaagggtttggggtgttcattagacacttaataaaacttaacttccaatgaaaaagaaatcttttgtaaatcattctacttttgcactttgaaagaaaggcgttaatcataaagaagcaagaatggtcaaaatcgaatgctgcatttttataaacaaaattacagactgtctgaaattgaagaagaatgaactaataatagcattcataaccaaacacaatgatgattattgcagaacattgtatcacattttagtccagagatagaataaagttgaataaccttgacttacacaaaactgttttggtagttggatttcattatcttagtgaatttagtcattttacaatatgtttgtatttggccatttactgtaatcacatttttatatctgtacaatgacactttttgcagttgtggggtagtgtgtaacactgtccatcttgcatcattgaaactactacaatgatactatcatttaataatattaatattacttgaaatagactaagataaagaaaaggggtctgtatgatgtgcagttttgtgcctttatgtatttgccttgttctttgtcgaatgtgtgaaattccgtactgtggtttttcctataatagaaagtagagctgtgtattaaattagactgtgtctctctgatacctttacactactgagaatagcatggttttggccatgtaaaccaattttcaaagttctaatgacatagccatgtgtttttggttttttatatttcattttaaaatttgagtatcaccatacattaattaatactcctgtagtagataagctgtcattaagtaattcccaaaaaaagggccatttgcttgcattactttgaatttaatgttgcgcttgtgcactgtgttaatattgtttgtgatggattggacgttgtgactcttgccttttaagaagaaaaaaaagataggacaaagtatttgaagctcttaaaatgtacatattttggttcttctatctcaaattatttaaaatgcataattcacatttttgtaataattctatgcaattttgtggcatgatgtttcttccacttgtaattttatgtgctttcatcacaaatccaaaggaaagaataaaaatttcttaacacaa

SEQ ID NO: 256752 - DNA, 6580 bp, Artificial Sequence
  derived and/or modified sequence
acccaggaccccaaattacgtgaacttttggatgtggggaacatcgggcgcctggagcagcgcatgatcacagtggtgtatgggcctgacctcgtgaacatctcccatttgaatctcgtggctttccaagaagaagtggccaaggaatggacaaatgaggttttcagtttggcaacaaacctgctggcccaaaacatgtccagggatgcatttctggaaaaagcctatactaaacttaagctgcaagtcactccagaagggcgtattcctctcaaaaacatatatcgcttgttttcagcagatcggaagcgagttgaaactgctttagaggcttgtagtcttccatcttcaaggaatgattcaatacctcaagaagatttcactccagaagtgtacagagttttcctcaacaacctttgccctcgacctgaaattgataacatcttttcagaatttggtgcaaaaagcaaaccatatcttaccgttgatcagatgatggattttatcaaccttaagcagcgagatcctcggcttaatgaaatactttatccacctctaaaacaagagcaagtccaagtattgattgagaagtatgaacccaacaacagcctcgccagaaaaggacaaatatcagtggatgggttcatgcgctatctgagtggagaagaaaacggagtcgtttcacctgagaaactggatttgaatgaagacatgtctcagcccctttctcactatttcattaattcctcgcacaacacctacctcacagctggccaactggctggaaactcctctgttgagatgtatcgccaagtgctcctgtctggttgtcgctgtgtggagctggactgctggaagggacggactgcagaagaggaacctgtcatcacccatggcttcaccatgacaactgaaatatctttcaaggaagtgatagaagcaattgcggagtgtgcatttaagacttcaccttttccaattctcctttcgtttgagaaccatgtggattccccaaagcagcaagccaagatggcggagtactgccgactgatctttggggatgcccttctcatggagcccctggaaaaatatccactggaatctggagttcctcttccaagccctatggatttaatgtataaaattttggtgaaaaataagaagaaatcacacaagtcatcagaaggaagcggcaaaaagaagctctcagaacaagcctccaacacctacagtgactcctccagcatgttcgagccctcatccccaggagccggagaagctgatacggaaagtgacgacgacgatgatgatgatgactgtaaaaaatcttcaatggatgaggggactgctggaagtgaggctatggccacagaagaaatgtctaatctggtgaactatattcagccagtcaagtttgagtcatttgaaatttcaaaaaaaagaaataaaagttttgaaatgtcttccttcgtggaaaccaaaggacttgaacaactcaccaagtctccagtggaatttgtagaatataacaaaatgcagcttagcaggatatatccaaaaggaacacgtgtggattcatccaactatatgcctcagctcttctggaatgcaggttgtcagatggtggcacttaatttccagacaatggacctggctatgcaaataaatatggggatgtatgaatacaacgggaagagtggctacagattgaagccagagttcatgaggaggcctgacaagcattttgatccatttactgaaggcatcgtagatgggatagtggcaaacactttgtctgttaagattatttcaggtcagtttctttctgataagaaagttgggacttacgtggaagtagatatgtttggtttgcctgtggatacaaggaggaaggcatttaagaccaaaacatcccaaggaaatgctgtgaatcctgtctgggaagaagaacctattgtgttcaaaaaggtggttcttcctactctggcctgtttgagaatagcagtttatgaagaaggaggtaaattcattggccaccgtatcttgccagtgcaagccattcggccaggctatcactatatctgtctaaggaatgaaaggaaccagcctctgacgctgcctgctgtctttgtctacatagaagtgaaagactatgtgccagacacatatgcagatgtcatcgaagctttatcaaacccaatccgatatgtgaacctgatggaacagagagctaagcaattggctgctttgacactggaagatgaagaagaagtaaagaaagaggctgatcctggagaaacaccatcagaggctccaagtgaagcgagaacgactccagcagaaaatggggtgaatcacactacaaccctgacacccaagccaccctcccaggctctccacagccagccagctccaggttctgtaaaggcacctgccaaaacagaagatcttattcagagtgtcttaacagaagtggaagcacagaccatcgaagaactaaagcaacagaaatcgtttgtgaaacttcaaaagaaacactacaaagaaatgaaagacctggttaagagacaccacaagaaaaccactgaccttatcaaagaacacactaccaagtataatgaaattcagaatgactacttgagaaggagagccgctttggaaaagtccgccaaaaaggacagtaagaaaaaatcggaacccagcagccctgatcatggttcatcaacgattgagcaagacctcgctgctctggatgctgaaatgacccaaaagttaatagacttgaaggacaaacaacagcagcagctgcttaatcttcggcaagaacagtattatagtgaaaaataccagaagcgagaacatattaaactgcttattcaaaagttgacggatgtcgcagaagagtgtcagaacaatcagttaaagaagctcaaagaaatctgtgagaaagaaaagaaagaattaaagaagaaaatggataaaaagaggcaggagaagataacagaagctaaatccaaagacaaaagtcagatggaagaggagaagacagagatgatccggtcatatatccaggaagtggtgcagtatatcaagaggctagaagaagcgcaaagtaaacggcaagaaaaactcgtagagaaacacaaggaaatacgtcagcagatcctggatgaaaagcccaagggggaaggttcctcctcattcttgtcggaaacttgccatgaggatccctctgtttcccccaactttactccccccaaccctcaagctctcaagtggtgaccaccgtccttccggccagctgcaggtggagctggagcaagaataccaagacaaattcaaaagactgcccctcgagattttggaattcgtgcaggaagccatgaaaggaaagatcagtgaagacagcaatcacggttctgcccctctctccctgtcctcagaccctggaaaagtgaaccacaagactccctccagtgaggagctgggaggagacatcccaggaaaagaatttgatactcctctgtgaatgctcctgccaggccttcagaaattgcatggccactccagcgtcatcggactctctcttattacaaagatcactgcccaggaccatcttcccgagaagcatcccttagcctaaaatccacaccaaagggagagttccagaggaatccatgaagaattcccatgcccaggctccatgtgtcatgtggaaacctccacaggtctgctagtgaagaatgcatgtatgtgagatttttgttttctttccaatagcaaattcaaagcaagcaacttgcaggctccatggaacttttaatgaaggacagtgtcttctttgaagaaaatcaagctcgtgtttttattcgaagctctggtgtaaaatatttcaaagtcatagaaatagtttgagaaatgcatagcattatttaacactattgaacagccgactttgagcattgtttcttctaactgcccctcaactaccattatcttcaagtcaacatgcatattacattttcatcctttgctttgcaagcactggtggcttgcagtttgctaatttatttatcatagagtcatcaatgtatttgttgctgacatggttttattagatactgtagtgattcaaataagttttctatttgaaaaaaaaaatcacttgattgtatccttgcccagtgaagccatcctaagacttagcaatatggattgtacatttggctgcatgagcaagtcggccgcacacttccagacagtgtgctgtttgaattgactatttgcactcaaagtctgggtattcattggttattggcctgaaatgatcaaataactacaaatgatctgttgaataaaaatagttgagctgatatatgttaagcagatattcaatcagaatgaacaggttccggtggttattttgccgtttgacattttttatggttcatttatttttaatatagagaggaagattgaatatttatctagagaatacaaagacccacatgtaaatgataggtattatctccatgtatatatgtacccacttagtcatgtaagtgcatatacacatacacacacatgagtgtagacatgtgtttattaattgacaatgacccaaatctcttccacaagacttaaaaccaaattcagggacaaatggatagagaagaaaagggtcaaacatcgagattacatggatgttaaattatatggagacgctaagaaataattgatggagccattgatgcaaaccgaagtagatttagaacttatatgaatttgatttatattttgcaagatcaaaaattagatgttaagtatcagattttaagcttgttttaatggtcaaaaaattaggacagaaataatatggacatttattagtatcttccataatttttaagtctgacacatttctattttattctaacataaaaaaacttccattatatatttactaagtatatttaattcacttaactctgtctttataagttcctattttagatggaataagagaaacaaattatatcaaggtaaaactgatcaaaagcataattgaaagttctgaaaaaagaaaaataataatatgtagaaaaatgtaacttagagagtaacacatgaacattgaagttaaaacccagaagccagatgctcacagttttattttactttaaaataaacctgtctgactgtagctttgtgaaatatcttaaaacgcaaaaaccaattgtgtcctgaaaattgtttcaagaatttaatatttttatgaaaattattttatttaactttaagcaataactagagattacaattaaattttaatcaaaatgaaggcttagttcaaacataaggaaacagtgtttgattaaaaaaaacacatctagtaagacgtaaggggaaaatcacatcctctttggagatgattatattttgatctgaagggtttggggtgttcattagacacttaataaaacttaacttccaatgaaaaagaaatcttttgtaaatcattctacttttgcactttgaaagaaaggcgttaatcataaagaagcaagaatggtcaaaatcgaatgctgcatttttataaacaaaattacagactgtctgaaattgaagaagaatgaactaataatagcattcataaccaaacacaatgatgattattgcagaacattgtatcacattttagtccagagatagaataaagttgaataaccttgacttacacaaaactgttttggtagttggatttcattatcttagtgaatttagtcattttacaatatgtttgtatttggccatttactgtaatcacatttttatatctgtacaatgacactttttgcagttgtggggtagtgtgtaacactgtccatcttgcatcattgaaactactacaatgatactatcatttaataatattaatattacttgaaatagactaagataaagaaaaggggtctgtatgatgtgcagttttgtgcctttatgtatttgccttgttctttgtcgaatgtgtgaaattccgtactgtggtttttcctataatagaaagtagagctgtgtattaaattagactgtgtctctctgatacctttacactactgagaatagcatggttttggccatgtaaaccaattttcaaagttctaatgacatagccatgtgtttttggttttttatatttcattttaaaatttgagtatcaccatacattaattaatactcctgtagtagataagctgtcattaagtaattcccaaaaaaagggccatttgcttgcattactttgaatttaatgttgcgcttgtgcactgtgttaatattgtttgtgatggattggacgttgtgactcttgccttttaagaagaaaaaaaagataggacaaagtatttgaagctcttaaaatgtacatattttggttcttctatctcaaattatttaaaatgcataattcacatttttgtaataattctatgcaattttgtggcatgatgtttcttccacttgtaattttatgtgctttcatcacaaatccaaaggaaagaataaaaatttcttaacacaa

SEQ ID NO: 256753 - DNA, 3522 bp, Artificial Sequence
  derived and/or modified sequence
atggccggagctcagccaggggtacatgccctgcagttaaagcctgtttgcgtgagcgattctttgaagaaggggaccaagtttgtgaaatgggatgatgacagcaccatcgtgacacctatcattctgagaacggatcctcagggatttttcttttactggacagaccagaacaaggaaaccgaacttctggatctttcgctggtgaaagatgcccgatgcggaaggcatgccaaggctcccaaggatcctaaattgcgcgagctcttagacgtcggcaacatcgggaggttagagcagaggatgatcactgtggtttatggtcccgacctggttaacattagccacctgaatctggtcgcttttcaggaggaagttgcaaaggaatggaccaacgaagtgttttccctcgccaccaacctgctggctcaaaacatgagcagagatgcttttctggaaaaggcctacactaaactcaagctgcaagtaactcctgagggaagaattcccctgaaaaacatttatcgactgttttctgccgaccggaaacgggttgaaactgctttggaagcctgttcactgccctcatcaagaaatgattctatcccacaggaagatttcaccccggaagtctatcgcgtgtttcttaacaatctgtgtcctcggcctgagatcgacaatattttcagtgagtttggcgctaagtccaagccctacctgacagtagatcagatgatggacttcattaatcttaaacagcgggatcccagactgaatgagatcctgtatccacccctgaaacaggaacaggtccaagttctgattgaaaagtatgagccaaataatagcctggccagaaagggccagatctctgtagatggttttatgagatacctatcaggggaggagaacggggtcgtctcaccagaaaagctggatttaaatgaggacatgagccaaccattatctcactattttatcaattccagtcataacacttatctgactgcgggtcagttagccggaaactcttctgtggagatgtatagacaagtcctcctgtcagggtgtcggtgtgtggaactggactgttggaagggaaggaccgccgaggaggagcccgtgatcacacacggcttcacaatgaccaccgagatcagcttcaaagaggtgatcgaagctattgctgaatgcgcttttaagactagcccgtttcccatcttgctcagcttcgagaaccatgtggacagtccgaagcagcaggcaaagatggctgagtactgtagactcatcttcggcgacgcacttttgatggaaccactcgaaaagtacccacttgaaagcggggtgcctctcccctctcctatggatttaatgtacaagatactcgtgaagaacaagaagaaatcccataagagcagtgagggcagcggaaagaagaaactgtcagagcaggcaagcaatacatactcagactcttcctctatgttcgaaccttcatcaccgggtgccggagaggccgacactgaatcagacgacgatgacgatgatgacgattgcaagaaatcaagtatggacgaaggcaccgctggatctgaggccatggcaacagaggaaatgagtaacctggtgaattatattcagcccgtgaaatttgaatcctttgagatcagtaagaaacgtaataaatctttcgagatgtcaagcttcgtggaaactaagggactcgaacagctaaccaaaagccctgtggagttcgtcgagtataataagatgcagctgagccgtatctaccccaaaggcactagggtggacagttccaattacatgccacaacttttttggaatgctgggtgtcagatggtggcccttaatttccagacgatggacctagctatgcaaatcaatatgggtatgtatgagtacaacggcaagtcagggtaccgattaaagccggagttcatgcgcaggcccgacaaacatttcgatccgtttacagagggcattgtcgacggcattgttgctaatacccttagcgttaagattatttctgggcagttcctcagcgacaagaaggtgggtacctacgtagaagtggatatgtttgggctgccagtcgatacaaggaggaaggcctttaagacgaagacctctcaaggcaatgcggttaatcccgtttgggaagaagagcctattgtattcaagaaggtagtgctccccacgctggcttgcctgaggatcgccgtctacgaagagggtggcaaattcatcggccatagaatcctgcccgttcaggcgattcgacctggataccattacatctgtctccgaaacgagagaaatcagcccctcaccctgcccgcagttttcgtctatatcgaagtaaaagattacgttccagacacatacgcagatgtcatcgaggctctcagcaaccctatcagatacgtgaaccttatggagcagagggccaagcagctagcagccctcactttggaggacgaggaggaagtcaagaaagaggccgatcctggggagaccccttctgaagctccttcagaagccaggaccacacccgctgaaaacggagtgaaccacaccaccacacttactccaaagccacctagtcaggccctgcactctcagccagccccaggatccgtgaaggccccagccaagactgaggacttgatccaaagtgtgttaaccgaggttgaagcacagaccattgaggagctgaaacagcagaagtctttcgtcaaattacagaagaaacattacaaggagatgaaggacctggtgaaacgacaccataagaagacgacagacttaattaaggagcacactaccaaatataatgagatacagaatgattacctgagacgcagggcggctttggagaagtcggcaaagaaagactcgaagaagaagagcgagccctccagtcccgaccacggaagttccacaatagagcaggacctcgctgctctcgatgcagagatgactcaaaaattgatcgatttgaaggacaaacagcagcagcaactgttaaatctgcgccaagagcagtattactccgaaaaataccagaaaagggagcacattaaactcttgatccagaagctaactgacgtcgcagaggaatgccagaacaatcagcttaagaagctgaaagaaatctgcgagaaggaaaaaaaggagctgaaaaaaaagatggacaagaaaagacaggagaaaatcacagaggcaaagagtaaggacaaaagtcagatggaggaggaaaaaactgaaatgatccggtcttacattcaggaagtggtacagtacataaaacggctcgaggaagcccagtccaaacgccaggaaaagctggtggagaagcacaaggaaataaggcagcagatcttggatgagaaacccaaaggtgaaggtagtagtagttttctcagcgagacatgccatgaagatccatccgtctcacccaattttacgccgccaaatccgcaggctcttaagtggtag

SEQ ID NO: 256754 - DNA, 3522 bp, Artificial Sequence
  derived and/or modified sequence
atggccggagcccagccgggtgtacatgcactccagttgaaaccagtgtgcgtctctgactctctgaaaaaaggaacgaaattcgtcaagtgggacgatgacagtactattgtgacgccaatcattctgagaaccgatccacagggtttcttcttctattggacggatcagaacaaggaaacagagctcctggatctgagtctcgtgaaagacgcacgctgcggacggcatgctaaggcccctaaggatccaaaactccgtgagctgctagacgtgggaaatattggaaggctcgagcagcgtatgattacggttgtgtacggcccagacttggtaaacatctcccatctcaatcttgtcgctttccaggaagaggtcgccaaagaatggacgaatgaggttttctcactggctactaatctattggcccagaacatgagccgggatgcatttctcgaaaaggcttatacaaagctcaaactccaggtgacccctgagggcagaatacccctcaaaaacatctatcggctgttttccgcagatagaaagcgggtggaaacagcccttgaggcttgttcactgccttccagtcgaaatgatagcatccctcaagaggacttcacccccgaggtgtatagggtgtttttaaacaatctgtgcccgaggcccgagattgataatattttttcagagtttggggctaagtccaagccctacttgacggttgaccagatgatggattttatcaacctgaagcagcgtgacccccgtctcaacgaaatcctttatcctccacttaagcaagagcaagttcaggtcctgattgaaaaatatgagccaaacaactctttggccagaaaaggccagatttcagtggatggctttatgcgctatctgtcaggcgaagagaacggagttgtgtctcctgaaaaactggacctcaatgaagatatgagccaacccttatcccattatttcatcaactcctcccacaacacatatctcaccgcaggtcagttagccggtaacagcagcgtggaaatgtataggcaagtacttttatctggctgtcgctgcgtggagctggattgctggaaagggaggaccgcagaggaggaacctgtgattacacatgggtttaccatgaccaccgagatcagcttcaaggaggttatcgaggcgatcgctgaatgcgccttcaaaaccagcccatttccgatcctcctgagctttgaaaaccatgtggactctcctaaacaacaggccaaaatggctgagtactgcagactaatcttcggcgatgcactgctgatggaaccacttgaaaaatatcctctcgaatctggcgttccattacctagccccatggacttgatgtataaaatcctggttaaaaacaagaaaaagagccacaaatcgtcagaaggttccggcaaaaagaagctcagcgaacaggctagtaacacctacagcgactccagttcaatgttcgaaccgtcctctcccggagcgggtgaagcagacacggagtccgacgacgatgatgatgatgatgattgcaagaaatcgtccatggatgagggaacagcaggttcagaggccatggccacagaggagatgtccaaccttgtaaattatatacagcctgtgaagttcgagagctttgagatcagtaagaagcgcaataaaagtttcgaaatgtcttccttcgttgaaactaagggcttagagcagctgaccaagtcacctgtggagttcgttgagtacaacaaaatgcagctctctcggatctatcctaaaggaacccgtgtcgattccagtaactatatgccccagctgttctggaacgccggttgccagatggtggcactcaacttccagacaatggatctggctatgcagattaacatgggtatgtatgaatacaacggcaaatctggctaccgcctgaagcccgaattcatgcgcaggccagacaagcacttcgatcccttcacagagggcatcgtggacgggattgtggctaacacactctcagtcaaaattatctctgggcaattcctgtccgataagaaggttggcacttacgttgaggtcgacatgtttgggcttcccgttgacacaagaagaaaagccttcaaaaccaagacctcccagggtaacgccgtgaacccggtctgggaggaggaaccaattgtcttcaaaaaggtcgtgttgcccaccctggcttgtctcagaatagccgtatatgaagaggggggaaaattcatcggtcatcggatactcccagtgcaggcaattaggccagggtaccattatatctgcctgcggaacgaacgcaaccaaccattgacattaccggcagtgttcgtgtacatcgaagtgaaagactacgtccctgatacttatgctgatgttatcgaagcgctttctaacccgatccggtacgtgaatttgatggagcagcgggcaaaacaactagccgctctgaccctcgaggacgaggaggaagtcaagaaagaagcagaccctggcgagaccccatcagaggccccttccgaggctcgtaccaccccagccgaaaatggcgtgaaccacacaaccactcttacccctaagccaccttcccaggcactgcattcacagccagctcccggatctgtgaaggcaccagcaaaaaccgaggatctgatacagagtgtgttgacagaggtcgaagcccagaccatcgaggaacttaagcagcagaagtcttttgtgaagcttcaaaagaaacactacaaagagatgaaggatcttgttaaacgtcatcacaaaaaaaccactgacctaatcaaggagcataccaccaagtacaacgagatccagaatgactacttgcggagaagggcggcactcgagaagagcgctaagaaggacagcaaaaaaaagagcgagccttcctccccggaccacgggtcgtcaaccatagaacaggacctggctgctctggatgcagaaatgacccaaaagctgatcgacctcaaagataaacagcagcagcaattgctcaacttaagacaggagcagtactattctgaaaaataccaaaaacgggagcatataaaactccttatccagaagctgactgacgtcgcagaggagtgccagaataatcaactgaaaaagctcaaagagatttgcgaaaaggagaaaaaggagttgaaaaagaaaatggataagaaaagacaagaaaagatcaccgaggccaaatctaaagacaagtctcaaatggaggaggaaaaaacagagatgattcgcagttacatccaagaggtcgtgcagtatattaagagattggaggaggcccagagcaaacgccaagagaagctggtagaaaagcataaggagattcgccagcagatcttggacgagaagccgaaaggtgaaggatcgagcagctttctgtcagagacttgtcatgaagatccatcagttagtcccaatttcacaccccctaaccctcaggccctgaagtggtag

SEQ ID NO: 256755 - DNA, 3282 bp, Artificial Sequence
  derived and/or modified sequence
acacaggaccctaagcttagagaattgctggatgtgggaaatataggacggttggagcagagaatgattacagttgtatatgggcctgatctcgtaaatatttctcacctcaacttagtcgcattccaggaagaggtggccaaagagtggacaaatgaggtgttctcattggccacaaatctcctggctcagaacatgtccagggatgcttttctagagaaggcctatactaaactgaaattgcaggtgactcccgagggcaggattcctttgaaaaatatctataggctgttcagcgccgacagaaagcgagtagagactgccctagaagcctgttcactgcccagctctcgtaacgactctattccacaggaggattttacccctgaagtgtaccgtgtgtttcttaataacctgtgtcctaggcccgagatcgacaatatcttctcagagttcggcgcaaagagcaagccgtatctgacagtcgaccagatgatggacttcatcaacctgaagcagagagatcccaggttgaatgaaatcctctacccgcctctgaagcaagaacaggtgcaagtcctgattgagaagtatgaaccaaataattcactggccaggaaaggccagatcagtgtggatggtttcatgaggtacctcagcggggaggaaaatggcgttgtgtcccctgagaaactggatttgaacgaggatatgtcccagcctctgtctcactattttattaactcctcgcataacacctaccttactgcagggcagttagccggaaactcctctgtagaaatgtatagacaagttctgctctccggttgcaggtgcgtggagctggattgttggaagggacgcacagccgaagaggagccagttataacccatgggtttactatgacaaccgaaatatctttcaaggaagtaatcgaagcaattgctgaatgtgctttcaaaacgagcccatttcccatcctgctctcttttgaaaatcacgtcgacagccctaaacagcaagccaagatggccgaatattgtaggttaatctttggcgacgcacttttgatggagccacttgagaagtatcccctggagtcaggcgtgccgttgccctctcccatggatctcatgtataaaatccttgtgaagaacaaaaagaagtcccataagagtagcgaaggaagcgggaagaagaaactctcggaacaggcctctaatacgtacagcgactcttcctccatgttcgagccaagttcacccggtgctggcgaagctgataccgagtccgacgacgatgacgatgatgacgattgtaagaaatcatcgatggacgaagggactgccggatctgaggcaatggccaccgaggaaatgtccaacctggtgaattatatacaaccggtaaagtttgagtccttcgagatctctaagaagaggaataaaagttttgaaatgtccagttttgtagagaccaaaggactagagcagctgactaagtctcctgtggaattcgtagaatacaataagatgcaacttagcagaatttatcccaagggaacgagggtggattcctctaactatatgccccagctcttctggaatgccggatgtcaaatggtcgccttaaattttcagaccatggacctggcaatgcagatcaatatgggcatgtacgagtacaacggaaagagcgggtaccgcctgaagcctgagtttatgagacggccagataagcattttgacccctttactgaggggattgtcgacggcatcgttgccaacacactgtctgtcaaaattatctccggtcaattcctgtccgataagaaggtggggacttatgtggaggtggatatgtttggcctgccggtcgacacaaggcggaaggcttttaagactaaaaccagtcaggggaacgctgtaaatcctgtttgggaggaagagccaattgtgtttaaaaaagtcgtgctgccaaccctggcctgtttacggattgcagtgtacgaggagggcggaaagtttattggccaccgcatcctacccgtccaagccattcggcctgggtatcactatatatgtcttcgaaacgagcgtaatcaaccgctgaccctccctgcagtatttgtgtacatcgaagtcaaggactatgtgcctgacacttatgctgacgtgatcgaagcactgagcaaccctatcaggtacgtgaatctaatggagcagcgcgctaaacaactagccgcattaacattggaggacgaggaagaggtcaagaaggaagcggaccctggtgaaactccgtccgaagctccttccgaagccagaacgacccccgctgagaatggggtaaaccacaccacaacactgacccctaaaccaccttcccaggccctgcacagtcagccagccccagggtccgtcaaggcacccgctaaaacagaggatctgatccaatccgtgctgacagaggtggaggcgcagaccatcgaggagctgaagcagcagaagagcttcgttaaactacaaaagaagcactataaggagatgaaggatttggtgaagcggcatcataagaaaactacggacctcatcaaggagcatactaccaagtacaatgagatccagaatgattatctgcgcagaagggcagccctagaaaaatctgctaaaaaagactctaagaagaagagcgagccttcctctcctgatcatggatcaagcaccattgagcaggacctcgccgcactggacgccgaaatgacccagaagctcatcgacttaaaggataagcagcagcaacagctgctcaatttacggcaagagcagtattattcagagaagtatcagaagcgggagcacatcaaactcctcattcagaaactcaccgacgtggcggaagaatgtcagaataaccagcttaaaaagctaaaggaaatttgcgagaaagagaaaaaggagctaaagaaaaagatggacaagaaacgacaggaaaagattacggaggcaaagtccaaggataaaagtcaaatggaagaagaaaagacagaaatgataaggtcctatatccaggaggttgtgcagtacattaagaggctggaagaggcacaatcaaagaggcaggagaagctggttgaaaaacataaggagattcgccaacagattcttgacgaaaagccgaagggtgaaggtagtagcagcttcttgtctgagacgtgtcacgaggacccctccgtcagtcccaacttcactccccctaatcctcaagccctgaagtggtag

SEQ ID NO: 256756 - DNA, 3522 bp, Artificial Sequence
  derived and/or modified sequence
atggccggcgcccagcccggcgtgcacgccctgcagctgaagcccgtgtgcgtgagcgacagcctgaagaagggcaccaagttcgtgaagtgggacgacgacagcaccatcgtgacccccatcatcctgagaaccgacccccagggcttcttcttctactggaccgaccagaacaaggagaccgagctgctggacctgagcctggtgaaggacgccagatgcggcagacacgccaaggcccccaaggaccccaagctgagagagctgctggacgtgggcaacatcggcagactggagcagagaatgatcaccgtggtgtacggccccgacctggtgaacatcagccacctgaacctggtggccttccaggaggaggtggccaaggagtggaccaacgaggtgttcagcctggccaccaacctgctggcccagaacatgagcagagacgccttcctggagaaggcctacaccaagctgaagctgcaggtgacccccgagggcagaatccccctgaagaacatctacagactgttcagcgccgacagaaagagagtggagaccgccctggaggcctgcagcctgcccagcagcagaaacgacagcatcccccaggaggacttcacccccgaggtgtacagagtgttcctgaacaacctgtgccccagacccgagatcgacaacatcttcagcgagttcggcgccaagagcaagccctacctgaccgtggaccagatgatggacttcatcaacctgaagcagagagaccccagactgaacgagatcctgtacccccccctgaagcaggagcaggtgcaggtgctgatcgagaagtacgagcccaacaacagcctggccagaaagggccagatcagcgtggacggcttcatgagatacctgagcggcgaggagaacggcgtggtgagccccgagaagctggacctgaacgaggacatgagccagcccctgagccactacttcatcaacagcagccacaacacctacctgaccgccggccagctggccggcaacagcagcgtggagatgtacagacaggtgctgctgagcggctgcagatgcgtggagctggactgctggaagggcagaaccgccgaggaggagcccgtgatcacccacggcttcaccatgaccaccgagatcagcttcaaggaggtgatcgaggccatcgccgagtgcgccttcaagaccagccccttccccatcctgctgagcttcgagaaccacgtggacagccccaagcagcaggccaagatggccgagtactgcagactgatcttcggcgacgccctgctgatggagcccctggagaagtaccccctggagagcggcgtgcccctgcccagccccatggacctgatgtacaagatcctggtgaagaacaagaagaagagccacaagagcagcgagggcagcggcaagaagaagctgagcgagcaggccagcaacacctacagcgacagcagcagcatgttcgagcccagcagccccggcgccggcgaggccgacaccgagagcgacgacgacgacgacgacgacgactgcaagaagagcagcatggacgagggcaccgccggcagcgaggccatggccaccgaggagatgagcaacctggtgaactacatccagcccgtgaagttcgagagcttcgagatcagcaagaagagaaacaagagcttcgagatgagcagcttcgtggagaccaagggcctggagcagctgaccaagagccccgtggagttcgtggagtacaacaagatgcagctgagcagaatctaccccaagggcaccagagtggacagcagcaactacatgccccagctgttctggaacgccggctgccagatggtggccctgaacttccagaccatggacctggccatgcagatcaacatgggcatgtacgagtacaacggcaagagcggctacagactgaagcccgagttcatgagaagacccgacaagcacttcgaccccttcaccgagggcatcgtggacggcatcgtggccaacaccctgagcgtgaagatcatcagcggccagttcctgagcgacaagaaggtgggcacctacgtggaggtggacatgttcggcctgcccgtggacaccagaagaaaggccttcaagaccaagaccagccagggcaacgccgtgaaccccgtgtgggaggaggagcccatcgtgttcaagaaggtggtgctgcccaccctggcctgcctgagaatcgccgtgtacgaggagggcggcaagttcatcggccacagaatcctgcccgtgcaggccatcagacccggctaccactacatctgcctgagaaacgagagaaaccagcccctgaccctgcccgccgtgttcgtgtacatcgaggtgaaggactacgtgcccgacacctacgccgacgtgatcgaggccctgagcaaccccatcagatacgtgaacctgatggagcagagagccaagcagctggccgccctgaccctggaggacgaggaggaggtgaagaaggaggccgaccccggcgagacccccagcgaggcccccagcgaggccagaaccacccccgccgagaacggcgtgaaccacaccaccaccctgacccccaagccccccagccaggccctgcacagccagcccgcccccggcagcgtgaaggcccccgccaagaccgaggacctgatccagagcgtgctgaccgaggtggaggcccagaccatcgaggagctgaagcagcagaagagcttcgtgaagctgcagaagaagcactacaaggagatgaaggacctggtgaagagacaccacaagaagaccaccgacctgatcaaggagcacaccaccaagtacaacgagatccagaacgactacctgagaagaagagccgccctggagaagagcgccaagaaggacagcaagaagaagagcgagcccagcagccccgaccacggcagcagcaccatcgagcaggacctggccgccctggacgccgagatgacccagaagctgatcgacctgaaggacaagcagcagcagcagctgctgaacctgagacaggagcagtactacagcgagaagtaccagaagagagagcacatcaagctgctgatccagaagctgaccgacgtggccgaggagtgccagaacaaccagctgaagaagctgaaggagatctgcgagaaggagaagaaggagctgaagaagaagatggacaagaagagacaggagaagatcaccgaggccaagagcaaggacaagagccagatggaggaggagaagaccgagatgatcagaagctacatccaggaggtggtgcagtacatcaagagactggaggaggcccagagcaagagacaggagaagctggtggagaagcacaaggagatcagacagcagatcctggacgagaagcccaagggcgagggcagcagcagcttcctgagcgagacctgccacgaggaccccagcgtgagccccaacttcaccccccccaacccccaggccctgaagtggtag

SEQ ID NO: 256757 - DNA, 3282 bp, Artificial Sequence
  derived and/or modified sequence
acccaggaccccaagctgagagagctgctggacgtgggcaacatcggcagactggagcagagaatgatcaccgtggtgtacggccccgacctggtgaacatcagccacctgaacctggtggccttccaggaggaggtggccaaggagtggaccaacgaggtgttcagcctggccaccaacctgctggcccagaacatgagcagagacgccttcctggagaaggcctacaccaagctgaagctgcaggtgacccccgagggcagaatccccctgaagaacatctacagactgttcagcgccgacagaaagagagtggagaccgccctggaggcctgcagcctgcccagcagcagaaacgacagcatcccccaggaggacttcacccccgaggtgtacagagtgttcctgaacaacctgtgccccagacccgagatcgacaacatcttcagcgagttcggcgccaagagcaagccctacctgaccgtggaccagatgatggacttcatcaacctgaagcagagagaccccagactgaacgagatcctgtacccccccctgaagcaggagcaggtgcaggtgctgatcgagaagtacgagcccaacaacagcctggccagaaagggccagatcagcgtggacggcttcatgagatacctgagcggcgaggagaacggcgtggtgagccccgagaagctggacctgaacgaggacatgagccagcccctgagccactacttcatcaacagcagccacaacacctacctgaccgccggccagctggccggcaacagcagcgtggagatgtacagacaggtgctgctgagcggctgcagatgcgtggagctggactgctggaagggcagaaccgccgaggaggagcccgtgatcacccacggcttcaccatgaccaccgagatcagcttcaaggaggtgatcgaggccatcgccgagtgcgccttcaagaccagccccttccccatcctgctgagcttcgagaaccacgtggacagccccaagcagcaggccaagatggccgagtactgcagactgatcttcggcgacgccctgctgatggagcccctggagaagtaccccctggagagcggcgtgcccctgcccagccccatggacctgatgtacaagatcctggtgaagaacaagaagaagagccacaagagcagcgagggcagcggcaagaagaagctgagcgagcaggccagcaacacctacagcgacagcagcagcatgttcgagcccagcagccccggcgccggcgaggccgacaccgagagcgacgacgacgacgacgacgacgactgcaagaagagcagcatggacgagggcaccgccggcagcgaggccatggccaccgaggagatgagcaacctggtgaactacatccagcccgtgaagttcgagagcttcgagatcagcaagaagagaaacaagagcttcgagatgagcagcttcgtggagaccaagggcctggagcagctgaccaagagccccgtggagttcgtggagtacaacaagatgcagctgagcagaatctaccccaagggcaccagagtggacagcagcaactacatgccccagctgttctggaacgccggctgccagatggtggccctgaacttccagaccatggacctggccatgcagatcaacatgggcatgtacgagtacaacggcaagagcggctacagactgaagcccgagttcatgagaagacccgacaagcacttcgaccccttcaccgagggcatcgtggacggcatcgtggccaacaccctgagcgtgaagatcatcagcggccagttcctgagcgacaagaaggtgggcacctacgtggaggtggacatgttcggcctgcccgtggacaccagaagaaaggccttcaagaccaagaccagccagggcaacgccgtgaaccccgtgtgggaggaggagcccatcgtgttcaagaaggtggtgctgcccaccctggcctgcctgagaatcgccgtgtacgaggagggcggcaagttcatcggccacagaatcctgcccgtgcaggccatcagacccggctaccactacatctgcctgagaaacgagagaaaccagcccctgaccctgcccgccgtgttcgtgtacatcgaggtgaaggactacgtgcccgacacctacgccgacgtgatcgaggccctgagcaaccccatcagatacgtgaacctgatggagcagagagccaagcagctggccgccctgaccctggaggacgaggaggaggtgaagaaggaggccgaccccggcgagacccccagcgaggcccccagcgaggccagaaccacccccgccgagaacggcgtgaaccacaccaccaccctgacccccaagccccccagccaggccctgcacagccagcccgcccccggcagcgtgaaggcccccgccaagaccgaggacctgatccagagcgtgctgaccgaggtggaggcccagaccatcgaggagctgaagcagcagaagagcttcgtgaagctgcagaagaagcactacaaggagatgaaggacctggtgaagagacaccacaagaagaccaccgacctgatcaaggagcacaccaccaagtacaacgagatccagaacgactacctgagaagaagagccgccctggagaagagcgccaagaaggacagcaagaagaagagcgagcccagcagccccgaccacggcagcagcaccatcgagcaggacctggccgccctggacgccgagatgacccagaagctgatcgacctgaaggacaagcagcagcagcagctgctgaacctgagacaggagcagtactacagcgagaagtaccagaagagagagcacatcaagctgctgatccagaagctgaccgacgtggccgaggagtgccagaacaaccagctgaagaagctgaaggagatctgcgagaaggagaagaaggagctgaagaagaagatggacaagaagagacaggagaagatcaccgaggccaagagcaaggacaagagccagatggaggaggagaagaccgagatgatcagaagctacatccaggaggtggtgcagtacatcaagagactggaggaggcccagagcaagagacaggagaagctggtggagaagcacaaggagatcagacagcagatcctggacgagaagcccaagggcgagggcagcagcagcttcctgagcgagacctgccacgaggaccccagcgtgagccccaacttcaccccccccaacccccaggccctgaagtggtag

SEQ ID NO: 256758 - protein, 113 aa, Artificial Sequence
  derived and/or modified sequence
MTGYTPDEKLRLQQLRELRRRWLKDQELSPREPVLPPQKMGPMEKFWNKFLENKSPWRKMVHGVYKKSIFVFTHVLVPVWIIHYYMKYHVSGDTILETGEVIPPMKEFPDQHH

SEQ ID NO: 256759 - DNA, 342 bp, Artificial Sequence
  derived and/or modified sequence
atgaccggctacacccccgacgagaagctgagactgcagcagctgagagagctgagaagaagatggctgaaggaccaggagctgagccccagagagcccgtgctgcccccccagaagatgggccccatggagaagttctggaacaagttcctggagaacaagagcccctggagaaagatggtgcacggcgtgtacaagaagagcatcttcgtgttcacccacgtgctggtgcccgtgtggatcatccactactacatgaagtaccacgtgagcggcgacaccatcctggagaccggcgaggtgatcccccccatgaaggagttccccgaccagcaccactag

SEQ ID NO: 256760 - DNA, 342 bp, Artificial Sequence
  derived and/or modified sequence
atgacaggttacacaccggatgaaaagcttagattgcagcagctgcgggagcttcgccggcgctggctcaaagaccaggagctttccccccgggagccagtgttgccgccccagaagatgggccctatggagaaattctggaacaagttcctagaaaacaaatccccctggcgaaagatggttcacggagtctacaagaaaagcatttttgtatttacccatgttttagtaccggtgtggattatacactattatatgaagtatcatgtgagcggggacaccatcttggaaacgggcgaggtgattcctcctatgaaagagttccctgaccagcaccactag

SEQ ID NO: 256761 - DNA, 342 bp, Artificial Sequence
  derived and/or modified sequence
atgacaggctacaccccagatgagaagctgcggctgcagcagctgcgggagctgcggcggcgctggctgaaggaccaggagctgagcccccgggagcctgtgctgcccccccagaagatgggccccatggagaagttctggaacaagttcctggagaacaagagcccctggaggaagatggtgcacggcgtgtacaagaagagcatctttgtgttcacccacgtgctggtgcctgtgtggatcatccactactacatgaagtaccacgtgtctggggacaccatcctggagaccggggaggtgattcctcccatgaaggagttcccagaccagcaccactag

SEQ ID NO: 256762 - DNA, 666 bp, Artificial Sequence
  derived and/or modified sequence
gttcccgcaaggtcgctttgcagagcgggagcgcgcttaagtaactagtccgtagttcgagggtgcgccgtgtccttttgcgttggtaccagcggcgacatgacggggtacactccggatgagaaactgcggctgcagcagctgcgagagctgagaaggcgatggctgaaggaccaggagctgagccctcgggagccggtgctgcccccacagaagatggggcctatggagaaattctggaataaatttttggagaataaatccccttggaggaaaatggtccatggggtatacaaaaagagtatctttgttttcactcatgtacttgtacctgtctggattattcattattacatgaagtatcatgtttctggtgatacaattctggagactggagaagtaattccaccaatgaaagaatttcctgatcaacatcattaaagattatgtaaaaagttaaaaggcttatgagcctaagtttgttcctatattaccatatttactgaattttctggaaaagtaactttaataaagtttaatctcagaaattgtcatatctgttttcaagcattgtacaatttgagactgagtaatttaacaataagtaaaaagtggacatgctaaacaaatatgagagactacctactttttctggtcattcttgac

SEQ ID NO: 256763 - DNA, 342 bp, Artificial Sequence
  derived and/or modified sequence
atgaccggctacacccccgacgagaagctgcggctgcagcagctgcgcgagctgaggcgaaggtggctcaaggaccaggagctgtccccacgggaacccgtgctgccgcctcagaaaatgggtcctatggaaaagttctggaataagtttctagagaacaagtcgccctggcggaagatggtgcacggggtgtacaaaaaatctatttttgtctttacgcatgtcttggtgcctgtttggattattcattactatatgaaataccacgtgagcggcgacactattctggaaaccggagaagtgatccctccaatgaaggagtttcccgatcaacaccattag

SEQ ID NO: 256764 - DNA, 342 bp, Artificial Sequence
  derived and/or modified sequence
atgaccggctacacccccgatgagaaactaagactgcaacagttgcgcgaactgaggcgtagatggttgaaagatcaggagttgtcacccagggaacccgtgcttcctcctcagaagatgggcccaatggagaagttttggaataaatttctcgagaacaagtcaccatggagaaagatggtccacggagtatacaagaaatctatatttgtgtttactcacgtcctggtcccagtctggatcatccactactacatgaaataccatgtctcaggggataccatccttgaaaccggagaggtgattcctcctatgaaggaatttcctgatcagcatcattag

SEQ ID NO: 256765 - DNA, 213 bp, Artificial Sequence
  derived and/or modified sequence
atgaacggccccgaggacctgcccaagagctacgactacgacctgatcatcatcggcggcggcagcggcggcctggccgccgccaaggaggccgcccagtacggcaagaaggtgatggtgctggacttcgtgacccccacccccctgggcaccagatggggcctgggcggcacctgcgtgaacgtgggctgcatccccaagaagctgatgtag

SEQ ID NO: 256766 - DNA, 315 bp, Artificial Sequence
  derived and/or modified sequence
atgaacggccccgaggacctgcccaagagctacgactacgacctgatcatcatcggcggcggcagcggcggcctggccgccgccaaggaggccgcccagtacggcaagaaggtgatggtgctggacttcgtgacccccacccccctgggcaccagatggggcctgggcggcacctgcgtgaacgtgggctgcatccccaagaagctgatgcaccaggccgccctgctgggccaggccctgcaggacagcagaaactacggctggaaggtggaggagaccgtgaagcacgactgggacagaatgatcgaggcctag

SEQ ID NO: 256767 - DNA, 528 bp, Artificial Sequence
  derived and/or modified sequence
atgaacggccccgaggacctgcccaagagctacgactacgacctgatcatcatcggcggcggcagcggcggcctggccgccgccaaggaggccgcccagtacggcaagaaggtgatggtgctggacttcgtgacccccacccccctgggcaccagatggggcctgggcggcacctgcgtgaacgtgggctgcatccccaagaagctgatgcaccaggccgccctgctgggccaggccctgcaggacagcagaaactacggctggaaggtggaggagaccgtgaagcacgactgggacagaatgatcgaggccgtgcagaaccacatcggcagcctgaactggggctacagagtggccctgagagagaagaaggtggtgtacgagaacgcctacggccagttcatcggcccccacagaatcaaggccaccaacaacaagggcaaggagaagatctacagcgccgagagattcctgatcgccaccggcgagagacccagatacctgggcatccccggcgacaaggagtag

SEQ ID NO: 256768 - DNA, 162 bp, Artificial Sequence
  derived and/or modified sequence
atgaacggccccgaggacctgcccaagagctacgactacgacctgatcatcatcggcggcggcagcggcggcctggccgccgccaaggaggccgcccagtacggcaagaaggtgatggtgctggacttcgtgacccccacccccctgggcaccagatggtag

SEQ ID NO: 256769 - DNA, 219 bp, Artificial Sequence
  derived and/or modified sequence
atgaacggccccgaggacctgcccaagagctacgactacgacctgatcatcatcggcggcggcagcggcggcctggccgccgccaaggaggccgcccagtacggcaagaaggtgatggtgctggacttcgtgacccccacccccctgggcaccagatggggcctgggcggcacctgcgtgaacgtgggctgcatccccaagaagctgatgcaccagtag

SEQ ID NO: 256770 - DNA, 213 bp, Artificial Sequence
  derived and/or modified sequence
atgaacggcccagaggacttgccaaaatcttatgattacgatctcatcataataggtggaggttctggggggcttgccgcagccaaggaagccgcccaatatggcaaaaaagtgatggtgctggactttgttacacccacacctctgggtactcggtggggactcggcggaacttgtgtgaacgtcggctgcatcccgaagaagttgatgtag

SEQ ID NO: 256771 - DNA, 315 bp, Artificial Sequence
  derived and/or modified sequence
atgaatggacccgaggatctgcctaagtcttacgactacgacctgatcattattggcggcggctcgggaggcctcgcggcagccaaggaggccgcacagtacggaaaaaaagtaatggtgctagactttgtaacacctaccccactgggtacgcgatggggcctagggggaacatgtgttaacgtgggttgcattccaaagaaactgatgcatcaggccgctcttctggggcaggccttacaggattcccggaactacggttggaaggtcgaagagactgtgaaacacgactgggacaggatgattgaagcctag

SEQ ID NO: 256772 - DNA, 528 bp, Artificial Sequence
  derived and/or modified sequence
atgaacggtccagaggaccttcctaagtcctatgactatgatcttatcattatcgggggtgggagcggagggttagctgccgccaaagaggctgcccagtacggaaagaaggtaatggtcctggactttgtgactccgacccccctgggcactcgttgggggctgggggggacctgcgtgaatgtggggtgcattccaaagaagctgatgcaccaggctgccctcctcggacaagcattgcaagattctagaaattacgggtggaaggttgaagagaccgtgaagcacgactgggatcgaatgatagaggcagttcagaatcatataggcagcttgaactggggctacagggtcgccctaagggaaaagaaggtagtgtacgaaaatgcatacggtcagtttattggcccacatcgcattaaggcaacgaataataaaggtaaggagaaaatttactcagcggaaagatttctgattgctacaggggagaggccaagatacctgggcattccaggtgacaaggaatag

SEQ ID NO: 256773 - DNA, 162 bp, Artificial Sequence
  derived and/or modified sequence
atgaatggccctgaagacttgccgaagagttatgactacgatctgatcatcataggaggggggtccggcgggttggcagcggcaaaagaggcggctcagtatggaaagaaagtgatggtcctggactttgtgactccgacacccctggggacacgatggtag

SEQ ID NO: 256774 - DNA, 219 bp, Artificial Sequence
  derived and/or modified sequence
atgaatgggcctgaggaccttcctaagagctatgattatgacctaataattataggaggcggaagtggcggcctcgctgccgctaaggaggccgcacagtatggcaagaaagtgatggtgttggatttcgtgacccctacaccacttggcacaaggtggggcctggggggcacttgcgtgaacgtcggctgtattcccaagaagcttatgcaccagtag

SEQ ID NO: 256775 - DNA, 213 bp, Artificial Sequence
  derived and/or modified sequence
atgaatggacctgaggacctgcccaagagctatgactatgacctgatcatcatcggcggcggcagcggcggcctggccgccgccaaggaggccgcccagtatggcaagaaggtgatggtgctggactttgtgacccccacccccctgggcacccgctggggcctgggcggcacctgtgtgaatgtgggctgcatccccaagaagctgatgtag

SEQ ID NO: 256776 - DNA, 315 bp, Artificial Sequence
  derived and/or modified sequence
atgaatggacctgaggacctgcccaagagctatgactatgacctgatcatcatcggcggcggcagcggcggcctggccgccgccaaggaggccgcccagtatggcaagaaggtgatggtgctggactttgtgacccccacccccctgggcacccgctggggcctgggcggcacctgtgtgaatgtgggctgcatccccaagaagctgatgcaccaggccgccctgctgggccaggccctgcaggacagcaggaactacggctggaaggtggaggagaccgtgaagcatgactgggacaggatgattgaggcctag

SEQ ID NO: 256777 - DNA, 528 bp, Artificial Sequence
  derived and/or modified sequence
atgaatggacctgaggacctgcccaagagctatgactatgacctgatcatcatcggcggcggcagcggcggcctggccgccgccaaggaggccgcccagtatggcaagaaggtgatggtgctggactttgtgacccccacccccctgggcacccgctggggcctgggcggcacctgtgtgaatgtgggctgcatccccaagaagctgatgcaccaggccgccctgctgggccaggccctgcaggacagcaggaactacggctggaaggtggaggagaccgtgaagcatgactgggacaggatgattgaggccgtgcagaaccacatcggcagcctgaactggggctacagagtggccctgcgggagaagaaggtggtgtatgaaaatgcctacggccagttcatcggcccccaccgcatcaaggccaccaacaacaagggcaaggagaagatctacagcgctgagcgcttcctgattgccactggagagcggccccgctacctgggcatccctggggacaaggagtag

SEQ ID NO: 256778 - DNA, 162 bp, Artificial Sequence
  derived and/or modified sequence
atgaatggacctgaggacctgcccaagagctatgactatgacctgatcatcatcggcggcggcagcggcggcctggccgccgccaaggaggccgcccagtatggcaagaaggtgatggtgctggactttgtgacccccacccccctgggcacccgctggtag

SEQ ID NO: 256779 - DNA, 219 bp, Artificial Sequence
  derived and/or modified sequence
atgaatggacctgaggacctgcccaagagctatgactatgacctgatcatcatcggcggcggcagcggcggcctggccgccgccaaggaggccgcccagtatggcaagaaggtgatggtgctggactttgtgacccccacccccctgggcacccgctggggcctgggcggcacctgtgtgaatgtgggctgcatccccaagaagctgatgcaccagtag

SEQ ID NO: 256780 - DNA, 213 bp, Artificial Sequence
  derived and/or modified sequence
atgaacggccccgaggacctgcccaagagctacgactacgacctgatcataatcggcgggggaagcggtggcttagcggccgccaaagaggccgctcaatacggtaaaaaggtcatggtcctcgattttgtaaccccaacgcctctgggaacccgctggggtctgggcgggacctgcgttaatgtggggtgtatcccgaagaagttgatgtag

SEQ ID NO: 256781 - DNA, 315 bp, Artificial Sequence
  derived and/or modified sequence
atgaacggccccgaggacctgcccaagagctacgactacgacctgataataatcgggggcgggtccggaggcctcgcggcggccaaggaagctgctcagtatgggaaaaaagtgatggtgctcgacttcgttacccccactccattaggaacaaggtgggggctgggcggtacctgtgtcaacgtgggatgcatcccgaagaaactaatgcaccaggcagctctgctggggcaggctttgcaggattcccgaaattacggctggaaggtggaagagacagtgaaacacgattgggacagaatgatcgaagcttag

SEQ ID NO: 256782 - DNA, 528 bp, Artificial Sequence
  derived and/or modified sequence
atgaacggccccgaggacctgcccaagagctacgactacgacctgattatcatcggcggcggatccggaggcttagctgcagccaaggaagcagcccagtacgggaagaaagtgatggtactagattttgtaacccccacccctcttggtaccagatgggggctgggtggaacatgcgtgaacgtcggctgtattcccaaaaaactcatgcaccaggcagcactgttaggccaggccctgcaggattcaagaaattacggctggaaggtggaagagacggtgaaacacgattgggatcgaatgatcgaggccgtgcaaaatcatatcgggagtttaaactggggttacagagtggccctgcgggagaagaaggtagtctatgaaaatgcatacggacagtttattggacctcatcgcatcaaagccacaaacaataagggcaaggagaaaatttattcggccgagcgcttccttatcgcaacaggcgagcggccacgctacctggggataccaggagacaaggaatag

SEQ ID NO: 256783 - DNA, 162 bp, Artificial Sequence
  derived and/or modified sequence
atgaacggccccgaggacctgcccaagagctacgactacgacctgattatcattggtggcggcagcggcgggcttgcggcagccaaggaagcggcacagtacggcaagaaggtgatggtgctcgacttcgtcaccccaacccccctgggcacccgctggtag

SEQ ID NO: 256784 - DNA, 219 bp, Artificial Sequence
  derived and/or modified sequence
atgaacggccccgaggacctgcccaagagctacgactacgacctgattataattggaggggggtctggcggactggccgccgccaaggaagccgctcagtacgggaaaaaggtgatggtgctagacttcgtcacaccaaccccacttggaacccgttggggcctgggaggcacctgtgtaaacgtcggctgcattcctaaaaagcttatgcaccagtag

SEQ ID NO: 256785 - DNA, 213 bp, Artificial Sequence
  derived and/or modified sequence
atgaacggtccagaagatctgcctaaatcttatgactatgacttgatcatcattggagggggttcggggggactcgctgcggctaaggaggccgcacagtacgggaaaaaagtgatggtgcttgacttcgtgacacctacaccactcggaacccgatgggggctggggggaacttgcgtgaatgtgggctgcatacctaaaaaactgatgtag

SEQ ID NO: 256786 - DNA, 315 bp, Artificial Sequence
  derived and/or modified sequence
atgaacggcccagaagatctgcccaaatcgtacgactatgatctgataattatcggcggtgggtccggcggactggctgcggcaaaggaagcagcccagtatggcaaaaaagtcatggtgctggatttcgtgacaccgacaccactgggcacccgctggggactgggcggaacctgcgtcaatgtagggtgcattcccaagaaactcatgcatcaggccgcactcctcggccaggccctgcaggatagcagaaactatggatggaaagtcgaggagactgtaaagcacgactgggatagaatgattgaagcctag

SEQ ID NO: 256787 - DNA, 528 bp, Artificial Sequence
  derived and/or modified sequence
atgaacggacccgaagacctgccgaaatcctatgattatgatctgatcatcatcggagggggaagtggcggactagctgcagcgaaggaggccgcacaatacggtaaaaaggtgatggtacttgattttgtaactcccacacccctcggcacgcgctggggactggggggaacctgtgtgaacgtggggtgtatccctaaaaaattgatgcaccaggctgcgcttttaggccaggcccttcaggatagtcgaaattatgggtggaaagtcgaagaaacagtaaaacatgactgggacagaatgatcgaggcagtgcagaatcatatcggatccctaaattggggatacagggttgccttgcgggagaaaaaagttgtatacgaaaatgcctacggtcaattcattggtcctcaccgcattaaagcgaccaataataaaggcaaggaaaagatttactccgccgaaaggttcttaattgcgactggcgaacgtcctaggtacctcggcatccctggcgacaaggagtag

SEQ ID NO: 256788 - DNA, 162 bp, Artificial Sequence
  derived and/or modified sequence
atgaacggaccagaagacctgcctaagtcctacgattatgaccttattattattggcggtggaagtgggggactcgccgctgctaaggaggccgctcagtatggcaaaaaagtcatggtcctggacttcgtcactcctacccctttaggcacacgctggtag

SEQ ID NO: 256789 - DNA, 219 bp, Artificial Sequence
  derived and/or modified sequence
atgaacggccctgaggatctgccaaaatcttacgattatgacctcataatcattggtgggggatctggcggacttgcagcggctaaggaggccgctcagtacggtaaaaaggtgatggtgcttgattttgtgacacccacaccactgggtacccgctggggactgggtggtacctgcgtgaatgtgggatgtatcccaaagaagctcatgcatcaatag

SEQ ID NO: 256790 - protein, 863 aa, Artificial Sequence
  derived and/or modified sequence
MSSPASTPSRRGSRRGRATPAQTPRSEDARSSPSQRRRGEDSTSTGELQPMPTSPGVDLQSPAAQDVLFSSPPQMHSSAIPLDFDVSSPLTYGTPSSRVEGTPRSGVRGTPVRQRPDLGSAQKGLQVDLQSDGAAAEDIVASEQSLGQKLVIWGTDVNVAACKENFQRFLQRFIDPLAKEEENVGIDITEPLYMQRLGEINVIGEPFLNVNCEHIKSFDKNLYRQLISYPQEVIPTFDMAVNEIFFDRYPDSILEHQIQVRPFNALKTKNMRNLNPEDIDQLITISGMVIRTSQLIPEMQEAFFQCQVCAHTTRVEMDRGRIAEPSVCGRCHTTHSMALIHNRSLFSDKQMIKLQESPEDMPAGQTPHTVILFAHNDLVDKVQPGDRVNVTGIYRAVPIRVNPRVSNVKSVYKTHIDVIHYRKTDAKRLHGLDEEAEQKLFSEKRVELLKELSRKPDIYERLASALAPSIYEHEDIKKGILLQLFGGTRKDFSHTGRGKFRAEINILLCGDPGTSKSQLLQYVYNLVPRGQYTSGKGSSAVGLTAYVMKDPETRQLVLQTGALVLSDNGICCIDEFDKMNESTRSVLHEVMEQQTLSIAKAGIICQLNARTSVLAAANPIESQWNPKKTTIENIQLPHTLLSRFDLIFLLLDPQDEAYDRRLAHHLVALYYQSEEQAEEELLDMAVLKDYIAYAHSTIMPRLSEEASQALIEAYVDMRKIGSSRGMVSAYPRQLESLIRLAEAHAKVRLSNKVEAIDVEEAKRLHREALKQSATDPRTGIVDISILTTGMSATSRKRKEELAEALKKLILSKGKTPALKYQQLFEDIRGQSDIAITKDMFEEALRALADDDFLTVTGKTVRLL

SEQ ID NO: 256791 - protein, 823 aa, Artificial Sequence
  derived and/or modified sequence
MPGHLPLRDVEARIPPPRGSCSRCQPRLEWTCRALLRRTCCFPALPKCILQLSLLTLMLEGTPRSGVRGTPVRQRPDLGSAQKGLQVDLQSDGAAAEDIVASEQSLGQKLVIWGTDVNVAACKENFQRFLQRFIDPLAKEEENVGIDITEPLYMQRLGEINVIGEPFLNVNCEHIKSFDKNLYRQLISYPQEVIPTFDMAVNEIFFDRYPDSILEHQIQVRPFNALKTKNMRNLNPEDIDQLITISGMVIRTSQLIPEMQEAFFQCQVCAHTTRVEMDRGRIAEPSVCGRCHTTHSMALIHNRSLFSDKQMIKLQESPEDMPAGQTPHTVILFAHNDLVDKVQPGDRVNVTGIYRAVPIRVNPRVSNVKSVYKTHIDVIHYRKTDAKRLHGLDEEAEQKLFSEKRVELLKELSRKPDIYERLASALAPSIYEHEDIKKGILLQLFGGTRKDFSHTGRGKFRAEINILLCGDPGTSKSQLLQYVYNLVPRGQYTSGKGSSAVGLTAYVMKDPETRQLVLQTGALVLSDNGICCIDEFDKMNESTRSVLHEVMEQQTLSIAKAGIICQLNARTSVLAAANPIESQWNPKKTTIENIQLPHTLLSRFDLIFLLLDPQDEAYDRRLAHHLVALYYQSEEQAEEELLDMAVLKDYIAYAHSTIMPRLSEEASQALIEAYVDMRKIGSSRGMVSAYPRQLESLIRLAEAHAKVRLSNKVEAIDVEEAKRLHREALKQSATDPRTGIVDISILTTGMSATSRKRKEELAEALKKLILSKGKTPALKYQQLFEDIRGQSDIAITKDMFEEALRALADDDFLTVTGKTVRLL

SEQ ID NO: 256792 - DNA, 2592 bp, Artificial Sequence
  derived and/or modified sequence
atgagcagccccgccagcacccccagcagaagaggcagcagaagaggcagagccacccccgcccagacccccagaagcgaggacgccagaagcagccccagccagagaagaagaggcgaggacagcaccagcaccggcgagctgcagcccatgcccaccagccccggcgtggacctgcagagccccgccgcccaggacgtgctgttcagcagccccccccagatgcacagcagcgccatccccctggacttcgacgtgagcagccccctgacctacggcacccccagcagcagagtggagggcacccccagaagcggcgtgagaggcacccccgtgagacagagacccgacctgggcagcgcccagaagggcctgcaggtggacctgcagagcgacggcgccgccgccgaggacatcgtggccagcgagcagagcctgggccagaagctggtgatctggggcaccgacgtgaacgtggccgcctgcaaggagaacttccagagattcctgcagagattcatcgaccccctggccaaggaggaggagaacgtgggcatcgacatcaccgagcccctgtacatgcagagactgggcgagatcaacgtgatcggcgagcccttcctgaacgtgaactgcgagcacatcaagagcttcgacaagaacctgtacagacagctgatcagctacccccaggaggtgatccccaccttcgacatggccgtgaacgagatcttcttcgacagataccccgacagcatcctggagcaccagatccaggtgagacccttcaacgccctgaagaccaagaacatgagaaacctgaaccccgaggacatcgaccagctgatcaccatcagcggcatggtgatcagaaccagccagctgatccccgagatgcaggaggccttcttccagtgccaggtgtgcgcccacaccaccagagtggagatggacagaggcagaatcgccgagcccagcgtgtgcggcagatgccacaccacccacagcatggccctgatccacaacagaagcctgttcagcgacaagcagatgatcaagctgcaggagagccccgaggacatgcccgccggccagaccccccacaccgtgatcctgttcgcccacaacgacctggtggacaaggtgcagcccggcgacagagtgaacgtgaccggcatctacagagccgtgcccatcagagtgaaccccagagtgagcaacgtgaagagcgtgtacaagacccacatcgacgtgatccactacagaaagaccgacgccaagagactgcacggcctggacgaggaggccgagcagaagctgttcagcgagaagagagtggagctgctgaaggagctgagcagaaagcccgacatctacgagagactggccagcgccctggcccccagcatctacgagcacgaggacatcaagaagggcatcctgctgcagctgttcggcggcaccagaaaggacttcagccacaccggcagaggcaagttcagagccgagatcaacatcctgctgtgcggcgaccccggcaccagcaagagccagctgctgcagtacgtgtacaacctggtgcccagaggccagtacaccagcggcaagggcagcagcgccgtgggcctgaccgcctacgtgatgaaggaccccgagaccagacagctggtgctgcagaccggcgccctggtgctgagcgacaacggcatctgctgcatcgacgagttcgacaagatgaacgagagcaccagaagcgtgctgcacgaggtgatggagcagcagaccctgagcatcgccaaggccggcatcatctgccagctgaacgccagaaccagcgtgctggccgccgccaaccccatcgagagccagtggaaccccaagaagaccaccatcgagaacatccagctgccccacaccctgctgagcagattcgacctgatcttcctgctgctggacccccaggacgaggcctacgacagaagactggcccaccacctggtggccctgtactaccagagcgaggagcaggccgaggaggagctgctggacatggccgtgctgaaggactacatcgcctacgcccacagcaccatcatgcccagactgagcgaggaggccagccaggccctgatcgaggcctacgtggacatgagaaagatcggcagcagcagaggcatggtgagcgcctaccccagacagctggagagcctgatcagactggccgaggcccacgccaaggtgagactgagcaacaaggtggaggccatcgacgtggaggaggccaagagactgcacagagaggccctgaagcagagcgccaccgaccccagaaccggcatcgtggacatcagcatcctgaccaccggcatgagcgccaccagcagaaagagaaaggaggagctggccgaggccctgaagaagctgatcctgagcaagggcaagacccccgccctgaagtaccagcagctgttcgaggacatcagaggccagagcgacatcgccatcaccaaggacatgttcgaggaggccctgagagccctggccgacgacgacttcctgaccgtgaccggcaagaccgtgagactgctgtag

SEQ ID NO: 256793 - DNA, 2592 bp, Artificial Sequence
  derived and/or modified sequence
atgtccagtcctgcgtctactccttcaaggcgcggctcaaggcggggtagagcaactccagctcagactccgagatctgaagacgccagatccagtcctagtcagaggcgacgtggagaagacagcacctctacaggcgaactacagcccatgcccacttccccaggagtcgatcttcaatctccggccgcccaggatgtactgttttccagccctcctcaaatgcactctagcgctattcccctagacttcgatgtatcctcgcctcttacgtatgggacgcccagttcccgggtggaaggaactccccggagtggggtgcggggaacacccgtccgccagcgtcctgatctcggatccgcccaaaaaggcctccaggtggatttacagagcgatggcgccgctgccgaggatattgttgcttcagaacagtcactggggcagaaactcgtcatctgggggaccgatgtaaacgttgcagcatgcaaagaaaactttcaacgttttctacagcgttttatagaccctctagccaaggaggaggaaaatgtcggcatagatatcactgagcctctgtacatgcaaagattgggcgaaatcaatgtaattggagaaccttttctcaacgtgaattgtgagcatattaagagcttcgacaagaatctgtaccggcagctcataagctatccccaagaggtaatccccaccttcgatatggccgtcaatgaaattttcttcgataggtaccctgactccatcctggagcaccagattcaggtcaggccctttaacgccctgaaaacgaagaacatgcgcaatttaaatcctgaggacatagaccaactgattacaatttcgggaatggtgattaggactagtcagctaattccggagatgcaggaagccttcttccaatgccaggtatgcgcccacaccaccagggtggagatggaccgcggacgaatcgccgagcctagcgtgtgtggccggtgtcacaccactcacagcatggcactcattcataataggtccctgttttcagacaagcaaatgattaagctgcaagagagccctgaggatatgcccgcaggtcagacccctcataccgtgattttgttcgctcacaatgatcttgttgataaagtccaacctggagacagagtcaacgtgaccggcatctatcgagccgtccctatccgagtcaatccccgggtgagtaacgttaaatcagtgtataagacccatatcgacgtcatccattacaggaagactgacgcgaaacgacttcatggactcgacgaagaagctgagcagaagctgttctccgagaaaagggtggagttgctgaaagagctgtccagaaaacctgatatctacgaacgtctagctagcgctttagcccccagcatttatgaacacgaggatatcaagaaggggatattgctgcaactatttggcggaacacgcaaggacttcagccacacgggcaggggcaaattcagagccgagataaacattctgttgtgcggcgaccccggaaccagcaagtcacagttactccagtatgtttataacctggtgccccgcggacagtatacgagtggaaagggaagcagtgccgtcggtcttactgcatatgtaatgaaggaccccgaaacaaggcagctggtacttcaaactggggctctagttctctcagataatggtatttgctgcatcgacgaatttgataagatgaacgagtctactcggtcagtcctccacgaggtcatggagcagcagacactgtccatcgccaaagcaggtatcatctgccagctgaacgccaggactagcgtgttagccgcggctaatccgatagagagccagtggaatcctaagaagaccaccatcgagaacatccaactaccccatacccttctcagcagatttgacctcatctttctgctgcttgacccacaagacgaggcttacgatcgcaggctcgcacaccaccttgtggccctgtattaccagtcagaggagcaggccgaagaggagttactcgacatggctgtactcaaagactacatcgcctacgctcactccacaataatgccgagattaagcgaggaagcatctcaggccctgattgaagcatacgtggatatgcgaaagatcggatctagcagaggaatggtctcggcttaccctcggcagctcgagtctctgattcgcctggcagaggctcacgcaaaggtcaggctgtccaacaaagtggaagctattgatgtcgaggaagcaaaaagactccatcgagaggctctgaagcaatccgccaccgatccacggactggtattgtcgacatctccatattgacaaccggaatgagcgccacgtcccgcaagagaaaggaggagttagccgaggctctgaaaaagctaatactgtccaaaggaaagacaccggcattgaagtaccagcagctctttgaagacataagagggcagagcgatatcgctattaccaaggacatgtttgaggaagctctgagagctctggcagacgatgattttctcactgttactggcaagaccgtgaggctcctgtag

SEQ ID NO: 256794 - DNA, 2592 bp, Artificial Sequence
  derived and/or modified sequence
atgagctcaccagcctctacgccgagcaggcggggcagcagacgagggagagcgactccagcacaaactcctcgcagtgaggacgccagatcatccccatctcagcgacgtcggggcgaagatagcaccagcacgggagagttgcagccaatgccgacaagtcccggcgtagacctacaaagcccagctgcacaggacgtgttgttcagctccccaccgcagatgcactcttctgctatcccactggacttcgacgtgagttcgcctttgacctacggcaccccatcatcgcgagtggagggcacgccccgaagcggcgtgcggggaactccagtgcgccagcggccagacctggggtcggctcagaaggggctccaggtcgatctccagtccgacggcgctgcggcagaggatattgtggcttcggagcagtctttgggtcagaaactcgtgatctggggaacagatgtcaacgttgcagcgtgtaaggagaacttccagcgatttctgcaaagatttattgatcctctggcaaaggaagaggagaatgtcggcattgatattaccgaaccattgtacatgcaaagactgggcgaaattaatgtgattggtgaaccgtttttgaatgtcaattgtgaacacattaagtcctttgataagaatctgtataggcaattgatcagctacccgcaggaagtgataccaactttcgatatggcagtgaatgagatcttttttgatcgttatcccgactccatcttggagcaccagattcaggtgcgcccattcaacgccctgaagacaaagaacatgcgcaacttgaatcccgaggacattgatcaactgattacgataagtggcatggtgatcaggaccagccaactcattcccgagatgcaagaggcattcttccaatgtcaggtatgcgcccacaccactcgcgtggagatggatcggggtaggatcgcagaaccatcggtctgtggccggtgtcataccacacattcaatggcactgattcataaccggtctctgttcagtgacaagcaaatgatcaaactacaagagtcccccgaggatatgccagccgggcagacacctcacactgttattttattcgcccataatgacctggtcgacaaagtacagcctggcgaccgtgtgaacgtgaccggcatctaccgcgccgtgcctattcgcgtaaacccaagagtgtccaacgtaaagtccgtgtacaaaacacacatcgatgtcatccactaccgaaagaccgacgccaaacggttacatgggctcgatgaggaggccgaacagaaactgttctcggaaaaacgggtggagctgctgaaagagctgagtcgaaaacctgacatttacgaacgtctcgcttccgccctggcacccagcatttatgagcatgaagatataaagaaaggaatactccttcagctgtttggaggaaccagaaaagacttttcacacaccggacgtgggaaatttcgggccgaaataaatatcctgctgtgcggggacccaggaactagcaaatctcagctgctccaatatgtgtataatctggtaccccgaggccagtatacctccggtaaagggagtagcgcggtaggactgactgcttacgtcatgaaggacccggagacaaggcaactggtgttacagaccggcgctttggtcctctcagataatggaatctgctgcatagacgagttcgacaaaatgaacgagagtacaaggagcgtcctacatgaagtaatggagcagcaaacactttccattgccaaagccggcattatctgccaacttaacgccagaacctctgtgctggctgccgcaaacccaattgaaagtcagtggaatccaaaaaaaacaacaattgagaatattcaactgcctcacacgctgttaagccgtttcgatctgatctttctccttttagacccccaagatgaagcgtacgaccgccggctggcccaccacctcgtggccctatattaccagtcagaggagcaagccgaagaggaactcctcgacatggccgtacttaaggactacatcgcatacgctcatagcactataatgcctcggctgagtgaagaggccagtcaagcactgatcgaggcgtatgtggacatgagaaagatcggctcgagtagaggcatggtgtccgcgtatcctcgtcaactggaaagtttaatcaggctcgcagaagctcatgcaaaagtgcggctcagcaataaagttgaggccatcgacgtcgaggaagccaaacgccttcacagggaggctctgaagcagagcgccacagatcctaggacagggatcgtggacatttccatactgaccacaggcatgtctgccacttcaaggaagagaaaggaggaactggctgaagccttgaaaaaactcattctgtcgaaaggtaaaactcccgctctgaaataccagcaactcttcgaggatatcagaggacagtcagatatcgctatcactaaggacatgtttgaggaagctctacgtgctctcgccgacgacgacttcctgacagtgacaggaaaaactgtgagactcttgtag

SEQ ID NO: 256795 - DNA, 2592 bp, Artificial Sequence
  derived and/or modified sequence
atgagcagccctgccagcacccccagccggcggggcagccggcggggccgggccaccccagcccagacccccaggagtgaagatgcccggagcagccccagccagaggagaagaggagaggacagcaccagcactggagagctgcagcccatgcccaccagccctggggtggacctgcagagccctgctgcccaggatgtgctcttcagcagccccccccagatgcacagcagcgccatccccctggactttgatgtgagcagccccctgacctacggcacccccagcagccgggtggagggcacccccaggtctggagtgcggggcacccctgtgcggcagaggccagacctgggcagcgcccagaagggcctgcaggtggacctgcagagtgatggagctgctgctgaagatattgtggccagcgagcagagcctgggccagaagctggtgatctggggcacagatgtgaatgtggccgcctgcaaggagaacttccagcgcttcctgcagcgcttcatcgaccccctggccaaggaggaggagaatgtgggcatcgacatcacagagcccctgtacatgcagaggctgggggagatcaacgtgattggagagcccttcctgaatgtgaactgtgagcacatcaagagctttgacaagaacctgtaccggcagctgatctcctacccccaggaggtgatccccacctttgacatggctgtgaatgagatcttctttgaccgctacccagacagcatcctggagcaccagatccaggtgcggcccttcaatgccctgaagaccaagaacatgaggaacctgaacccagaagatattgaccagctgatcaccatcagcggcatggtgatccgcaccagccagctgatccctgagatgcaggaggccttcttccagtgccaggtgtgtgcccacaccaccagggtggagatggaccggggcagaattgctgagcccagcgtgtgtggccgctgccacaccacccacagcatggccctgatccacaacagaagcctcttcagtgacaagcagatgatcaagctgcaggagagccctgaggacatgcctgctggccagaccccccacacagtcatcctgtttgcccacaatgacctggtggacaaggtgcagcccggggacagagtgaatgtgacaggcatctacagagctgtgcccatccgggtgaacccccgggtgtccaatgtgaagtctgtgtacaagacccacattgatgtgatccactacaggaagacagatgccaagaggctgcacggcctggatgaggaggccgagcagaagctgttcagcgagaagagggtggagctgctgaaggagctgagcaggaagccagacatctatgagcggctggccagcgccctggcccccagcatctatgaacatgaggacatcaagaagggcatcctgctgcagctgtttggaggcaccaggaaggacttcagccacacaggccggggcaagttccgggcagagatcaacatcctgctgtgtggggaccccggcaccagcaagagccagctgctgcagtatgtgtacaacctggtgccccggggccagtacaccagcggcaagggcagcagcgctgtgggcctgacagcctacgtgatgaaggaccctgagacccggcagctggtgctgcagacaggagccctggtgctgagtgacaatggcatctgctgcattgatgaatttgacaagatgaatgaaagcaccaggtctgtgctgcacgaggtgatggagcagcagaccctgagcatcgccaaggccggcatcatctgccagctgaatgcccggacctctgtgctggccgccgccaaccccatcgagagccagtggaaccccaagaagaccaccatcgagaacatccagctgccccacaccctgctgagcagatttgacctgatcttcctgctgctggacccccaggatgaggcctatgaccggcggctggcccaccacctggtggccctgtactaccagagcgaggagcaggccgaggaggagctgctggacatggctgtgctgaaggactacatcgcctatgcccacagcaccatcatgccccggctgtctgaggaggccagccaggccctgattgaggcctacgtggacatgaggaagattggcagcagccggggcatggtgtctgcctacccccggcagctggagagcctcatccggctggccgaggcccacgccaaggtgcggctgagcaacaaggtggaggccattgatgtggaggaggccaagaggctgcaccgggaggccctgaagcagagcgccacagaccccaggacaggcatcgtggacatcagcatcctgaccaccggcatgtctgccaccagcaggaagaggaaggaggagctggccgaggccctgaagaagctgatcctgagcaagggcaagaccccagccctgaagtaccagcagctgtttgaggacatccggggccagagcgacatcgccatcaccaaggacatgtttgaggaggccctgcgggccctggctgatgatgacttcctgactgtgacaggcaagacagtgcggctgctgtag

SEQ ID NO: 256796 - DNA, 4183 bp, Artificial Sequence
  derived and/or modified sequence
gtctcgcggtttgggagcgctactcgccaggtggactcggagtccgcgagcgtcgtcggcaagcggccgcctttccacggtaaccgcgcgccggcggggagggcgtggcgcggagccgacgggaacgtccgcgctgcggagcagggcagggaagccgggaggcgggcccggcccgagcttgtccttgtcgcgcaggtactccgagcactatgtcgtccccggcgtcgaccccgagccgccgcggcagccggcgtggaagggccacccccgcccagacgcctcggagtgaggatgccaggtcatctccctctcagagacgtagaggcgaggattccacctccacgggggagttgcagccgatgccaacctcgcctggagtggacctgcagagccctgctgcgcaggacgtgctgttttccagccctccccaaatgcattcttcagctatccctcttgactttgatgttagttcaccactgacatacggcactcccagctctcgggtagagggaaccccaagaagtggtgttaggggcacacctgtgagacagaggcctgacctgggctctgcacagaagggcctgcaagtggatctgcagtctgacggggcagcagcagaagatatagtggcaagtgagcagtctctaggccaaaaacttgtgatctggggaacagatgtaaatgtggcagcatgcaaagaaaactttcagagatttcttcagcgttttattgaccctctggctaaagaagaagaaaatgttggcatagatattactgaacctctatacatgcaacgacttggggagattaatgttattggtgagccatttttaaatgtgaactgtgaacacatcaaatcatttgacaaaaatttgtacagacaactcatctcttacccacaggaagttattccaacttttgacatggctgtcaatgaaatcttctttgaccgttaccctgactcaatcttagaacatcagattcaagtaagaccattcaacgcattgaagactaagaatatgagaaacctgaatccagaagacattgaccagctcatcaccatcagcggcatggtgatcaggacatcccagctgattcccgagatgcaggaggccttcttccagtgccaagtgtgtgcccacacgacccgggtggagatggaccgcggccgcattgcagagcccagtgtgtgcgggcgctgccacaccacccacagcatggcactcatccacaaccgctccctcttctctgacaagcagatgatcaagcttcaggagtctccggaagacatgcctgcagggcagacaccacacacagttatcctgtttgctcacaatgatctcgttgacaaggtccagcctggggacagagtgaatgttacaggcatctatcgagctgtgcctattcgagtcaatccaagagtgagtaatgtgaagtctgtctacaaaacccacattgatgtcattcattatcggaaaacggatgcaaaacgtctgcatggccttgatgaagaagcagaacagaaacttttttcagagaaacgtgtggaattgcttaaggaactttccaggaaaccagacatttatgagaggcttgcttcagccttggctccaagcatttatgaacatgaagatataaagaagggaattttgcttcagctctttggcgggacaaggaaggattttagtcacactggaaggggcaaatttcgggctgagatcaacatcttgctgtgtggcgaccctggtaccagcaagtcccagctgctgcagtacgtgtacaacctcgtccccaggggccagtacacgtctgggaagggctccagtgcagttggcctcactgcgtacgtaatgaaagaccctgagacaaggcagctggtcctgcagacaggtgctcttgtcctgagtgacaacggcatctgctgtatcgatgagttcgacaagatgaatgaaagtacaagatcggtattgcatgaagtcatggaacagcagactctgtccattgcaaaggctgggatcatctgtcagctcaatgcgcgcacctctgtcctggcagcagcaaatcccattgagtctcagtggaatcctaaaaaaacaaccattgaaaacatccagctgcctcatactttattatcaaggtttgatttgatcttcctcttgctggaccctcaggacgaagcctatgacaggcgtctggctcaccacctggtcgcactgtactaccagagcgaggagcaggcagaggaggagctcctggacatggcggtgctaaaggactacattgcctacgcgcacagcaccatcatgccgcggctaagtgaggaagccagccaggctctcatcgaggcttatgtagacatgaggaagattggcagtagccggggaatggtttctgcataccctcgacagctagagtcattaatccgcttagcagaagcccatgctaaagtaagattgtctaacaaagttgaagccattgatgtggaagaggccaaacgcctccatcgggaagctctgaagcagtctgcaactgatccccggactggcatcgtggacatatctattcttactacggggatgagtgccacctctcgtaaacggaaagaagaattagctgaagcattgaaaaagcttattttatctaagggcaaaacaccagctctaaaataccagcaactttttgaagatattcggggacaatctgacatagcaattactaaagatatgtttgaagaagcactgcgtgccctggcagatgatgatttcctgacagtgactgggaagaccgtgcgcttgctctgaagccttgtgagcaaggaaggctccctgcatgtcctgcttgctgcacgccacatgggtgtggtctgcatctcagttggccgccatcagtgtaaatagagcttaaagtcatggtttggctgcataaaaattttctaacttgggttcaatatttgtagtgaagtatctgttttcatttttttcacgttataaataaaaatactatgctggccgggcgcggtggctcacacctgtaatcccagcactttgggaggccaatgtgggtggatcatgaggtcaggagttcaagaccagcctagccaagatggtgaaaccccgtctctagtaaagataacaaaaaattagctgggcttgatggcatgcgcctgtaatcccagctactcgggaggttgaggcaggagaatcgcttaaacccaggcggcagaggttgcagtgagccaagatcgcgccactgcactccagcctcagcaatagagtgagactgtctcaaaaaaaaaaaaaaaaaaaaaacctgccaattttcaaacataccgtagagattattttcaggtgccattttatagtatagcagcagggcttttactctgtgtatgcacagatgcagtctggggcatggtttgtgtgctggactttctcatggccatcatcagtatgcttatggatttgatgacaggcatagcctgggcatatcacctcattggtaaagggctagagcctttcttttttatggcacttctttttttgagatagggtcttactctgtcaccctggctagagtacactggtacaatcacggctcaatgtaggcttaacctcctgggctcaggtgtatgtcactatgcccggctactttttgtattttttggtagagacggcttcgccacgttgcccaggctgcaagcgatatgcctaggctcaagcgatctgcccacctcaacttccggaagtgctgagattacaggtgtgagccactgcacccagcctttgttttattttttattttttgagaggtatgattctttctagagattttttctcatggctactattagatcaggaatgggtgattggagattattagattctaggttaacttctaccactttaccctaatacataaaactttttcctaaataaatgatggaaggaataatacttggttacctggcattatttttcagtaagaaaaaagctttactaaccactacatttatggaaatttgtaggggtaagtattttataggtcataaaaaacaccataatataacgaatctcattttctttaaatgtgaattaaatcctaacagtcatctttataaaatgaccataggctaaaatcttacgtgtaagtactactacaataaataatttctgaaacctttaaa

SEQ ID NO: 256797 - DNA, 4105 bp, Artificial Sequence
  derived and/or modified sequence
aggggcggagacgaccttgccgccggcgggaactctgggtctcgcggtttgggagcgctactcgccaggtggactcggagtccgcgagcgtcgtcggcaagcggccgcctttccacggtactccgagcactatgtcgtccccggcgtcgaccccgagccgccgcggcagccggcgtggaagggccacccccgcccagacgcctcggagtgaggatgccaggtcatctccctctcagagacgtagaggcgaggattccacctccacgggggagttgcagccgatgccaacctcgcctggagtggacctgcagagccctgctgcgcaggacgtgctgttttccagccctccccaaatgcattcttcagctatccctcttgactttgatgttagttcaccactgacatacggcactcccagctctcgggtagagggaaccccaagaagtggtgttaggggcacacctgtgagacagaggcctgacctgggctctgcacagaagggcctgcaagtggatctgcagtctgacggggcagcagcagaagatatagtggcaagtgagcagtctctaggccaaaaacttgtgatctggggaacagatgtaaatgtggcagcatgcaaagaaaactttcagagatttcttcagcgttttattgaccctctggctaaagaagaagaaaatgttggcatagatattactgaacctctatacatgcaacgacttggggagattaatgttattggtgagccatttttaaatgtgaactgtgaacacatcaaatcatttgacaaaaatttgtacagacaactcatctcttacccacaggaagttattccaacttttgacatggctgtcaatgaaatcttctttgaccgttaccctgactcaatcttagaacatcagattcaagtaagaccattcaacgcattgaagactaagaatatgagaaacctgaatccagaagacattgaccagctcatcaccatcagcggcatggtgatcaggacatcccagctgattcccgagatgcaggaggccttcttccagtgccaagtgtgtgcccacacgacccgggtggagatggaccgcggccgcattgcagagcccagtgtgtgcgggcgctgccacaccacccacagcatggcactcatccacaaccgctccctcttctctgacaagcagatgatcaagcttcaggagtctccggaagacatgcctgcagggcagacaccacacacagttatcctgtttgctcacaatgatctcgttgacaaggtccagcctggggacagagtgaatgttacaggcatctatcgagctgtgcctattcgagtcaatccaagagtgagtaatgtgaagtctgtctacaaaacccacattgatgtcattcattatcggaaaacggatgcaaaacgtctgcatggccttgatgaagaagcagaacagaaacttttttcagagaaacgtgtggaattgcttaaggaactttccaggaaaccagacatttatgagaggcttgcttcagccttggctccaagcatttatgaacatgaagatataaagaagggaattttgcttcagctctttggcgggacaaggaaggattttagtcacactggaaggggcaaatttcgggctgagatcaacatcttgctgtgtggcgaccctggtaccagcaagtcccagctgctgcagtacgtgtacaacctcgtccccaggggccagtacacgtctgggaagggctccagtgcagttggcctcactgcgtacgtaatgaaagaccctgagacaaggcagctggtcctgcagacaggtgctcttgtcctgagtgacaacggcatctgctgtatcgatgagttcgacaagatgaatgaaagtacaagatcggtattgcatgaagtcatggaacagcagactctgtccattgcaaaggctgggatcatctgtcagctcaatgcgcgcacctctgtcctggcagcagcaaatcccattgagtctcagtggaatcctaaaaaaacaaccattgaaaacatccagctgcctcatactttattatcaaggtttgatttgatcttcctcttgctggaccctcaggacgaagcctatgacaggcgtctggctcaccacctggtcgcactgtactaccagagcgaggagcaggcagaggaggagctcctggacatggcggtgctaaaggactacattgcctacgcgcacagcaccatcatgccgcggctaagtgaggaagccagccaggctctcatcgaggcttatgtagacatgaggaagattggcagtagccggggaatggtttctgcataccctcgacagctagagtcattaatccgcttagcagaagcccatgctaaagtaagattgtctaacaaagttgaagccattgatgtggaagaggccaaacgcctccatcgggaagctctgaagcagtctgcaactgatccccggactggcatcgtggacatatctattcttactacggggatgagtgccacctctcgtaaacggaaagaagaattagctgaagcattgaaaaagcttattttatctaagggcaaaacaccagctctaaaataccagcaactttttgaagatattcggggacaatctgacatagcaattactaaagatatgtttgaagaagcactgcgtgccctggcagatgatgatttcctgacagtgactgggaagaccgtgcgcttgctctgaagccttgtgagcaaggaaggctccctgcatgtcctgcttgctgcacgccacatgggtgtggtctgcatctcagttggccgccatcagtgtaaatagagcttaaagtcatggtttggctgcataaaaattttctaacttgggttcaatatttgtagtgaagtatctgttttcatttttttcacgttataaataaaaatactatgctggccgggcgcggtggctcacacctgtaatcccagcactttgggaggccaatgtgggtggatcatgaggtcaggagttcaagaccagcctagccaagatggtgaaaccccgtctctagtaaagataacaaaaaattagctgggcttgatggcatgcgcctgtaatcccagctactcgggaggttgaggcaggagaatcgcttaaacccaggcggcagaggttgcagtgagccaagatcgcgccactgcactccagcctcagcaatagagtgagactgtctcaaaaaaaaaaaaaaaaaaaaaacctgccaattttcaaacataccgtagagattattttcaggtgccattttatagtatagcagcagggcttttactctgtgtatgcacagatgcagtctggggcatggtttgtgtgctggactttctcatggccatcatcagtatgcttatggatttgatgacaggcatagcctgggcatatcacctcattggtaaagggctagagcctttcttttttatggcacttctttttttgagatagggtcttactctgtcaccctggctagagtacactggtacaatcacggctcaatgtaggcttaacctcctgggctcaggtgtatgtcactatgcccggctactttttgtattttttggtagagacggcttcgccacgttgcccaggctgcaagcgatatgcctaggctcaagcgatctgcccacctcaacttccggaagtgctgagattacaggtgtgagccactgcacccagcctttgttttattttttattttttgagaggtatgattctttctagagattttttctcatggctactattagatcaggaatgggtgattggagattattagattctaggttaacttctaccactttaccctaatacataaaactttttcctaaataaatgatggaaggaataatacttggttacctggcattatttttcagtaagaaaaaagctttactaaccactacatttatggaaatttgtaggggtaagtattttataggtcataaaaaacaccataatataacgaatctcattttctttaaatgtgaattaaatcctaacagtcatctttataaaatgaccataggctaaaatcttacgtgtaagtactactacaataaataatttctgaaacctttaaa

SEQ ID NO: 256798 - DNA, 2592 bp, Artificial Sequence
  derived and/or modified sequence
atgagcagccccgccagcacccccagccggcggggcagccggcggggcagggcgacccccgcgcagacaccccggagcgaggacgcacggagtagtcctagccagcgtcgcagaggtgaagattctacctcaactggggagctgcagcctatgccaacctcgccgggagtcgacttgcagagcccagccgcgcaggacgtcttattcagcagtcctccccaaatgcacagttccgccattcccttggattttgacgtcagtagccctctaacgtatgggacaccctctagtcgggtggagggaaccccccggtccggggtgcgcggaacacctgtcagacagcggcctgatcttggaagcgcccagaaaggactgcaagtggatctgcagtcagatggtgcagccgccgaagatatcgtcgcttcagagcagtcactaggccagaagttggtcatctggggaaccgacgtgaatgtggcagcttgcaaggagaacttccagaggttcctgcaaagatttatcgatccactggccaaggaggaggaaaatgtgggcatagatatcacagaacctctttatatgcagcgacttggggagatcaatgtaattggcgagccgtttttgaacgtgaactgtgagcatattaagtcatttgataaaaatctgtatcgccaattgatcagttatcctcaagaggtgatcccgacattcgatatggctgtaaacgagattttttttgatagatatcctgacagcatcctggagcatcagatccaggtgagaccgttcaacgctttaaagactaaaaatatgagaaacctgaatcctgaggacattgaccagctaatcaccatcagcggaatggtgatcaggacaagccagttgattcctgagatgcaggaggccttcttccagtgccaggtgtgtgctcatacaacccgagtggagatggaccgaggcaggattgcagaaccaagtgtttgcggacgttgtcatactacacactcaatggcactgatccacaaccgttctctgttttccgacaagcagatgatcaaacttcaggagtcacccgaagacatgcccgctgggcagactccccatactgtcatacttttcgcccataatgatcttgtagacaaggtgcaaccaggagaccgggtgaatgtgactggcatttacagagccgtgcccatcagggtgaacccccgggtcagcaacgtgaaatcggtctacaagacacacatcgatgtgattcattaccggaagaccgatgcaaagagactgcacggcctggatgaagaggctgaacagaaactgtttagtgagaaaagagtggagctcctgaaagagctgtctaggaaaccagacatatacgaacggctggcttccgccttggctcccagtatctatgagcatgaggacattaagaagggcatactgctgcaattgtttggaggtactaggaaggacttcagtcacacaggacggggaaagttccgcgccgaaattaacattctgctgtgtggggatccaggaactagtaagtcccagctcctgcagtatgtgtataacttagttcccagaggtcagtacacaagtggcaaggggtctagtgcagtgggactcactgcatatgtgatgaaagacccagaaacgagacaactagtgctgcaaaccggagctttggtgctgagcgataacggtatatgctgcattgatgagtttgacaaaatgaacgagtccacccgcagcgtactgcacgaggtaatggagcagcaaacactgagcatcgcaaaagcaggcatcatctgccagttgaatgcccgcacctccgtcttagccgctgccaatcctatcgaatcccaatggaatcctaaaaagacaactattgaaaacatccaacttccacatacactgctaagcaggtttgatctgatttttttacttttggatccacaagacgaagcgtatgatcgccggctcgctcaccatcttgtggctttgtattaccagtccgaggaacaagctgaagaggagttgttggacatggctgtgctgaaagattatatagcatatgcccactctacgatcatgccccggctgtctgaggaggcctcccaggcgctaatcgaggcctatgttgacatgcgaaagatcggctctagccgaggcatggtttcagcatacccaaggcagctggagtcgctgatacgcctggccgaggctcacgccaaagtcaggcttagcaataaagtggaggctattgacgttgaagaggccaagcgattgcaccgtgaagcacttaaacagtcagccactgacccccgcacaggcatagttgatatcagcatccttacgactggcatgtcagctacaagccgaaaacgtaaggaagagttggccgaggcacttaaaaaactgatactgtctaaggggaaaaccccagcccttaaatatcagcagctgttcgaagacatccgtgggcagagtgatatcgccattacaaaggacatgttcgaagaagccctgcgcgctctcgctgacgacgatttcctcacagtgacgggaaaaactgttcgactcctgtag

SEQ ID NO: 256799 - DNA, 2592 bp, Artificial Sequence
  derived and/or modified sequence
atgagcagccccgccagcacccccagccggcggggcagccggcgggggcgggctacacccgcacagacacctcgctctgaggatgcccgctccagtccttcacagcggaggagaggagaagactcgacctctacaggggaactacagcctatgcccacttctcccggagttgacctgcagagtcctgctgcacaggatgtcctcttttccagccctccgcagatgcactcaagcgccatccctctcgactttgacgtgagctcgccactcacctacggaaccccctcgtcccgagtggaaggcacacctaggtcaggtgtgcggggcacacctgtgcggcagcgtccggatctgggctctgctcaaaaaggcctgcaggtcgatctccagtccgacggggctgccgccgaagacattgttgcctcagagcagtccctgggccagaagctcgtgatctggggcaccgacgtgaatgttgctgcatgcaaggagaacttccaacgttttttgcaacgcttcatcgatcctttggcaaaagaggaggaaaatgtgggaatcgatatcacagaacccctgtacatgcagaggttaggtgaaataaacgtcatcggcgaacctttcctgaatgtcaactgcgagcacattaagtcttttgataaaaatctttaccgccagctgatatcctacccccaagaggttattccaacattcgatatggccgtcaacgagatttttttcgacaggtatcccgattcaattctggagcatcagatacaggtccgccccttcaacgccctgaaaacgaagaatatgcgcaacttgaatccagaagacatagaccaattaattactatcagcggaatggtgatccgtacctcccagttgattcccgagatgcaggaggcgttctttcagtgccaggtttgtgcgcacactacacgggtcgagatggaccgcggccgaattgccgagcccagcgtatgcggcaggtgccatacaacacactcgatggcccttatccataaccgctccttgttttctgacaagcagatgattaaactacaagaatcccccgaagacatgccagctggtcaaactcctcacaccgtgatcctcttcgctcacaatgacttggtagataaagtacagccgggcgatagggttaacgtcaccgggatttatagagcagtccctattcgtgtgaacccccgcgtcagcaacgtcaagtcagtgtacaaaacacacattgatgttattcattacagaaagactgacgcaaagagactccatggactcgacgaagaagctgaacagaaactgttctccgagaaaagagtggagctgcttaaagaactgtcccgcaagcctgacatttacgagaggctggccagcgccctcgcgcccagcatttacgaacacgaagatatcaaaaaggggatccttctgcagctcttcggcggtacaaggaaagactttagtcataccggacgcggaaagttcagagcagagattaatatactcctttgcggtgaccccggcacctctaaaagtcaactgttgcagtatgtctacaatttggtaccacggggccagtacacttcaggtaaggggtctagtgcggttggcctaacagcgtacgttatgaaggatcctgagactcgccagctcgtgctccagactggcgcactcgtgctgtccgacaatggtatctgctgtatcgatgaattcgacaaaatgaacgagtcgacacggtccgttctgcatgaggttatggaacagcaaactctatctattgctaaggcaggaatcatctgccagctgaatgcccgaacgtctgtcctcgcagcggccaatcctatcgagtcccagtggaatcccaagaaaacaacaatcgaaaacattcaactgccccacactttactgtctcgctttgacctgattttcttactgcttgaccctcaggacgaagcatacgatagacgtctggctcaccatctcgttgctctgtactaccaaagtgaggagcaagccgaggaggagctcctggatatggcagtgctgaaagactacatcgcatatgcgcacagcacgatcatgcctagactgtccgaagaggccagtcaggcccttattgaggcctacgtagatatgcgcaagatcgggagcagtagaggcatggttagtgcctatcctagacagctggaatcccttattagactggccgaggcgcacgctaaggtgagattgagcaacaaagttgaggccattgatgtcgaggaagccaagaggctgcaccgggaggcactgaaacagtcagccaccgacccgcgaactgggattgtcgacatcagcattcttactaccggcatgtcagccacctccagaaagaggaaagaggaactcgcagaggcactgaaaaagttaattctgtcaaagggaaagacacctgccctcaaataccagcagttgttcgaagacattagaggacagagtgacattgccatcacaaaagacatgttcgaggaagccttgagggcccttgccgacgacgactttcttaccgtcactggaaagaccgttcgcttgctttag

SEQ ID NO: 256800 - DNA, 2592 bp, Artificial Sequence
  derived and/or modified sequence
atgagtagccctgccagcacccccagcaggcgcggatcacgcagggggcgagccacacccgcacagaccccacgctccgaggacgcccgatcttccccatctcaacggagacggggagaggactctacttctaccggagagctgcagcctatgcccactagccctggcgtggatctgcagagccccgctgctcaagatgtcttgttctcttcccctccacagatgcattcctctgcaattcccttggattttgatgttagcagtccgctcacctacggcaccccctcctcaagggttgaaggtacccccaggagtggcgtcagagggacgccagtgcgccagaggccagacctaggtagtgcacagaagggcctgcaggtggatctccagagcgatggtgccgcagccgaagacatcgttgcaagcgagcagagcctggggcaaaaactcgtgatatggggaaccgatgtaaatgtggctgcgtgcaaggagaattttcagcgatttctgcaacgcttcattgatccactggccaaggaggaggagaacgttgggattgacattaccgagcctctgtatatgcagcggcttggggagataaacgtaatcggtgagcccttcttgaacgtcaattgcgaacacatcaagtcctttgacaagaacctctataggcagctaatatcatacccccaagaggtgataccaacctttgatatggctgtgaatgagatctttttcgacaggtatcccgacagcattctagaacaccagatacaggtgagaccatttaacgctttgaaaaccaagaacatgaggaaccttaacccagaagacatcgatcagctgatcactatttctggaatggtgatcagaaccagtcagctcatcccggagatgcaggaggccttttttcaatgtcaggtctgcgcacacaccaccagggtggaaatggatcggggtagaattgcagaacccagcgtgtgtggcagatgccacaccacacactccatggcactgatacataatcgatctctgttctccgacaagcagatgattaaactgcaagagtcccccgaagatatgcctgcaggtcagacccctcatactgtcatactttttgctcataatgatttggtagacaaggttcagccgggagatcgtgttaatgtgaccggtatttaccgggcagtgcccatccgcgtcaaccctagggtctccaacgtcaaatccgtttacaaaacccacattgacgtgatccattaccggaaaacggatgccaagcggcttcacggactggatgaggaggccgaacagaagttattctctgagaagagggtggagctgctcaaggaactctcccggaaaccggatatctatgagcggctagcatctgcgttggctccatccatctacgagcacgaagatattaagaaaggcattctgctccaattgttcggaggtactagaaaagacttcagtcacactgggcgagggaagtttcgggcagagatcaacatactcctttgcggcgatcccggtacgagcaaatcccaactgctgcagtacgtatacaatctggtgcccagaggtcaatacaccagcgggaaaggctcctccgctgtgggcctgaccgcctacgtcatgaaagaccctgagacgcgtcagcttgtgctccagacaggtgccctggtgttgtcagacaatggaatttgttgcatagatgagtttgacaaaatgaacgaatctacgcgctcagtattgcacgaagtgatggagcagcaaaccctcagcatcgccaaagctgggatcatttgccagctgaacgccagaactagcgtactcgccgcagccaatcccatcgaaagccagtggaatcctaaaaaaaccacaatagagaacatacagctgccacataccctcctgtcccgattcgacttaattttcctgctgctcgatcctcaagatgaagcttacgacagacggctggcccaccatttggttgccctgtactaccagtctgaagagcaagcagaggaagaacttctcgatatggccgtactaaaagactacatagcctacgctcatagtacaataatgcccaggctctcggaggaagcaagtcaggccctcatcgaggcctatgtcgatatgagaaaaatcggcagttccaggggaatggtcagtgcgtatccgagacagctggaaagccttatcaggctggccgaagcacacgctaaggttaggctctcaaacaaggtagaagcaatagatgtagaagaggcaaaacggctccaccgtgaagccctaaagcagagcgccacagaccctaggactgggatagtggatatctccattctgactaccggcatgagcgctacaagtagaaaacgcaaggaggaactcgctgaggcgctgaaaaagctcatcctgagtaagggcaaaaccccagcgttgaagtaccagcaactcttcgaggacatacgcggtcagtctgacatagcgataactaaggacatgtttgaggaagccttacgggctctcgcagacgatgacttcctgactgtcacgggcaaaacagtgagactcctgtag

SEQ ID NO: 256801 - DNA, 2592 bp, Artificial Sequence
  derived and/or modified sequence
atgagttcaccagcttcaacgcctagtaggcgaggctcccgacggggaagagctacacctgctcaaacacctcggagtgaggacgccaggagctctccatcccagaggagaaggggagaagactccacttctaccggagaactgcagccaatgccaacaagtccgggagtggaccttcagagtccagccgctcaggacgtcttattttcttcaccgccacagatgcatagttctgcaattccattggactttgatgtgagttcacccctgacatatggcacgcccagttctcgcgtcgagggcacgccaagaagcggagttcgcggaacaccggtgaggcagagacccgatctcggttcagctcagaaaggactgcaggtcgacttgcagagcgatggcgcagctgctgaggatatcgtcgcgtctgaacaatcacttggtcagaaattagttatctggggcacagatgtgaacgtcgccgcttgtaaagaaaatttccaaaggttcctgcagaggttcatcgaccctctggctaaggaagaagagaacgtcggaattgacatcactgagcctttgtacatgcaacgccttggggagatcaacgttatcggggagccattcctgaatgttaattgtgagcacattaagtcttttgacaagaacctctatcgccagcttatatcttacccgcaggaggtcattcccaccttcgatatggccgtcaatgagattttcttcgacagatacccggattctattttggaacatcaaattcaggtgcggcctttcaatgcgctaaagacaaagaacatgcgcaatttgaatccggaagatatagaccagttaataacaattagcgggatggtgataagaaccagccagctgatacctgaaatgcaggaggccttctttcagtgccaagtgtgcgctcacaccacccgcgtggagatggacaggggcagaatcgccgaaccatctgtgtgcggcaggtgtcacaccacacacagtatggcccttatccacaacaggtcactcttctcagataagcaaatgataaaactccaggaatcacccgaggatatgccagcgggacagactccccatacggtaattctttttgcgcacaatgacctagtggacaaggtccaacctggcgatagagttaatgtgaccgggatatatcgagcagtcccgatccgggtaaatcctcgggtttctaacgtgaagagcgtgtataaaacacatatagacgtgatccattacaggaagacagatgcaaaaagactacatggactggatgaggaagcagaacaaaagttattcagtgaaaaaagagttgagctgctcaaggaactgtccaggaagcccgatatttacgagcgtctcgcgagtgccctggcccctagcatatacgaacatgaagatatcaagaagggcatcctacttcagttgttcggtggcacacgtaaggacttctcccacactggccgaggcaaatttagggcagagattaacatactgctctgcggggacccaggcacatccaagtctcagctgctgcaatacgtatataaccttgtaccccgaggccagtacactagtggcaaggggagcagcgcagttgggcttaccgcatatgtgatgaaggatcccgagacaaggcagctcgttcttcaaactggcgcactggtgttgtccgacaatggcatttgctgcattgatgaatttgacaagatgaatgagtcaactcgctcagtgcttcatgaggtcatggagcagcagaccctcagcatcgcaaaggcgggaatcatctgtcaacttaacgctcgtacatcagttctggcagcagcgaaccccattgagtcccagtggaatcctaaaaaaacaaccattgaaaatatccagctgccacacacactccttagtaggttcgacttaatcttcctactgctggatcctcaagacgaggcctatgaccgacgccttgcccaccatctcgtggccctgtattaccagtcggaggagcaagccgaagaggagctgctcgacatggccgtcttaaaagattacatagcatatgcccatagtactatcatgccacgcctctcggaagaggcgtcccaggcattgatcgaggcctatgtggatatgcggaagatcggctcttctcggggaatggtgagcgcttacccgaggcagctggagtctttgatccgcctggccgaagcacatgccaaggttcgtctgagtaataaggtagaagctatcgatgtcgaggaggccaaacgcctgcatagggaagccctgaaacagagtgcaaccgacccaagaacaggaatcgtggacatctcgattctcactaccggtatgtctgccacctcaagaaagaggaaagaggagttggctgaagcgttgaagaagctgatcttatctaagggcaagactccagctctgaagtaccagcagctgttcgaagacattcggggacagtccgacatcgccatcacaaaggatatgttcgaggaagctttgagggctctagcagacgacgactttctaacagtgacagggaagacggtgcgcttgttgtag

SEQ ID NO: 256802 - protein, 875 aa, Artificial Sequence
  derived and/or modified sequence
MDEEEDNLSLLTALLEENESALDCNSEENNFLTRENGEPDAFDELFDADGDGESYTEEADDGETGETRDEKENLATLFGDMEDLTDEEEVPASQSTENRVLPAPAPRREKTNEELQEELRNLQEQMKALQEQLKVTTIKQTASPARLQKSPVEKSPRPPLKERRVQRIQESTCFSAELDVPALPRTKRVARTPKASPPDPKSSSSRMTSAPSQPLQTISRNKPSGITRGQIVGTPGSSGETTQPICVEAFSGLRLRRPRVSSTEMNKKMTGRKLIRLSQIKEKMAREKLEEIDWVTFGVILKKVTPQSVNSGKTFSIWKLNDLRDLTQCVSLFLFGEVHKALWKTEQGTVVGILNANPMKPKDGSEEVCLSIDHPQKVLIMGEALDLGTCKAKKKNGEPCTQTVNLRDCEYCQYHVQAQYKKLSAKRADLQSTFSGGRIPKKFARRGTSLKERLCQDGFYYGGVSSASYAASIAAAVAPKKKIQTTLSNLVVKGTNLIIQETRQKLGIPQKSLSCSEEFKELMDLPTCGARNLKQHLAKATASGIMGSPKPAIKSISASALLKQQKQRMLEMRRRKSEEIQKRFLQSSSEVESPAVPSSSRQPPAQPPRTGSEFPRLEGAPATMTPKLGRGVLEGDDVLFYDESPPPRPKLSALAEAKKLAAITKLRAKGQVLTKTNPNSIKKKQKDPQDILEVKERVEKNTMFSSQAEDELEPARKKRREQLAYLESEEFQKILKAKSKHTGILKEAEAEMQERYFEPLVKKEQMEEKMRNIREVKCRVVTCKTCAYTHFKLLETCVSEQHEYHWHDGVKRFFKCPCGNRSISLDRLPNKHCSNCGLYKWERDGMLKEKTGPKIGGETLLPRGEEHAKFLNSLK

SEQ ID NO: 256803 - DNA, 2628 bp, Artificial Sequence
  derived and/or modified sequence
atggatgaggaggaggacaacctgtccttattaaccgctctgttagaggagaatgaatcagcactcgactgcaattctgaagagaacaactttctcacgcgcgaaaatggtgagcccgacgcatttgatgagctgttcgatgcggacggcgacggagagtcctatacagaggaggcagacgatggggaaaccggtgagaccagggatgagaaggaaaacctggctacacttttcggagacatggaagaccttactgacgaggaggaagtgcctgcctcgcagtccacagaaaatagggtgctgcctgcccccgctccgaggagagagaaaaccaatgaggagctccaagaagagttgcgaaatttgcaggagcagatgaaagcgctgcaggagcagcttaaagtgacaaccatcaagcagaccgcatctcctgctcgcctccagaagagccccgtcgagaagtctccgaggccgccactgaaggaacgaagagtgcagcgaatccaagaaagtacctgtttctccgccgagctcgatgttccagctttgccgcgcaccaagagggtggcgagaaccccaaaggcttcacctcccgatccaaagagctcatccagcagaatgacttccgcacccagccagccactgcaaaccatctccagaaataaaccaagtggcatcacgagaggccagatcgttggcacgccaggttcttccggtgagactacccaacccatctgcgtcgaggcgttttctgggcttcgtctgcgaagaccaagggtgtcctcaactgaaatgaataagaagatgactggacggaaactgatccgcctctcccagatcaaagagaagatggctagagagaagctggaggagatcgattgggtcacatttggggtaatcctcaaaaaagtcacaccacagtctgtgaactcaggtaagactttcagtatctggaagctcaacgaccttagggatctgacgcaatgtgtgtccttgttcctgttcggggaagtgcacaaagccctgtggaaaaccgagcagggcaccgttgtgggaatcttaaatgcaaacccaatgaagcccaaagacgggagcgaggaggtatgcctttccatcgaccatccacagaaagtcctgatcatgggtgaggctctcgacctaggtacatgcaaagccaaaaaaaagaatggcgagccttgcacacagaccgtgaacctgcgtgactgtgagtattgccagtaccatgtccaggcccagtacaaaaagttgagtgcaaagagggctgacttgcaatcaactttctccggggggaggatccctaaaaagtttgcgaggaggggcacatctttgaaggagcgcctgtgtcaggatggattctattacggaggagttagctctgcctcttacgccgcatccatagctgctgcagttgcacctaaaaaaaagatacagactactctgtctaatctcgtagtcaaaggaactaacctcatcatccaggagactcgccagaaattgggcatcccccaaaaatctttaagctgcagtgaggaattcaaggagctgatggacctgccaacatgcggggcacggaacctgaaacagcacctggccaaagccactgcctctggaatcatgggcagccccaaacccgccattaagtccatcagcgcctcagcacttttgaagcagcagaaacagaggatgctcgagatgaggcgcaggaagtccgaagaaatccaaaaaaggtttctgcagtcatcaagcgaggtggaatcccccgctgtcccttcgtcttctcggcagccccccgctcagccgcccagaactggcagtgaattcccgcgtcttgaaggtgcgccagcaacaatgaccccaaaacttggacgtggtgtgcttgagggagacgatgtcttgttttacgatgaatctccgcccccccgtcccaaactgagtgcacttgccgaagctaaaaaactggccgccatcacaaagcttcgagctaaaggccaggtcctgactaagaccaatcccaatagcatcaagaagaagcagaaagatcctcaagacattctggaagtaaaggagcgtgtggaaaagaataccatgttttcctctcaggccgaggacgaacttgagcctgcacgcaaaaagcggagagaacagctcgcctatctggaatcagaggaatttcagaagatcctgaaagccaagagcaagcataccggcatcctgaaagaagcagaagcagagatgcaggaacggtactttgaaccactcgttaaaaaagaacagatggaggagaaaatgagaaacatccgggaagttaagtgcagggtggtcacgtgtaaaacatgcgcatatacccactttaagctcctcgagacttgtgtgagtgagcagcacgagtaccactggcacgatggagtcaagagattcttcaaatgcccatgcggcaaccgttctatttccttggataggctgcccaacaagcactgtagcaactgcggcctatacaaatgggagagggatggaatgttgaaggagaaaactgggcccaagatcggcggagaaactctgcttccacggggagaggaacacgccaaattcttgaacagtctgaaatag

SEQ ID NO: 256804 - DNA, 2628 bp, Artificial Sequence
  derived and/or modified sequence
atggatgaggaagaagataacttaagtctgctgaccgcattgcttgaagagaatgagagcgcgctcgattgtaattcagaggaaaacaacttccttacgcgggagaatggcgaaccagacgcttttgacgaattgtttgatgctgatggtgacggcgaatcctatacagaagaagctgatgacggtgagaccggggagacccgggatgaaaaggagaacctcgccacgctgtttggcgacatggaggacctgactgatgaagaggaagtgcccgcgtctcaatctaccgaaaaccgggtcctccccgctccagcccctcgtcgtgagaagacgaacgaggaactccaagaagaactcaggaaccttcaagaacagatgaaagctctccaggaacagttaaaagtcacgaccatcaagcagacagcatctcccgcccgactgcaaaagtcacccgtagagaagtcaccaagaccaccacttaaggaaagaagggtgcagcggatccaggagagcacctgtttttctgctgagctggatgtccctgccctcccaagaacaaaaagggtggcccgtacccctaaggcatcacccccagatccaaagtcgagctcttcaaggatgacgagcgctccatcccaacccctgcagaccattagtcgcaacaagccatctgggattacacggggccagatcgttgggacacccggaagctcaggcgaaacaacacagccgatctgcgtggaggcgttttctggactgcggctaagacgaccgcgcgtcagttctacagaaatgaacaaaaaaatgactgggcgcaagctaatccgcttgtcccaaattaaagagaaaatggccagggagaaattggaagagattgattgggtcaccttcggtgtcattctgaaaaaagtgaccccccagtctgtgaattccggcaagaccttcagcatttggaaactgaacgacctgcgtgaccttactcagtgtgtctcacttttcttgttcggcgaggtgcacaaagcactgtggaaaaccgagcaggggacagtggtgggcatcctgaatgccaatcctatgaaacctaaagatggcagtgaagaggtctgtttatctatcgatcatcctcagaaggtgctcatcatgggggaagccttggacctggggacctgcaaagccaagaagaagaacggggaaccatgtacacagaccgtgaatttgcgtgactgcgagtattgtcaataccatgttcaagctcaatataaaaaactctccgccaagagagctgacctgcaaagtaccttcagcggcgggcggatcccaaaaaaattcgcccgtcggggcacctctctcaaagaaaggttgtgccaggacggtttttattacggcggcgtaagcagcgcgagctacgctgcctccatcgccgccgcagtcgcccctaagaagaaaattcagactaccctgagcaacctggtcgtcaaaggtactaaccttatcatccaggaaacaagacagaaactaggcattccgcagaaatctcttagttgcagcgaggagttcaaagagctcatggacctcccgacatgcggcgcaaggaaccttaagcagcacctggccaaggcaacagccagtggcattatggggtccccaaaaccagccatcaagagcatttctgcctctgctctattgaagcagcagaaacagcggatgttagaaatgcgccgcagaaagagtgaggagatccagaagaggtttctccaatcttctagtgaggtggagagtcccgccgttcccagctcgtcaagacagccccccgcccagcctcctaggactggcagcgagtttccccgcttggagggcgcccctgccactatgactcctaaattgggaaggggtgtgttagagggcgacgatgtactgttttacgacgagtcaccgcctcctaggccgaaattgtccgcgcttgcagaagccaaaaaattggccgctataaccaagttacgggcaaaaggccaagtgttgacaaagaccaaccccaacagcattaagaagaagcagaaggatccccaagatattctcgaggtgaaggaaagagttgagaagaataccatgttctcttcccaggccgaggatgaactggagcctgccaggaaaaagcgtcgagagcagttggcctatttagagtcagaggagttccaaaaaatcctcaaggccaaatcgaagcatactggcattctgaaggaggccgaagctgagatgcaggagcgctactttgagcctctggtgaaaaaagagcagatggaggaaaaaatgcgcaatattcgggaggtgaagtgtcgagttgtcacatgcaaaacatgcgcgtacacccacttcaagctgttggaaacctgcgtgagcgaacaacacgagtatcactggcatgatggggttaaacgcttcttcaagtgtccatgcggcaaccgcagcatttctttggatagattgccgaataagcattgctcaaattgcggtctgtacaagtgggaacgggatggcatgttgaaggagaaaaccggtcccaaaatcgggggtgagaccctgctgcctagaggcgaagagcacgcgaaattcctcaactccttgaagtag

SEQ ID NO: 256805 - DNA, 2628 bp, Artificial Sequence
  derived and/or modified sequence
atggatgaggaggaggacaacctgagcctgctgacagccctgctggaggagaatgaaagtgccctggactgcaacagcgaggagaacaacttcctgaccagagaaaatggagagccagatgcctttgatgagctgtttgatgctgatggagatggagagagctacacagaggaggctgatgatggagagaccggggagaccagagatgagaaggagaacctggccaccctgtttggagacatggaggacctgacagatgaggaggaggtgcctgccagccagagcacagaaaatagagtgctgcctgccccagccccccggcgggagaagaccaatgaggagctgcaggaggagctgaggaacctgcaggagcagatgaaggccctgcaggagcagctgaaggtgaccaccatcaagcagacagccagccctgcccggctgcagaagagccctgtggagaagagcccccggccccccctgaaggagaggagagtgcagaggatccaggagagcacctgcttctctgctgagctggatgtgcctgccctgcccaggaccaagagggtggcccggacccccaaggccagccccccagaccccaagagcagcagcagcaggatgaccagcgcccccagccagcccctgcagaccatcagcaggaacaagcccagcggcatcacccggggccagatcgtgggcaccccaggcagcagcggggagaccacccagcccatctgtgtggaggccttcagcggcctgcggctgcggcggccccgggtgagcagcacagagatgaacaagaagatgacaggcaggaagctgatccggctgagccagatcaaggagaagatggcccgggagaagctggaggagattgactgggtgacctttggagtcatcctgaagaaggtgaccccccagagcgtgaacagcggcaagaccttcagcatctggaagctgaatgacctgcgggacctgacccagtgtgtgtccctcttcctgtttggagaggtgcacaaggccctgtggaagacagagcagggcaccgtggtgggcatcctgaatgccaaccccatgaagcccaaggatggcagcgaggaggtgtgcctgagcattgaccacccccagaaggtgctgatcatgggagaggccctggacctgggcacctgcaaggccaagaagaagaatggagagccctgcacccagacagtgaacctgcgggactgtgagtactgccagtaccacgtgcaggcccagtacaagaagctgagcgccaagagagctgacctgcagagcaccttcagcggcggccgcatccccaagaagtttgcccggcggggcaccagcctgaaggagcggctgtgccaggacggcttctactatggaggagtgagcagcgccagctatgctgccagcattgctgctgctgtggcccccaagaagaagatccagaccaccctgagcaacctggtggtgaagggcaccaacctgatcatccaggagacccggcagaagctgggcatcccccagaagagcctgagctgcagcgaggagttcaaggagctgatggacctgcccacctgtggggccaggaacctgaagcagcacctggccaaggccacagccagcggcatcatgggcagccccaagccagccatcaagagcatcagcgccagcgccctgctgaagcagcagaagcagaggatgctggagatgagaagaaggaagtctgaggagatccagaagcgcttcctgcagagcagcagcgaggtggagagccctgctgtgcccagcagcagccggcagcccccagcccagccccccaggacaggcagcgagttcccccggctggagggcgccccagccaccatgacccccaagctgggccggggcgtgctggagggagatgatgtgctcttctatgatgagagccccccaccccggcccaagctgagcgccctggccgaggccaagaagctggccgccatcaccaagctgcgggccaagggccaggtgctgaccaagaccaaccccaacagcatcaagaagaagcagaaggacccccaggacatcctggaggtgaaggagcgggtggagaagaacaccatgttcagcagccaggctgaagatgagctggagcccgccaggaagaagagaagagagcagctggcctacctggagagcgaggagttccagaagatcctgaaggccaagagcaagcacacaggcatcctgaaggaggccgaggccgagatgcaggagcgctactttgagcccctggtgaagaaggagcagatggaggagaagatgaggaacatccgggaggtgaagtgccgggtggtgacctgcaagacctgtgcctacacccacttcaagctgctggagacctgtgtgtctgagcagcacgagtaccactggcatgatggagtgaagcgcttcttcaagtgcccctgtggcaacagaagcatcagcctggaccggctgcccaacaagcactgcagcaactgtggcctgtacaagtgggagagagatggcatgctgaaggagaagacaggccccaagattggaggagagaccctgctgcccagaggagaggagcacgccaagttcctgaacagcctgaagtag

SEQ ID NO: 256806 - DNA, 4546 bp, Artificial Sequence
  derived and/or modified sequence
ggttggaattttggcgggttcagctgtgaacgaagaaggcgtcccggcatcggccaagattctacattgctcatctgggcatctgagcctccttcgaagtttcctgtcacaactgtcctcttgacagcatggatgaggaggaagacaatctgtctctgctgaccgcactgctggaagaaaatgagtcagccttggattgtaattcagaagaaaataacttcttgacgcgggaaaatggcgagcccgacgcatttgatgagctctttgatgccgacggcgacggtgaatcttatacagaagaggctgatgatggagaaacaggagagacaagagacgaaaaggaaaatctggccactctctttggagatatggaggacttaacagatgaagaagaagttcccgcatcacagtcaactgaaaatagggtcctccctgctcctgcccccaggcgagagaaaacgaatgaagagttgcaagaggaattaaggaatttgcaagagcaaatgaaggccttacaagagcagctaaaagtaacaacaattaaacagacagcaagcccagcccgtctgcaaaaatcccctgtagagaagtctccccggccacctcttaaggagaggagagttcagagaattcaggagtcaacatgcttttctgcggagcttgatgtccctgcgctaccaagaaccaagagggtggctcgaacaccaaaggcttcacctccagatcccaaaagctcatcttcaaggatgacaagtgcaccctcccaacccctacagacgatttctcggaacaaacctagtgggataactagaggtcaaattgtggggaccccaggaagttctggggaaacgactcaacccatctgtgtggaagccttctctggtctgcggctcaggcggcctcgagtatcctccacagaaatgaacaagaaaatgaccggccgaaaactgatcagactgtctcagatcaaggaaaagatggccagagagaagctggaagaaatagattgggtgacatttggggttatattgaagaaggttacgccacagagtgtgaatagtggaaaaaccttcagcatatggaaactgaatgatcttcgtgacctgacacaatgtgtgtccttgttcttatttggagaagttcacaaagcgctctggaagacggagcaggggactgtcgtagggatcctcaatgccaaccccatgaagcccaaggatggttcagaggaggtgtgtttatctatcgatcatcctcagaaggtcttaattatgggtgaagctcttgacctgggaacctgtaaagccaagaagaagaatggagagccgtgcacgcagactgtgaatttgcgtgactgtgagtactgtcagtaccatgtccaggctcagtacaagaagctcagcgcaaagcgtgcggatctgcagtccaccttctctggaggacgaattccaaagaagtttgcccgcagaggcaccagcctcaaagaacggctgtgccaagatggcttttactacggaggggtttcttctgcctcgtatgcagcttcaattgcagcagctgtggctcctaagaagaagattcaaaccactctgagtaatctggttgttaagggcacaaacttgatcatccaggaaacacggcaaaaactcggaataccccagaagagcctgtcttgctctgaggagttcaaggaactgatggacctgccgacgtgtggagccaggaacttaaaacaacatttagccaaagccacagcttcagggattatggggagcccaaaaccagccatcaagtccatctcggcctcagcactcttgaagcaacagaagcagcggatgttggagatgaggagaaggaaatcagaagaaatacagaagcgatttctgcagagctcaagtgaagttgagagcccagctgtgccatcttcatcaagacagccccctgctcagcctccacggacaggatccgagttccccaggctggagggagccccggccacaatgacgcccaagctggggcgaggtgtcttggaaggagatgatgttctcttttatgatgagtcaccaccaccaagaccaaaactgagtgctttagcagaagccaaaaagttagctgctatcaccaaattaagggcaaaaggccaggttcttacaaaaacaaacccaaacagcattaagaagaaacaaaaggaccctcaggacatcctggaggtgaaggaacgtgtagaaaaaaacaccatgttttcttctcaagctgaggatgaattggagcctgccaggaaaaaaaggagagaacaacttgcctatctggaatctgaggaatttcagaaaatcctaaaagcaaaatcaaaacacacaggcatcctgaaagaggccgaggctgagatgcaggagcgctactttgagccactggtgaaaaaagaacaaatggaagaaaagatgagaaacatcagagaagtgaagtgccgtgtcgtgacatgcaagacgtgcgcctatacccacttcaagctgctggagacctgcgtcagtgagcagcatgaataccactggcatgatggtgtgaagaggtttttcaaatgtccctgtggaaacagaagcatctccttggacagactcccgaacaagcactgcagtaactgtggcctctacaaatgggaacgggacggaatgctaaaggaaaagactggtccaaagataggaggagaaactctgttaccaagaggagaagaacatgctaaatttctgaacagccttaaataacccgaacttcagacattttcccacagacttcctggcctcctgtgactctggaaagcaaaggattggctgtgtattgtccattgattcctgattgacgccgtcaaaaacaaatgcttgttaagcccataagctttgcctgcttactttctgccattgggttggtttgataccacatttaacattgacatttaagtggaaaaccaagttatcattgtcttttctaagctcagtgtggatgattgcattacttcattcactgaagtttttgcccaaaaattggaaggtaaacagagagctatgtttctgtatcttttggttatagagtgttcacttctttatcataacaaaattctagtgtttatacgaacacccagaggcaaaagaatttggcttaattctcactccaggtaagtagcttaacttctgggcttcagttttctcatctgtaaaatcaggaagattggactaagtgatcctgaaatgtattttttagcactggatttctacaaataataaaactttcccatctagataatgatgatcacatagtcttgatgtacggacattaaaagccagatttcttcattcaattctgttatctctgttttactctttgaaattgatcaagccactgaatcactttgcatttcagtttatatatatagagagaaagaaggtgtctgctcttacattattgtggagccctgtgatagaaatatgtaaaatctcatattattttttttttaatttttttattttttatgacagggtctcactatgtcaccctggctggagtgcagtagtgcgatcgcggcacactgcagccttggcttccctgggctcaagcagtcctcccacctcagtctcccaaatagctaggactacaggcgtgcgtgaccaagcccagctaatttttgcattttttgtagagatggggttttgccatgttgctcaggctggtctcaaactcctgagcactagcaatccacccacctctgtttccaaaaaaaaaaaaaaaatgaaaggtcaacccctatgcaaattaccacagcaaaggtttcattcaggagattcttccatctgggcaacctggttttccaaatatcatttgacctaagtgaatgttgatactagctaaagattgggtaaattggttgaattattgtattgaagcttgagctgtagctaaaagtaatttaggtttcccctaagatgttattatgttagggacataacacttttgggaggttgttgtgggagatggttgatttaggttttcaaaagctagaaataaaatttacatgccttagatttcataaaattctgctctaattgggtggaaggtgctgtatctaacttgtgttcctcctaaggttatgtcctaataactattcttttaggagtatacttctactttatagaaggttgcttttctttttaattttttctaacaaagaaaagaataaagtatttattaataagaaccagaaagcacttgaaactgatgtttttaatggctcatttagggtagatttatttatctcattaacttaaaacagctatgtgtatgaaataggtcacaacagaacttgaacaccaggttggtgtctgagcaatccctttcttatgggaaaaacaatgttcttgtttgaacagagggtatcattgcagtcagtattcacgtgtatattgttatataagttgtataatatgcttgtaaaggctgagggtgagctgtatctggatgcctttttacaatttgattttaacttttaaaataaatttaaaac

SEQ ID NO: 256807 - DNA, 3158 bp, Artificial Sequence
  derived and/or modified sequence
gtgaacgaagaaggcgtcccggcatcgggccaagattctacattgctcatctgggcatctgagcctccttcgaagtttcctgtcacaactgtcctcttgacagcatggatgaggaggaagacaatctgtctctgctgaccgcactgctggaagaaaatgagtcagccttggattgtaattcagaagaaaataacttcttgacgcgggaaaatggcgagcccgacgcatttgatgagctctttgatgccgacggcgacggtgaatcttatacagaagaggctgatgatggagaaacaggagagacaagagacgaaaaggaaaatctggccactctctttggagatatggaggacttaacagatgaagaagaagttcccgcatcacagtcaactgaaaatagggtcctccctgctcctgcccccaggcgagagaaaacgaatgaagagttgcaagaggaattaaggaatttgcaagagcaaatgaaggccttacaagagcagctaaaagtaacaacaattaaacagacagcaagcccagcccgtctgcaaaaatcccctgtagagaagtctccccggccacctcttaaggagaggagagttcagagaattcaggagtcaacatgcttttctgcggagcttgatgtccctgcgctaccaagaaccaagagggtggctcgaacaccaaaggcttcacctccagatcccaaaagctcatcttcaaggatgacaagtgcaccctcccaacccctacagacgatttctcggaacaaacctagtgggataactagaggtcaaattgtggggaccccaggaagttctggggaaacgactcaacccatctgtgtggaagccttctctggtctgcggctcaggcggcctcgagtatcctccacagaaatgaacaagaaaatgaccggccgaaaactgatcagactgtctcagatcaaggaaaagatggccagagagaagctggaagaaatagattgggtgacatttggggttatattgaagaaggttacgccacagagtgtgaatagtggaaaaaccttcagcatatggaaactgaatgatcttcgtgacctgacacaatgtgtgtccttgttcttatttggagaagttcacaaagcgctctggaagacggagcaggggactgtcgtagggatcctcaatgccaaccccatgaagcccaaggatggttcagaggaggtgtgtttatctatcgatcatcctcagaaggtcttaattatgggtgaagctcttgacctgggaacctgtaaagccaagaagaagaatggagagccgtgcacgcagactgtgaatttgcgtgactgtgagtactgtcagtaccatgtccaggctcagtacaagaagctcagcgcaaagcgtgcggatctgcagtccaccttctctggaggacgaattccaaagaagtttgcccgcagaggcaccagcctcaaagaacggctgtgccaagatggcttttactacggaggggtttcttctgcctcgtatgcagcttcaattgcagcagctgtggctcctaagaagaagattcaaaccactctgagtaatctggttgttaagggcacaaacttgatcatccaggaaacacggcaaaaactcggaataccccagaagagcctgtcttgctctgaggagttcaaggaactgatggacctgccgacgtgtggagccaggaacttaaaacaacatttagccaaagccacagcttcagggattatggggagcccaaaaccagccatcaagtccatctcggcctcagcactcttgaagcaacagaagcagcggatgttggagatgaggagaaggaaatcagaagaaatacagaagcgatttctgcagagctcaagtgaagttgagagcccagctgtgccatcttcatcaagacagccccctgctcagcctccacggacaggatccgagttccccaggctggagggagccccggccacaatgacgcccaagctggggcgaggtgtcttggaaggagatgatgttctcttttatgatgagtcaccaccaccaagaccaaaactgagtgctttagcagaagccaaaaagttagctgctatcaccaaattaagggcaaaaggccaggttcttacaaaaacaaacccaaacagcattaagaagaaacaaaaggaccctcaggacatcctggaggtgaaggaacgtgtagaaaaaaacaccatgttttcttctcaagctgaggatgaattggagcctgccaggaaaaaaaggagagaacaacttgcctatctggaatctgaggaatttcagaaaatcctaaaagcaaaatcaaaacacacaggcatcctgaaagaggccgaggctgagatgcaggagcgctactttgagccactggtgaaaaaagaacaaatggaagaaaagatgagaaacatcagagaagtgaagtgccgtgtcgtgacatgcaagacgtgcgcctatacccacttcaagctgctggagacctgcgtcagtgagcagcatgaataccactggcatgatggtgtgaagaggtttttcaaatgtccctgtggaaacagaagcatctccttggacagactcccgaacaagcactgcagtaactgtggcctctacaaatgggaacgggacggaatgctaaaggaaaagactggtccaaagataggaggagaaactctgttaccaagaggagaagaacatgctaaatttctgaacagccttaaataacccgaacttcagacattttcccacagacttcctggcctcctgtgactctggaaagcaaaggattggctgtgtattgtccattgattcctgattgacgccgtcaaaaacaaatgcttgttaagcccataagctttgcctgcttactttctgccattgggttggtttgataccacatttaacattgacatttaagtggaaaaccaagttatcattgtcttttctaagctcagtgtggatgattgcattacttcattcactgaagtttttgcccaaaaattggaaggtaaacagagagctatgtttctgtatcttttggttatagagtgttcacttctttatcataacaaaattctagtgtttatacgaacacccagaggcaaaagaatttggcttaattctcactccaggtaagtagcttaacttctg

SEQ ID NO: 256808 - DNA, 2628 bp, Artificial Sequence
  derived and/or modified sequence
atggacgaggaggaggacaacctgagcctgctgaccgccctgctggaagaaaacgaatccgccttggattgtaattccgaggaaaacaattttctgactagggagaacggtgagccagacgcctttgacgagctgttcgacgccgacggtgatggtgaatcttacaccgaagaggctgatgatggagagaccggggagaccagagacgaaaaagagaatcttgccacactgttcggtgacatggaagatctgactgacgaagaggaggttccggccagccagtctaccgagaaccgagttcttccagccccggcaccacgaagggagaagacgaacgaggagctgcaagaggagctgagaaacttacaagagcaaatgaaagcactgcaagagcagttaaaggtgactaccataaaacagacagcaagcccagctcggctgcaaaagagtcccgtggaaaaatcccccagaccccccctcaaggagagaagagtgcagaggatccaggaatcaacgtgttttagcgctgaactcgacgttccagctctccctagaactaagcgggtcgcgcggacgcccaaagcctcccctcctgatccgaagagttcctccagccgcatgacctcagcgccttctcagccattgcagacgataagcaggaataagccttctggaatcacacgaggccagatcgtggggaccccaggttcttcaggagaaacaacacagcctatctgtgtagaggcctttagcggactaaggttgcgcagacctagagtgtcatccaccgagatgaataaaaaaatgacagggcggaagttgatacggctgtctcagatcaaagaaaagatggcacgcgagaagctcgaagagattgactgggtcacattcggtgtgattcttaagaaggttacgccacagagtgttaatagcggaaagaccttcagtatctggaagcttaacgacttgagagatctcacccagtgcgtgtcgctgttcctgtttggtgaggtacacaaggctctgtggaaaacagaacagggcaccgtggtggggattctgaatgcaaaccctatgaaacccaaagatggctccgaggaagtttgtctctcaattgaccaccctcagaaggtgctaattatgggggaggcactggacctcggaacctgcaaggccaaaaagaagaatggagagccctgcacccaaacagtcaacctgagagattgtgaatattgccagtatcatgtacaggctcaatacaaaaaattgtccgctaaaagggccgaccttcagtccacattttccggcggccgcattcctaagaagtttgccaggagggggactagcttaaaagagcgcttgtgccaggatggcttctactacggtggggtatcatcggcttcctacgctgcttccatcgccgccgctgtggcccctaaaaagaaaatacagaccacactttctaacctcgtggttaaaggtactaatttgattatccaggagaccaggcagaagctgggaatccctcaaaaatctctgtcttgctctgaggaatttaaggaattgatggatctgcctacctgtggtgctagaaaccttaagcaacacttggctaaggcgactgcatccggaatcatgggcagccctaagccagccattaaatctatctccgcatccgctttgctaaagcagcagaaacagagaatgctggaaatgagaaggcgcaaatcggaagagattcaaaagcgtttcctgcagtcttcttccgaggtcgagagccccgctgtgcccagctccagtcgacagcctccagcccagcccccgcgtacaggatctgagttccccagactagagggtgcccctgcaacgatgacaccgaaacttggccggggagtgctggaaggcgatgacgtccttttttatgatgaaagtcccccgccacgtccaaagctgtctgcactagcagaggccaagaaattggctgcaattacaaagcttcgggccaaagggcaggttctgacaaagaccaacccaaatagcattaagaaaaagcagaaggacccccaggacatactcgaggtcaaggaaagggtggaaaagaacactatgttcagcagccaggcagaagatgaactggaacctgctcggaaaaagcgacgggaacaattggcctacctcgagagtgaagaattccaaaagattctgaaggctaaaagcaagcacacaggtattctgaaagaagcggaggctgaaatgcaggagcgctacttcgaacctctcgtgaaaaaggaacagatggaagagaagatgcgcaacatacgcgaagtcaagtgccgcgtcgtgacttgcaaaacctgcgcctacacacatttcaagcttctagagacgtgtgtgagcgaacagcatgaatatcattggcacgatggggtcaagcggttctttaagtgtccctgtgggaaccgtagcattagcctcgacaggctacctaataagcattgtagcaactgtggcctttataaatgggagcgcgacggcatgttaaaagagaagaccgggcccaaaattgggggggagaccctcctccccaggggagaagagcatgccaaattccttaactccctcaagtag

SEQ ID NO: 256809 - DNA, 2628 bp, Artificial Sequence
  derived and/or modified sequence
atggacgaggaggaggacaacctgagcctgctgaccgccctgctggaagagaatgagagtgcattagactgcaactccgaagaaaacaacttcctgaccagagaaaatggtgaacccgacgccttcgacgagctcttcgatgctgacggtgacggggaatcatacacggaggaagccgacgatggcgagaccggcgaaacgagagatgagaaggagaacctggctactcttttcggcgacatggaggatctgaccgatgaggaggaggtacctgcctcacaatccacagagaatagggtcctccccgctcctgcccccagaagggagaaaactaatgaggaacttcaggaagagcttcggaacctccaagagcagatgaaagctctgcaggaacaacttaaggtaacaacgattaagcagaccgcttcgcccgcgcggctgcagaagagtcccgtggagaagtcccccaggccacccctgaaagagaggcgcgtgcaaagaatacaggaaagcacttgcttctctgccgagcttgatgtgcccgctctacctcggaccaagcgcgtggccaggacccctaaggcatctcctcccgatcccaaatcttcttctagtcgcatgaccagcgccccatcgcagcctctgcagacgatctcacgcaataaacctagtggaattaccaggggccagattgttggaacacccgggtctagtggggagacgacccagcccatttgtgttgaagcatttagtggtttacgcttacgccgcccacgggtgtcatcaaccgaaatgaacaaaaagatgaccggaagaaagctcattaggctgtcccagattaaagagaagatggctagagaaaagctggaggaaatagactgggtcacctttggtgtaatacttaaaaaagttactccccagtctgtaaattccgggaagactttctctatatggaagctgaacgatctgcgtgacttgacacaatgtgtgtcactgtttctctttggggaggtgcataaggccctttggaaaaccgaacaggggacggtggttgggattctcaacgccaacccaatgaaacctaaagacggtagcgaggaggtatgtctgtctatcgaccacccccaaaaagtcctgattatgggagaggcactagacctcgggacttgtaaggccaaaaagaaaaatggtgaaccatgtactcagactgtaaatctccgtgactgcgaatattgtcaatatcacgtccaagcgcagtacaagaaattgagcgcaaagcgggctgacttgcagtctacttttagcggcggccggattccaaaaaagtttgccaggcgtggcacttcactgaaagagaggctgtgtcaggacgggttctattacggaggtgtgtcctccgcctcctatgcagcgtcgatcgcagccgccgtggcacccaagaaaaagatccagactacactgagtaaccttgttgttaagggcacaaatctgatcatacaggaaacaaggcagaaattaggtataccacagaagagtctgtcatgttcagaagagttcaaagaactgatggatctgcccacttgcggagctcggaacctcaagcagcacctggcaaaggctacagctagcgggattatgggatccccaaagcccgccatcaaatccattagcgcatctgccctgctcaaacagcagaaacaacggatgttggagatgcgaagacgcaaaagcgaggagatccaaaaaaggttcctgcaaagttcaagtgaggtagagagtcctgccgtgccctcttccagccggcagccccccgcacagccgccccgcaccggctctgagttccctcggctggaaggtgcgccagctacgatgacccctaagttagggcgaggggttctggagggagacgatgtgttattttacgatgagtcccctcctcctagacctaaactttctgcactcgccgaggccaagaagctcgccgcgataacaaagctgcgagctaagggtcaggtgctgactaagactaaccctaactctatcaagaaaaaacagaaagacccgcaggacattttggaggtaaaggaaagggtggagaagaatactatgttttcctcacaagccgaggatgaactggagcccgctcgtaagaaacggagggagcagctggcgtaccttgagtccgaggaattccagaaaatcctgaaagcgaaatcaaaacacacagggatcttgaaagaggctgaggccgaaatgcaggagcgatattttgaaccgctggtgaagaaagaacagatggaggagaaaatgcgaaatatcagagaagtgaaatgtcgggtggtcacctgcaaaacatgtgcttacacgcacttcaagctgctagagacatgcgtttccgagcagcatgagtaccattggcacgacggtgtaaagcgattcttcaagtgtccctgcggcaaccgatccataagcctcgatagactgccaaacaagcactgctccaactgtgggctatataagtgggagcgggacggaatgctgaaggaaaagacaggtccaaagatcggcggcgagacgctcctgccaaggggagaggaacatgccaaattcctaaatagcctgaaatag

SEQ ID NO: 256810 - DNA, 2628 bp, Artificial Sequence
  derived and/or modified sequence
atggacgaggaggaagacaatctttcattgctcacagccttgctcgaagagaacgagtccgctcttgactgcaatagcgaagaaaacaattttctgacgcgcgagaatggcgagcccgacgcctttgatgaactgttcgatgctgatggggatggagagtcttataccgaggaagcagacgacggagagacaggcgagacaagggacgagaaagaaaacctcgcgaccctcttcggggacatggaggatctgacagacgaggaggaggtgcctgcatcccagagtacagaaaaccgggtcctgcccgctcccgcacccagaagagagaagactaatgaagagctccaggaggaactgagaaacctgcaggagcagatgaaggccttacaagaacaattgaaagtcacgactatcaaacaaactgcctctcccgcacggctccagaaaagcccggtggagaaatcaccaagacctccactgaaagaacgacgggttcagcggatacaggagagcacttgcttttcggccgagttagacgtcccagccctgcccagaacaaaaagggtcgccaggacccccaaagcatcacctccggatccgaaaagtagttcctcccgaatgacctctgccccaagccagcccctccagacaatctccaggaataagccgtctggcatcacaagaggccagatcgtcggcactcccggatcttctggcgaaactacgcagcccatatgcgtggaggctttctcagggcttcggctgagacgtccgagggtgtcctccaccgaaatgaacaaaaaaatgacaggacgcaaactgattagattgtctcagataaaggagaagatggcacgggaaaaattagaggagatcgactgggtgacatttggagtgatcctgaagaaggtgacccctcagtcagtgaactccggaaagacctttagcatatggaagctgaacgatctgagagacctgacccagtgtgtctcactgtttttgttcggagaagtgcacaaggccctgtggaagaccgagcagggaaccgttgtcggtattttgaacgccaacccaatgaagcctaaggatggctcggaagaagtttgtctgtcaattgaccacccccaaaaagtcctcatcatgggtgaggcactcgatttggggacctgcaaggccaaaaagaagaatggagaaccttgcacacagacagtgaacctcagagattgcgaatactgccagtaccatgtccaagcccagtacaagaaactgtccgctaagagagccgacctgcagagcaccttttccggaggtagaataccaaagaaattcgcgcgaagaggtacctcattgaaagagcggctgtgtcaggatgggttctactatggaggggtcagttccgcgtcttacgctgcctctattgctgccgctgtcgccccaaaaaaaaaaatccagacgactcttagtaacctcgtggtcaagggcacaaacctcatcatccaggagactcgccagaagctcggaattcctcagaagagcttgtcctgcagtgaagagttcaaggaactgatggacctaccaacttgcggtgctcggaacttgaaacagcaccttgccaaggctactgcatctggtatcatgggcagccccaaacccgctattaagtctattagtgcatccgccctgctgaagcagcagaagcagagaatgctcgagatgcgaagaagaaagtccgaggaaatccagaaacggttcctccaatctagctcagaggtcgagagccccgcagtcccttccagcagccggcagcctccagcacagccccctaggaccgggagcgagtttcccagactcgagggcgctcccgcaacaatgactccaaaacttgggaggggtgtcctcgaaggcgatgatgtcctgttctacgatgagtctccacctcctcggcctaaattgagcgctcttgccgaggccaaaaaactcgcagctataactaaattgcgggctaaggggcaggtcctgactaagacaaaccccaatagcataaaaaagaaacagaaggacccacaagatattttggaagtaaaggagagggtcgaaaagaatacaatgttcagctcgcaagccgaggacgagcttgagcctgccaggaaaaaaagaagagagcagctggcctacctcgagtccgaggaatttcagaagatactgaaggccaaatctaaacataccggcatcttaaaggaggcggaggcagagatgcaggaaagatacttcgaacccctcgttaagaaggaacagatggaagagaagatgcgaaatattcgtgaggtaaaatgtagagttgtcacttgtaagacctgtgcgtacacacatttcaaactgctggagacctgtgttagtgagcagcacgagtatcactggcacgatggcgttaaaagattcttcaaatgcccctgcggcaaccgtagcatctcccttgatcgactgccaaataaacactgcagtaattgcggactttacaagtgggaaagggatggcatgttgaaagagaaaactggccctaagatcggaggtgaaactctgttacctcggggagaggagcacgccaagttcctgaatagtctgaagtag

SEQ ID NO: 256811 - DNA, 2628 bp, Artificial Sequence
  derived and/or modified sequence
atggacgaagaggaggacaacctgtctttactgacagccctgcttgaggaaaacgaatctgccctggactgcaactctgaggaaaataactttctgactcgtgagaacggggaacccgacgcttttgacgagctgttcgacgccgacggagatggcgagtcttatacagaagaagccgacgatggtgaaacgggagagactcgggatgaaaaagagaacctggccacattatttggcgatatggaggatctgaccgatgaagaggaggttcctgcgtcacagagcaccgagaacagagtgttacccgcacccgctcccaggagggaaaagacgaacgaagaactgcaggaggagctccggaacctgcaggaacagatgaaggcgttgcaggagcagctgaaggttacgactataaaacagaccgcctctccagcacggctgcagaagtcccctgtcgagaaaagtcccagacctccactcaaagagcgcagggtccagagaatccaagaatctacatgcttctccgccgaactcgacgtgccggcacttcctcgcaccaaaagagtggctaggactccaaaagcttctccgccagaccccaagagctcctcatcgcgaatgacttctgctccttcacagccattgcagaccatctctagaaacaagccatccggcattacccgtggtcagatagtgggcactcccggatcatccggcgagaccacacaacccatctgtgttgaggcattttcgggtctccgactgcggaggcctcgcgtttcaagcaccgagatgaacaagaagatgaccggaaggaaactgattcggctgtctcagatcaaagagaagatggctcgcgagaagctggaagaaatagattgggtgacctttggggtgatcctcaagaaagtgacaccccaatctgtgaattcagggaaaaccttcagcatttggaagctgaatgacctcagagacctgacccaatgtgtgagcctgttcctgtttggcgaggtacacaaggcactctggaagactgagcagggtaccgtggtcggcatcctgaacgctaacccgatgaaacctaaggacggtagcgaggaagtctgtctctctatcgatcatccccagaaagtgctcatcatgggcgaggccctcgatctcggcacctgcaaggccaagaaaaagaacggcgaaccgtgcactcagaccgtgaatttgagagactgtgaatactgtcagtatcacgtgcaggcacagtacaagaaattatccgctaaacgggcagacctccagtcaactttctccgggggacgtatacctaagaagttcgctaggcgcggtacttcattgaaagagcggctgtgtcaggatggtttctattacggaggagtgagtagcgcctcatatgcggctagcattgccgcagcggtggcaccaaaaaagaagatccagacaacgctgtctaacttagtggttaaaggcacaaatttgatcatacaggaaaccaggcaaaagctcgggatccctcagaagtcactctcatgctccgaggaattcaaggagctgatggacttgccgacctgtggcgcacggaatctgaagcagcatctggccaaggcgacagcctccggcataatgggcagcccaaaaccggcaatcaagagtatctccgcctctgcattgctcaagcagcaaaaacaacgcatgctggagatgcgtagaagaaagagcgaggagatccagaaacggtttcttcagtcctcctcagaagtcgaatccccggctgtgccttcctcaagcagacagcctccagcgcagccaccacgcaccgggtctgaatttccgcgacttgagggtgcacccgctaccatgacccctaaacttggcagaggcgtgctagaaggtgacgatgtcttgttctacgatgagtctcccccacccagacccaagttgagcgctcttgccgaagcaaagaagcttgccgctattacgaagttacgggctaagggtcaggtgttgacgaaaacaaaccccaacagcataaagaagaagcagaaagaccctcaggatattctagaagttaaggagagagtggagaagaacactatgttcagctcacaggccgaagatgaacttgagccggcacggaaaaaacgacgagaacagcttgcttatctggaatcagaggagtttcagaaaattctgaaagctaagagtaagcatacgggaatcctgaaagaggccgaggccgaaatgcaagagcggtattttgaacccctggtgaagaaggagcagatggaggagaagatgcgaaacatacgggaagttaaatgccgagttgtgacctgtaagacatgcgcttacacacattttaaattacttgagacctgcgtgtctgagcagcacgaataccattggcatgacggcgtcaagcgtttcttcaagtgtccctgtgggaatcggagtatcagcctcgaccgcttgcctaataaacactgtagcaactgtgggctttataagtgggagcgtgatggcatgcttaaagagaagaccgggcctaagattggtggcgaaacgttgctgcccaggggcgaggagcatgctaaattcctaaactctctgaagtag

SEQ ID NO: 256812 - DNA, 2628 bp, Artificial Sequence
  derived and/or modified sequence
atggacgaggaggaggacaacctgagcctgctgaccgccctgctggaggagaacgagagcgccctggactgcaacagcgaggagaacaacttcctgaccagagagaacggcgagcccgacgccttcgacgagctgttcgacgccgacggcgacggcgagagctacaccgaggaggccgacgacggcgagaccggcgagaccagagacgagaaggagaacctggccaccctgttcggcgacatggaggacctgaccgacgaggaggaggtgcccgccagccagagcaccgagaacagagtgctgcccgcccccgcccccagaagagagaagaccaacgaggagctgcaggaggagctgagaaacctgcaggagcagatgaaggccctgcaggagcagctgaaggtgaccaccatcaagcagaccgccagccccgccagactgcagaagagccccgtggagaagagccccagaccccccctgaaggagagaagagtgcagagaatccaggagagcacctgcttcagcgccgagctggacgtgcccgccctgcccagaaccaagagagtggccagaacccccaaggccagcccccccgaccccaagagcagcagcagcagaatgaccagcgcccccagccagcccctgcagaccatcagcagaaacaagcccagcggcatcaccagaggccagatcgtgggcacccccggcagcagcggcgagaccacccagcccatctgcgtggaggccttcagcggcctgagactgagaagacccagagtgagcagcaccgagatgaacaagaagatgaccggcagaaagctgatcagactgagccagatcaaggagaagatggccagagagaagctggaggagatcgactgggtgaccttcggcgtgatcctgaagaaggtgaccccccagagcgtgaacagcggcaagaccttcagcatctggaagctgaacgacctgagagacctgacccagtgcgtgagcctgttcctgttcggcgaggtgcacaaggccctgtggaagaccgagcagggcaccgtggtgggcatcctgaacgccaaccccatgaagcccaaggacggcagcgaggaggtgtgcctgagcatcgaccacccccagaaggtgctgatcatgggcgaggccctggacctgggcacctgcaaggccaagaagaagaacggcgagccctgcacccagaccgtgaacctgagagactgcgagtactgccagtaccacgtgcaggcccagtacaagaagctgagcgccaagagagccgacctgcagagcaccttcagcggcggcagaatccccaagaagttcgccagaagaggcaccagcctgaaggagagactgtgccaggacggcttctactacggcggcgtgagcagcgccagctacgccgccagcatcgccgccgccgtggcccccaagaagaagatccagaccaccctgagcaacctggtggtgaagggcaccaacctgatcatccaggagaccagacagaagctgggcatcccccagaagagcctgagctgcagcgaggagttcaaggagctgatggacctgcccacctgcggcgccagaaacctgaagcagcacctggccaaggccaccgccagcggcatcatgggcagccccaagcccgccatcaagagcatcagcgccagcgccctgctgaagcagcagaagcagagaatgctggagatgagaagaagaaagagcgaggagatccagaagagattcctgcagagcagcagcgaggtggagagccccgccgtgcccagcagcagcagacagccccccgcccagccccccagaaccggcagcgagttccccagactggagggcgcccccgccaccatgacccccaagctgggcagaggcgtgctggagggcgacgacgtgctgttctacgacgagagccccccccccagacccaagctgagcgccctggccgaggccaagaagctggccgccatcaccaagctgagagccaagggccaggtgctgaccaagaccaaccccaacagcatcaagaagaagcagaaggacccccaggacatcctggaggtgaaggagagagtggagaagaacaccatgttcagcagccaggccgaggacgagctggagcccgccagaaagaagagaagagagcagctggcctacctggagagcgaggagttccagaagatcctgaaggccaagagcaagcacaccggcatcctgaaggaggccgaggccgagatgcaggagagatacttcgagcccctggtgaagaaggagcagatggaggagaagatgagaaacatcagagaggtgaagtgcagagtggtgacctgcaagacctgcgcctacacccacttcaagctgctggagacctgcgtgagcgagcagcacgagtaccactggcacgacggcgtgaagagattcttcaagtgcccctgcggcaacagaagcatcagcctggacagactgcccaacaagcactgcagcaactgcggcctgtacaagtgggagagagacggcatgctgaaggagaagaccggccccaagatcggcggcgagaccctgctgcccagaggcgaggagcacgccaagttcctgaacagcctgaagtag

SEQ ID NO: 256813 - protein, 374 aa, Artificial Sequence
  derived and/or modified sequence
MAAPALGLVCGRCPELGLVLLLLLLSLLCGAAGSQEAGTGAGAGSLAGSCGCGTPQRPGAHGSSAAAHRYSREANAPGPVPGERQLAHSKMVPIPAGVFTMGTDDPQIKQDGEAPARRVTIDAFYMDAYEVSNTEFEKFVNSTGYLTEAEKFGDSFVFEGMLSEQVKTNIQQAVAAAPWWLPVKGANWRHPEGPDSTILHRPDHPVLHVSWNDAVAYCTWAGKRLPTEAEWEYSCRGGLHNRLFPWGNKLQPKGQHYANIWQGEFPVTNTGEDGFQGTAPVDAFPPNGYGLYNIVGNAWEWTSDWWTVHHSVEETLNPKGPPSGKDRVKKGGSYMCHRSYCYRYRCAARSQNTPDSSASNLGFRCAADRLPTMD

SEQ ID NO: 256814 - DNA, 1125 bp, Artificial Sequence
  derived and/or modified sequence
atggccgcccccgccctgggcctggtgtgcggcagatgccccgagctgggcctggtgctgctgctgctgctgctgagcctgctgtgcggcgccgccggcagccaggaggccggcaccggcgccggcgccggcagcctggccggcagctgcggctgcggcaccccccagagacccggcgcccacggcagcagcgccgccgcccacagatacagcagagaggccaacgcccccggccccgtgcccggcgagagacagctggcccacagcaagatggtgcccatccccgccggcgtgttcaccatgggcaccgacgacccccagatcaagcaggacggcgaggcccccgccagaagagtgaccatcgacgccttctacatggacgcctacgaggtgagcaacaccgagttcgagaagttcgtgaacagcaccggctacctgaccgaggccgagaagttcggcgacagcttcgtgttcgagggcatgctgagcgagcaggtgaagaccaacatccagcaggccgtggccgccgccccctggtggctgcccgtgaagggcgccaactggagacaccccgagggccccgacagcaccatcctgcacagacccgaccaccccgtgctgcacgtgagctggaacgacgccgtggcctactgcacctgggccggcaagagactgcccaccgaggccgagtgggagtacagctgcagaggcggcctgcacaacagactgttcccctggggcaacaagctgcagcccaagggccagcactacgccaacatctggcagggcgagttccccgtgaccaacaccggcgaggacggcttccagggcaccgcccccgtggacgccttcccccccaacggctacggcctgtacaacatcgtgggcaacgcctgggagtggaccagcgactggtggaccgtgcaccacagcgtggaggagaccctgaaccccaagggcccccccagcggcaaggacagagtgaagaagggcggcagctacatgtgccacagaagctactgctacagatacagatgcgccgccagaagccagaacacccccgacagcagcgccagcaacctgggcttcagatgcgccgccgacagactgcccaccatggactag

SEQ ID NO: 256815 - DNA, 1125 bp, Artificial Sequence
  derived and/or modified sequence
atggccgccccagctctggggctggtttgcggaaggtgtcccgaactggggctggtcctgctgctccttctgctctctctgctctgcggtgcagccggatcccaggaggcggggactggtgcgggagctggctctctggcgggctcatgcggctgtggtacccctcagaggcctggcgcacacggttcttcggcagctgctcatagatatagtcgcgaggctaatgcaccgggcccagtgccaggggaacggcagctggctcattctaagatggtgcctatccccgccggtgtcttcaccatggggaccgacgatccccagattaagcaagacggcgaggctcctgctcgacgggttacaatcgacgctttctacatggacgcttatgaagtgtctaatactgagtttgaaaaattcgtgaatagcacaggctatctaactgaagccgagaaatttggggactctttcgtgtttgagggaatgttatcagaacaggttaaaacaaatattcagcaagctgtggctgccgctccctggtggctgccagtgaaaggagccaactggaggcacccagaaggcccagattcaactatcctacatcgccccgatcatccagttcttcatgtgtcatggaacgacgccgtcgcttattgcacatgggcaggtaagcggttgcccacggaggccgaatgggaatattcatgcagagggggccttcacaaccgtctgtttccatgggggaacaaactgcagcccaagggtcagcactacgccaacatttggcaaggggagttccccgtcaccaatacgggcgaggatgggtttcagggaaccgctccagtggatgcattccctcctaatgggtacggcctgtacaatatcgtcggcaacgcgtgggagtggacaagcgattggtggactgtgcatcatagtgtggaggagaccctcaaccctaaggggcccccaagcggtaaagatcgggtgaagaaggggggcagttatatgtgtcatcgctcttattgctaccgctaccggtgtgctgccaggtctcagaatacccctgactcctccgcctctaatctaggatttcgctgtgccgctgacagactgcctacaatggactag

SEQ ID NO: 256816 - DNA, 1125 bp, Artificial Sequence
  derived and/or modified sequence
atggccgccccagccctgggcctggtgtgtggccgctgcccagagctgggcctggtgctgctgctgctgctgctgagcctgctgtgtggggccgccggcagccaggaggccggcactggagctggagctggcagcctggccggcagctgtggctgcggcaccccccagaggcctggggcccacggcagcagcgctgctgcccaccgctacagccgggaggccaatgcccctggccctgtgcctggagagcggcagctggcccacagcaagatggtgcccatcccagctggggtcttcaccatgggcacagatgacccccagatcaagcaggatggagaggccccagcccggcgggtgaccattgatgccttctacatggatgcctatgaggtgagcaacacagaatttgagaagtttgtgaacagcacaggctacctgacagaagctgagaagtttggagacagctttgtgtttgagggcatgctgtctgagcaggtgaagaccaacatccagcaggccgtggccgccgccccctggtggctgcctgtgaagggggccaactggaggcaccctgagggccctgacagcaccatcctgcacaggccagaccaccctgtgctgcacgtgtcctggaatgatgctgtggcctactgcacctgggccggcaagaggctgcccacagaagctgagtgggagtacagctgccggggcggcctgcacaacagactcttcccctggggcaacaagctgcagcccaagggccagcactacgccaacatctggcagggcgagttccctgtgaccaacacaggagaagatggcttccagggcacagcccctgtggatgccttccccccaaatggctacggcctgtacaacatcgtgggcaatgcctgggagtggaccagtgactggtggacagtgcaccacagcgtggaggagaccctgaaccccaagggccccccatctgggaaggacagagtgaagaagggcggcagctacatgtgccacaggagctactgctaccgctaccgctgtgccgcccggagccagaacaccccagacagcagcgccagcaacctgggcttccgctgtgccgctgaccggctgcccaccatggactag

SEQ ID NO: 256817 - DNA, 1125 bp, Artificial Sequence
  derived and/or modified sequence
atggccgcccccgccctgggcctggtgtgcggccggtgccccgagttggggctggttctgcttctgctgttgctctctcttctgtgcggcgcagcaggcagccaagaggccggcacgggtgctggagctgggtcgttggctggaagttgtgggtgtggcactccacagagacctggtgcccatgggtcatctgctgccgctcaccggtactctagagaagccaacgctcccggtcctgtaccgggagagcgtcagctggctcacagcaaaatggttccaatcccggctggagttttcacgatgggaacagacgacccccaaatcaagcaggacggcgaggcccccgcacgtcgcgtcactatcgacgctttttatatggatgcttacgaagtgtcaaataccgaatttgagaagtttgtaaattcaacaggctatctgacggaagccgaaaagtttggtgactcctttgtttttgaaggtatgctttccgaacaggtaaagaccaacatccagcaggcagtagctgctgccccttggtggctgcccgttaagggggcaaattggagacacccagaaggacctgactccacaattttgcaccgcccagaccacccggtgttgcatgtgtcctggaacgatgccgtggcctattgcacttgggcaggcaagcggctccccacagaagccgaatgggagtacagctgccggggcgggcttcataacaggctgttcccctggggaaacaaattgcagcccaagggtcagcattatgctaacatttggcagggcgagttccctgtgactaataccggtgaggacggcttccagggcactgcaccagtagatgcttttcctccaaatgggtatgggctgtataacatcgtgggaaacgcctgggagtggaccagcgactggtggactgtgcaccatagtgtggaagagacgcttaaccccaagggacctccgtccgggaaggatagggttaagaaagggggaagttatatgtgccaccgatcctattgctataggtatcgctgtgcggcccgatcacagaatacaccggattcctcggcttcaaatctggggtttaggtgcgcagctgacaggttgcctaccatggactag

SEQ ID NO: 256818 - DNA, 1125 bp, Artificial Sequence
  derived and/or modified sequence
atggctgctcctgctttgggactggtgtgcgggaggtgcccagagttaggacttgtcttactgctcctgctcctatccttgctctgcggtgctgccggatcccaggaagcgggaactggggctggagccggatccttggccggttcttgtggctgcggaacaccacaacgccctggagcccacggctctagtgcggctgcccacaggtacagtcgggaagcaaacgccccaggtccggtcccaggcgaacgtcagctggctcacagtaagatggtgcctatacccgcaggagtttttactatggggaccgatgacccccagataaaacaagatggagaagctcctgcaaggcgtgtgaccattgacgctttttatatggatgcttatgaggtgtctaatacagagtttgagaaatttgttaattccactggatacctgaccgaggcagaaaagttcggtgattcattcgtgttcgagggtatgctatcagagcaggttaagactaacatccagcaggccgtcgccgcagctccctggtggcttcctgtcaaaggagctaactggcgtcatcctgagggccctgactccactatactgcacaggccagatcatcccgtactgcatgtaagctggaatgacgcagtggcttattgcacatgggctggaaaaagattgcccactgaggccgaatgggagtattcatgccgaggcggtctccacaatcggttattcccatggggtaacaaactgcaacccaaaggtcaacactatgcgaacatttggcagggagagtttccagtgaccaacacaggggaggacgggtttcaggggaccgcacccgtagacgccttccccccaaatggatacggtctgtacaatatcgtgggtaacgcttgggagtggaccagtgactggtggacagtacaccattctgtggaggagactctgaaccctaaaggtcccccttcaggaaaagaccgtgttaagaaagggggtagctacatgtgtcatagatcttactgctaccgctatcgctgtgcagccagatctcagaataccccagattcgtcagcctccaaccttggctttcgttgtgccgctgaccggctgcctacgatggactag

SEQ ID NO: 256819 - DNA, 2159 bp, Artificial Sequence
  derived and/or modified sequence
acgtgaccaaccgggtcacatggcccgcgggacaacatggctgcgcccgcactagggctggtgtgtggacgttgccctgagctgggtctcgtcctcttgctgctgctgctctcgctgctgtgtggagcggcagggagccaggaggccgggaccggtgcgggcgcggggtcccttgcgggttcttgcggctgcggcacgccccagcggcctggcgcccatggcagttcggcagccgctcaccgatactcgcgggaggctaacgctccgggccccgtacccggagagcggcaactcgcgcactcaaagatggtccccatccctgctggagtatttacaatgggcacagatgatcctcagataaagcaggatggggaagcacctgcgaggagagttactattgatgccttttacatggatgcctatgaagtcagtaatactgaatttgagaagtttgtgaactcaactggctatttgacagaggctgagaagtttggcgactcctttgtctttgaaggcatgttgagtgagcaagtgaagaccaatattcaacaggcagttgcagctgctccctggtggttacctgtgaaaggcgctaactggagacacccagaagggcctgactctactattctgcacaggccggatcatccagttctccatgtgtcctggaatgatgcggttgcctactgcacttgggcagggaagcggctgcccacggaagctgagtgggaatacagctgtcgaggaggcctgcataatagacttttcccctggggcaacaaactgcagcccaaaggccagcattatgccaacatttggcagggcgagtttccggtgaccaacactggtgaggatggcttccaaggaactgcgcctgttgatgccttccctcccaatggttatggcttatacaacatagtggggaacgcatgggaatggacttcagactggtggactgttcatcattctgttgaagaaacgcttaacccaaaaggtcccccttctgggaaagaccgagtgaagaaaggtggatcctacatgtgccataggtcttattgttacaggtatcgctgtgctgctcggagccagaacacacctgatagctctgcttcgaatctgggattccgctgtgcagccgaccgcctgcccactatggactgacaaccaaggaaagtcttccccagtccaaggagcagtcgtgtctgacctacattgggcttttctcagaactttgaacgatcccatgcaaagaattcccaccctgaggtgggttacatacctgcccaatggccaaaggaaccgccttgtgagaccaaattgctgacctgggtcagtgcatgtgctttatggtgtggtgcatctttggagatcatcaccatattttacttttgagagtctttaaagaggaaggggagtggagggaaccctgagctaggcttcaggaggcccgcgtcctacgcaggctctgccacaggggttagaccccaggtccgacgcttgaccttcctgggcctcaagtgccctcccctatcaaatgaagggatggacagcatgacctctgggtgtctctccaactcaccagttctaaaaagggtatcagattctattgtgacttcatagtgagaatttattatagattattttttagctattttttccatgtgtgaaccttgagtgatactaatcatgtaaagtaagagttctcttatgtattattttcggaagaggggtgtggtgactcctttatattcgtactgcactttgtttttccaaggaaatcagtgtcttttacgttgttatgatgaatcccacatggggccggtgatggtatgctgaagttcagccgttgaacacataggaatgtctgtggggtgactctactgtgctttatcttttaacattaagtgcctttggttcagaggggcagtcataagctctgtttccccctctccccaaagccttcagcgaacgtgaaatgtgcgctaaacggggaaacctgtttaattctagatatagggaaaaaggaacgaggaccttgaatgagctatattcagggtatccggtattttgtaatagggaataggaaaccttgttggctgtggaatatccgatgctttgaatcatgcactgtgttgaataaacgtatctgctaaatcagg

SEQ ID NO: 256820 - protein, 329 aa, Artificial Sequence
  derived and/or modified sequence
MKRRQKRKHLENEESQETAEKGGGMSKSQEDALQPGSTRVAKGWSQGVGEVTSTSEYCSCVSSSRKLIHSGIQRIHRDSPQPQSPLAQVQERGETPPRSQHVSLSSYSSYKTCVSSLCVNKEERGMKIYYMQVQMNKGVAVSWETEETLESLEKQPRMEEVTLSEVVRVGTPPSDVSTRNLLSDSEPSGEEKEHEERTESDSLPGSPTVEDTPRAKTPDWLVTMENGFRCMACCRVFTTMEALQEHVQFGIREGFSCHVFHLTMAQLTGNMESESTQDEQEEENGNEKEEEEKPEAKEEEGQPTEEDLGLRRSWSQCPGCVFHSPKDRN

SEQ ID NO: 256821 - protein, 330 aa, Artificial Sequence
  derived and/or modified sequence
MKRRQKRKHLENEESQETAEKGGGMSKSQEDALQPGSTRVAKGWSQGVGEVTSTSEYCSCVSSSRKLIHSGIQRIHRDSPQPQSPLAQVQERGETPPRSQHVSLSSYSSYKTCVSSLCVNKEERGMKIYYMQVQMNKGVAVSWETEETLESLEKQPRMEEVTLSEVVRVGTPPSDVSTRNLLSDSEPSGEEKEHEERTESDSLPGSPTVEDTPRAKTPDWLVTMENGFRCMACCRVFTTMEALQEHVQFGIREGFSCHVFHLTMAQLTGNMESESTQDEQEEENGNEKEEEEKPEAKEEEGQPTEEDLGLRRSWSQCPGCVFHSPKDRNS

SEQ ID NO: 256822 - DNA, 990 bp, Artificial Sequence
  derived and/or modified sequence
atgaagagaagacagaagagaaagcacctggagaacgaggagagccaggagaccgccgagaagggcggcggcatgagcaagagccaggaggacgccctgcagcccggcagcaccagagtggccaagggctggagccagggcgtgggcgaggtgaccagcaccagcgagtactgcagctgcgtgagcagcagcagaaagctgatccacagcggcatccagagaatccacagagacagcccccagccccagagccccctggcccaggtgcaggagagaggcgagaccccccccagaagccagcacgtgagcctgagcagctacagcagctacaagacctgcgtgagcagcctgtgcgtgaacaaggaggagagaggcatgaagatctactacatgcaggtgcagatgaacaagggcgtggccgtgagctgggagaccgaggagaccctggagagcctggagaagcagcccagaatggaggaggtgaccctgagcgaggtggtgagagtgggcaccccccccagcgacgtgagcaccagaaacctgctgagcgacagcgagcccagcggcgaggagaaggagcacgaggagagaaccgagagcgacagcctgcccggcagccccaccgtggaggacacccccagagccaagacccccgactggctggtgaccatggagaacggcttcagatgcatggcctgctgcagagtgttcaccaccatggaggccctgcaggagcacgtgcagttcggcatcagagagggcttcagctgccacgtgttccacctgaccatggcccagctgaccggcaacatggagagcgagagcacccaggacgagcaggaggaggagaacggcaacgagaaggaggaggaggagaagcccgaggccaaggaggaggagggccagcccaccgaggaggacctgggcctgagaagaagctggagccagtgccccggctgcgtgttccacagccccaaggacagaaactag

SEQ ID NO: 256823 - DNA, 993 bp, Artificial Sequence
  derived and/or modified sequence
atgaagagaagacagaagagaaagcacctggagaacgaggagagccaggagaccgccgagaagggcggcggcatgagcaagagccaggaggacgccctgcagcccggcagcaccagagtggccaagggctggagccagggcgtgggcgaggtgaccagcaccagcgagtactgcagctgcgtgagcagcagcagaaagctgatccacagcggcatccagagaatccacagagacagcccccagccccagagccccctggcccaggtgcaggagagaggcgagaccccccccagaagccagcacgtgagcctgagcagctacagcagctacaagacctgcgtgagcagcctgtgcgtgaacaaggaggagagaggcatgaagatctactacatgcaggtgcagatgaacaagggcgtggccgtgagctgggagaccgaggagaccctggagagcctggagaagcagcccagaatggaggaggtgaccctgagcgaggtggtgagagtgggcaccccccccagcgacgtgagcaccagaaacctgctgagcgacagcgagcccagcggcgaggagaaggagcacgaggagagaaccgagagcgacagcctgcccggcagccccaccgtggaggacacccccagagccaagacccccgactggctggtgaccatggagaacggcttcagatgcatggcctgctgcagagtgttcaccaccatggaggccctgcaggagcacgtgcagttcggcatcagagagggcttcagctgccacgtgttccacctgaccatggcccagctgaccggcaacatggagagcgagagcacccaggacgagcaggaggaggagaacggcaacgagaaggaggaggaggagaagcccgaggccaaggaggaggagggccagcccaccgaggaggacctgggcctgagaagaagctggagccagtgccccggctgcgtgttccacagccccaaggacagaaacagctag

SEQ ID NO: 256824 - DNA, 990 bp, Artificial Sequence
  derived and/or modified sequence
atgaagcggaggcaaaagagaaagcacctggagaatgaggagagccaggaaactgcagaaaagggtggcggaatgagtaaatcccaggaggacgcactccagcctggatctacccgggtagccaagggttggagtcaaggtgtgggcgaagttacaagcacctcggagtattgcagctgtgtgtcctcctccaggaaacttattcactcagggatccagagaatacaccgggacagtccgcagccacagagtccactggcgcaggttcaagagaggggcgaaaccccccccaggtctcaacatgtgagcctgagttcttattcaagctacaagacttgcgtcagttctttgtgtgtgaacaaggaagaaagaggaatgaagatttactacatgcaggttcagatgaacaaaggtgtcgccgtctcctgggaaacagaggaaaccttggaaagcttggagaaacagcccagaatggaggaagtaactctgtccgaggtggtgcgggtcggcacaccgccgtctgacgtgtctacccgcaacttactgtccgactctgagccaagtggggaggagaaggaacatgaggagcgaactgagtccgacagtctgccggggtcaccaacagtggaagacactccccgtgccaagaccccagattggctcgttacaatggaaaatggattccgatgtatggcttgctgcagagtctttacaacaatggaggccttgcaggagcacgtccaatttggaatccgggaaggattcagctgccatgtatttcacctgactatggcccaactcacgggcaacatggaatctgagagtacacaggatgagcaggaagaggaaaacggtaacgagaaggaggaggaagaaaagcctgaagcgaaagaagaggagggacaacccaccgaggaggacctcggactccggcggtcgtggagtcaatgcccgggctgcgtttttcactccccaaaggaccgtaactag

SEQ ID NO: 256825 - DNA, 993 bp, Artificial Sequence
  derived and/or modified sequence
atgaaaaggagacagaaacgaaaacatctggagaatgaagagagtcaagaaactgccgaaaaaggggggggcatgagcaagtctcaggaggacgccctgcagcctgggagcacacgtgtggccaaaggctggtcccaaggcgtgggggaggtcacctcaacttcagaatattgtagttgcgtctcatcttccagaaagctcatacattctggcattcaacgtatccatcgcgattctcctcagcctcagtcgcctctggcccaggtccaggaacggggggaaacgcccccacggagccagcatgtttctttgagctcgtacagcagttacaagacctgcgtgagttccctctgcgttaacaaagaggaaagaggcatgaaaatttactacatgcaggtccaaatgaacaaaggggtcgcggtttcatgggaaactgaagagactctggaaagtctggagaaacaacctcgaatggaggaggtgacgctgagcgaagtggtgagagtgggcactccaccgagcgatgtgtcaactaggaacctactcagtgattccgagcccagtggggaggagaaagaacatgaggagagaactgagtcagacagcttacctggctctcccactgtggaagatacacccagggcaaaaacccccgactggcttgttacgatggagaatggattccggtgcatggcctgctgtcgagtttttactactatggaagcgctgcaggaacatgtgcaattcggaatcagagagggtttctcatgtcacgtcttccatctgactatggcacaactgactggcaacatggaatctgaatccactcaggacgaacaggaagaggagaacggaaatgagaaagaagaagaagaaaaaccagaggcaaaagaagaggaggggcagccaaccgaggaagaccttggattacgacgtagctggtcccaatgtccgggttgcgtgttccacagtcccaaggatcgcaacagctag

SEQ ID NO: 256826 - DNA, 1336 bp, Artificial Sequence
  derived and/or modified sequence
gctgctccttcactaagcggtctgagttctttagctatctcggagattcaactacgtttactcgtactgaatctttttaatgaatttcctgagagccaagaagggccaatctacaggaaaaagtgggaggtggacattaagcatcttctagaaactcttctagctgatatcatgaaacgacgacaaaagaggaaacatttggaaaatgaagagtcccaggaaaccgctgagaagggaggaggaatgtcaaagtcccaagaggatgccctgcagcctggatccactagagtggccaaaggctggagccaaggggtgggagaagttacttctacctccgaatactgctcctgcgtttcttcttcacgcaagctcatccacagtggaatccagagaatacatcgagacagcccccagcctcaatcacccctggcccaggttcaggaacgaggagagactcctccccgctcacaacatgtctccttgtcgtcctattcatcctataagacttgtgtgtcctctctgtgtgtaaacaaagaggaaaggggcatgaaaatatactacatgcaggtacaaatgaacaaaggtgtggctgtctcctgggagacagaggaaactttggagtccttagaaaagcagccaaggatggaagaagtgaccctttctgaggttgtgagggtaggtactcccccctctgatgtgtccaccagaaacctcctgtctgacagtgagcccagtggggaggagaaagagcatgaggaaaggacagaatcagacagcctgccaggctcacccaccgttgaggacacacccagagccaagactcctgactggctggtgaccatggagaacggcttcaggtgcatggcctgctgccgggtgttcaccaccatggaagccctccaggagcatgtgcagtttgggatcagagagggcttcagctgccacgtctttcatctcaccatggctcagctgacaggcaacatggaatcagagagcacccaagatgagcaggaggaggaaaatggaaatgagaaggaggaggaagagaaaccagaagcaaaggaggaggaggggcagcccacagaagaagaccttggcctgaggagatcctggagccaatgtccaggctgtgtgtttcattctccaaaggacaggaactgagacttatgggccagaagatactggaagatggtgtggccttctcttgcaagagggagaagaaagagccatggagatagtagcagacaggctgcccaaggtatgaagcagatgagggaccagcactcagtctaacatgtaaacatcatacgtaataaaggttgtgtttcaaacctta

SEQ ID NO: 256827 - DNA, 1213 bp, Artificial Sequence
  derived and/or modified sequence
tgctgctccttcactaagcggtctgagttctttagctatctcggagattcaactacgtttactcgtactgaatctttttaatgaatttcctgagagccaagaagggccaatctacaggaaaaagtgggaggtggacattaagcatcttctagaaactcttctagctgatatcatgaaacgacgacaaaagaggaaacatttggaaaatgaagagtcccaggaaaccgctgagaagggaggaggaatgtcaaagtcccaagaggatgccctgcagcctggatccactagagtggccaaaggctggagccaaggggtgggagaagttacttctacctccgaatactgctcctgcgtttcttcttcacgcaagctcatccacagtggaatccagagaatacatcgagacagcccccagcctcaatcacccctggcccaggttcaggaacgaggagagactcctccccgctcacaacatgtctccttgtcgtcctattcatcctataagacttgtgtgtcctctctgtgtgtaaacaaagaggaaaggggcatgaaaatatactacatgcaggtacaaatgaacaaaggtgtggctgtctcctgggagacagaggaaactttggagtccttagaaaagcagccaaggatggaagaagtgaccctttctgaggttgtgagggtaggtactcccccctctgatgtgtccaccagaaacctcctgtctgacagtgagcccagtggggaggagaaagagcatgaggaaaggacagaatcagacagcctgccaggctcacccaccgttgaggacacacccagagccaagactcctgactggctggtgaccatggagaacggcttcaggtgcatggcctgctgccgggtgttcaccaccatggaagccctccaggagcatgtgcagtttgggatcagagagggcttcagctgccacgtctttcatctcaccatggctcagctgacaggcaacatggaatcagagagcacccaagatgagcaggaggaggaaaatggaaatgagaaggaggaggaagagaaaccagaagcaaaggaggaggaggggcagcccacagaagaagaccttggcctgaggagatcctggagccaatgtccaggctgtgtgtttcattctccaaaggacaggaacagctgagacttatgggccagaagatactggaagatggtgtggccttctcttgca

SEQ ID NO: 256828 - DNA, 990 bp, Artificial Sequence
  derived and/or modified sequence
atgaagaggcggcagaagaggaagcacctggagaatgaggagagccaggagacagctgagaagggcggcggcatgagcaagagccaggaggatgccctgcagcccggcagcaccagggtggccaagggctggagccagggcgtgggggaggtgaccagcaccagcgagtactgcagctgtgtgagcagcagcaggaagctgatccacagcggcatccagaggatccaccgggacagcccccagccccagagccccctggcccaggtgcaggagcggggggagaccccacccaggagccagcacgtgtccctgagcagctacagcagctacaagacctgtgtgagcagcctgtgtgtgaacaaggaggagcggggcatgaagatctactacatgcaggtgcagatgaacaagggcgtggccgtgtcctgggagacagaggagaccctggagagcctggagaagcagcccaggatggaggaggtgaccctgtctgaggtggtgcgggtgggcaccccacccagtgatgtgtccaccaggaacctgctgagtgacagcgagcccagcggggaggagaaggagcacgaggagaggacagaaagtgacagcctgcccggcagccccaccgtggaggacaccccccgggccaagaccccagactggctggtgaccatggagaatggcttccgctgcatggcctgctgcagggtcttcaccaccatggaggccctgcaggagcacgtgcagtttggcatccgggagggcttcagctgccacgtgttccacctgaccatggcccagctgaccggcaacatggagagcgagagcacccaggatgagcaggaggaggagaatggaaatgagaaggaggaggaggagaagccagaggccaaggaggaggagggccagcccacagaggaggacctgggcctgcggcgctcctggagccagtgccccggctgtgtgttccacagccccaaggacaggaactag

SEQ ID NO: 256829 - DNA, 993 bp, Artificial Sequence
  derived and/or modified sequence
atgaagaggcggcagaagaggaagcacctggagaatgaggagagccaggagacagctgagaagggcggcggcatgagcaagagccaggaggatgccctgcagcccggcagcaccagggtggccaagggctggagccagggcgtgggggaggtgaccagcaccagcgagtactgcagctgtgtgagcagcagcaggaagctgatccacagcggcatccagaggatccaccgggacagcccccagccccagagccccctggcccaggtgcaggagcggggggagaccccacccaggagccagcacgtgtccctgagcagctacagcagctacaagacctgtgtgagcagcctgtgtgtgaacaaggaggagcggggcatgaagatctactacatgcaggtgcagatgaacaagggcgtggccgtgtcctgggagacagaggagaccctggagagcctggagaagcagcccaggatggaggaggtgaccctgtctgaggtggtgcgggtgggcaccccacccagtgatgtgtccaccaggaacctgctgagtgacagcgagcccagcggggaggagaaggagcacgaggagaggacagaaagtgacagcctgcccggcagccccaccgtggaggacaccccccgggccaagaccccagactggctggtgaccatggagaatggcttccgctgcatggcctgctgcagggtcttcaccaccatggaggccctgcaggagcacgtgcagtttggcatccgggagggcttcagctgccacgtgttccacctgaccatggcccagctgaccggcaacatggagagcgagagcacccaggatgagcaggaggaggagaatggaaatgagaaggaggaggaggagaagccagaggccaaggaggaggagggccagcccacagaggaggacctgggcctgcggcgctcctggagccagtgccccggctgtgtgttccacagccccaaggacaggaacagctag

SEQ ID NO: 256830 - DNA, 990 bp, Artificial Sequence
  derived and/or modified sequence
atgaagcggcggcagaagcggaagcacctggagaacgaggagagccaagaaacagcggaaaaaggaggaggaatgtccaaatcacaggaagacgctcttcagcccggctcgacacgcgtggccaagggctggtctcaaggggtgggggaggtgacaagtacaagcgagtactgtagctgtgtctcttccagtcgcaaactgatacattctgggatccagagaatccatcgagacagcccccaaccacagagtccacttgctcaggttcaggaaagaggggagacccctccacgatcacagcacgtgtcattatccagttattcaagttacaaaacatgtgtgagttctctgtgtgtaaataaggaagaacgcgggatgaaaatttattatatgcaggtgcaaatgaataaaggggttgctgtatcctgggagactgaggaaacactggagtctttggaaaaacagccgcggatggaggaagttacactgtccgaggtcgtgagagtgggaacccctccgtcagacgtgagcacgagaaatctgctttccgattccgagccgagcggcgaagaaaaggagcacgaggaaagaacagagagtgactcgctgcctgggagccctacagtggaggatacgccacgggcaaagacccccgattggctggtgaccatggaaaatggattccgttgtatggcatgctgtagggtgtttactactatggaagcattgcaggaacacgtacagttcgggattcgtgaaggcttcagctgccatgtctttcacctgacaatggcccagctgaccgggaacatggaatccgagtcgactcaagacgagcaggaagaggagaacggcaatgagaaggaggaggaggagaagcctgaggccaaagaggaagaaggccagcctacagaggaagacctagggctgcggcgctcgtggtcacagtgtcccggttgcgtcttccactctccaaaggatcggaactag

SEQ ID NO: 256831 - DNA, 993 bp, Artificial Sequence
  derived and/or modified sequence
atgaagcggcggcagaagcggaagcacctggagaacgaggagagccaagaaactgccgaaaaaggcggtggcatgtcgaagtcccaggaggacgcactacagccgggaagtactagagtggccaaaggctggagccagggagtgggcgaggtaaccagcacttcagaatactgctcatgtgtgtcttcatcacggaaattgattcatagcggcatccagcgcattcatcgcgatagcccacagccacaaagcccattggcccaagtgcaggagaggggcgagactcctccccgaagtcagcatgtgagcttgagctcctatagctcctacaagacctgtgtttcatcgctgtgcgtcaacaaggaagaacgcgggatgaaaatttattacatgcaagtgcaaatgaacaagggcgtggctgtgtcatgggaaacagaagagacactggagtctctggaaaaacagccgcgcatggaggaagtaactctgagcgaggtcgtgcgcgtgggcactcccccaagtgacgtgtctacccgtaacctgctgagtgacagcgaaccgagcggggaagaaaaagagcacgaagagcgaaccgagagcgattcgcttcccggctctcctacggtggaggatacgccccgggctaagacgccggattggttggtaacaatggagaacgggttcaggtgcatggcctgctgtagggtgtttactaccatggaagccttgcaagagcacgtacagtttggaattcgagagggtttctcctgtcatgtgtttcatttgaccatggcccagctcacgggcaatatggagtcagagtctacgcaagacgaacaggaggaagaaaatggcaacgagaaggaagaagaggaaaaacccgaggcgaaagaggaagaaggccagccaaccgaggaggatttgggtctcagacggtcctggtcccagtgcccaggctgtgtgttccacagccctaaagaccgcaatagctag

SEQ ID NO: 256832 - DNA, 990 bp, Artificial Sequence
  derived and/or modified sequence
atgaaacgtaggcagaagcgcaaacatctcgaaaacgaagaaagtcaggagacagcagagaagggcggaggcatgtcaaaatctcaagaagacgcgctccaaccaggcagtactcgcgtcgctaagggttggtcccagggtgttggggaggtgacgtccacgtcagagtactgcagttgtgtatccagctctcgaaaactgattcattccggcattcagaggattcaccgcgacagcccacaaccccaaagcccgcttgcacaggtacaggaacgcggtgagacccctccacggagccaacatgtttccctcagtagttacagcagctacaaaacgtgtgtgagcagtctgtgcgtgaataaggaggaaagaggcatgaagatatactatatgcaggtccagatgaataaaggcgtcgctgtgagctgggagaccgaagagaccctcgagagtctcgagaagcaaccccgaatggaagaagtcaccttatcggaagtggtcagggtagggacaccacctagcgatgtgtccaccaggaatttgctgtcagatagcgagccttccggggaagaaaaggaacatgaagaacgaaccgaatccgattccctgcctggaagccccacagtcgaggacacacccagggcaaaaacacctgattggttagtcactatggagaacggcttccggtgcatggcttgttgccgggttttcacaaccatggaggcccttcaggagcatgttcaattcggaatcagggagggcttttcctgccacgtgttccaccttaccatggcgcaacttacaggcaacatggagtcagaatcaacccaggatgagcaggaagaagagaacgggaacgagaaagaagaggaggagaagccagaggcgaaggaagaggaggggcaaccaaccgaggaagatctggggttgcggaggtcctggagccagtgtcctgggtgcgtgttccatagtccaaaggatcgaaactag

SEQ ID NO: 256833 - DNA, 993 bp, Artificial Sequence
  derived and/or modified sequence
atgaagaggaggcaaaagcggaaacacctcgagaatgaggaaagccaggagaccgcggaaaagggaggcggaatgagtaagtcccaggaagatgcccttcagcccggtagtaccagagtcgcgaaaggatggtcccaaggcgtgggtgaggtgacctccaccagcgaatattgtagttgcgtgagctcaagtcggaagctgatccattctggaatccagcggatccatcgagattcccctcagcctcagtcccctctagcccaggttcaggagcgaggcgagactcctcccagatcccagcacgtctccctaagctcctacagttcttacaagacatgtgtttcaagcctgtgcgttaacaaagaggaacggggaatgaaaatctactacatgcaggtgcagatgaacaagggagtggccgtcagctgggaaaccgaggagaccctggagagtctcgaaaagcagcctagaatggaagaggttaccctatctgaagtggttagagtggggacccccccttctgacgtgagcacacgaaatctcctcagcgactcagagccatccggagaggagaaagaacacgaggagcgcacagagtccgattccttacccggaagccctaccgtggaggacacacctcgagctaagactccggactggctagtaacaatggaaaatgggttcagatgcatggcttgctgccgtgtctttactactatggaggctctgcaggaacacgtgcagtttggcattcgagagggattttcttgccacgtgtttcatctcaccatggcacaactgacggggaatatggagagcgagagcactcaggatgagcaggaggaagaaaacggtaatgagaaggaggaggaggaaaaacccgaggcaaaggaagaggagggccagccaaccgaggaggacctggggctcaggcgctcttggtcccagtgtccaggatgcgtgttccactctccgaaagaccgcaactcgtag

SEQ ID NO: 256834 - protein, 852 aa, Artificial Sequence
  derived and/or modified sequence
MLITERKHFRSGRIAQSMSEANLIDMEAGKLSKSCNITECQDPDLLHNWPDAFTLRGNNASKVANPFWNQLSASNPFLDDITQLRNNRKRNNISILKEDPFLFCREIENGNSFDSSGDELDVHQLLRQTSSRNSGRSKSVSELLDILDDTAHAHQSIHNSDQILLHDLEWLKNDREAYKMAWLSQRQLARSCLDLNTISQSPGWAQTQLAEVTIACKVNHQGGSVQLPESDITVHVPQGHVAVGEFQEVSLRAFLDPPHMLNHDLSCTVSPLLEIMLGNLNTMEALLLEMKIGAEVRKDPFSQVMTEMVCLHSLGKEGPFKVLSNCYIYKDTIQVKLIDLSQVMYLVVAAQAKALPSPAATIWDYIHKTTSIGIYGPKYIHPSFTVVLTVCGHNYMPGQLTISDIKKGGKNISPVVFQLWGKQSFLLDKPQDLSISIFSCDPDFEVKTEGERKEIKQKQLEAGEVVHQQFLFSLVEHREMHLFDFCVQVEPPNGEPVAQFSITTPDPTPNLKRLSNLPGYLQKKEEIKSAPLSPKILVKYPTFQDKTLNFSNYGVTLKAVLRQSKIDYFLEYFKGDTIALLGEGKVKAIGQSKVKEWYVGVLRGKIGLVHCKNVKVISKEQVMFMSDSVFTTRNLLEQIVLPLKKLTYIYSVVLTLVSEKVYDWKVLADVLGYSHLSLEDFDQIQADKESEKVSYVIKKLKEDCHTERNTRKFLYELIVALLKMDCQELVARLIQEAAVLTSAVKLGKGWRELAEKLVRLTKQQMEAYEIPHRGNTGDVAVEMMWKPAYDFLYTWSAHYGNNYRDVLQDLQSALDRMKNPVTKHWRELTGVLILVNSLEVLRVTAFSTSEEV

SEQ ID NO: 256835 - DNA, 2559 bp, Artificial Sequence
  derived and/or modified sequence
atgcttataaccgagcggaagcacttcagatccggccggattgcccagagtatgtcagaggcaaaccttatagatatggaggccggtaaactgtccaaatcctgcaacatcacagaatgccaagatcctgatcttctgcataattggcccgatgcatttaccctccggggcaacaacgcttcaaaggtggccaacccattttggaatcagctatctgcctccaatcccttcctcgacgatatcactcaattacggaacaacagaaagaggaacaatatctcaatcttgaaagaagacccttttctgttctgccgggagatcgagaacggaaattcttttgattcctcaggggatgagctggatgtgcatcagctcctccgtcaaacatctagcagaaatagtggacgcagtaagtcagtgagcgagttgctagacattctggacgatacagcccacgcacaccagtccatacacaatagtgaccagatactcctgcatgaccttgagtggttaaaaaatgacagggaagcctataaaatggcgtggctcagccagcgccagctagcccggtcatgtctggatctgaacacgatctcacaatctccggggtgggctcagacacagctggctgaggtgaccatagcttgcaaagtcaatcatcaaggtggatcagtgcagttaccggagtccgacataacagtgcatgtccctcaaggacacgtcgctgttggagagtttcaggaggtaagcctgagagccttcctcgatccacctcacatgttaaaccatgatttatcatgtactgtgtctccactcctggagatcatgctgggcaacttgaatactatggaggccttactcctggagatgaaaatcggtgcagaagtgagaaaagatcctttcagccaggtgatgactgagatggtttgtctgcatagtctaggtaaggaaggtccgtttaaagtgttgagcaattgttacatatacaaggacacaatacaagttaaattaatcgacctctcccaggtcatgtatttggtggttgctgcccaagctaaagctctgcccagtcccgcagctacaatttgggattatatccacaagacaacctctatcggaatctatgggcccaagtacatccacccctcctttactgtggtcttgacggtgtgtggccataattatatgcctggccagctgacaatcagcgacattaagaagggcggtaaaaacatatcacccgtggtcttccagttgtgggggaagcagtcatttctcctggataaacctcaagatctgtccatttccatattctcctgtgaccctgactttgaggttaagacagagggggagaggaaggagattaagcagaaacaactggaagctggggaggtagtacatcagcagtttctgttctctcttgtggagcatagagagatgcatctgtttgacttttgcgttcaagtagagcccccaaacggagagccagtcgctcagttttccatcacaacacccgatcctaccccaaacctgaaaagacttagcaacctcccagggtatctgcagaaaaaagaagaaatcaagtctgcccctctctccccaaagattcttgttaaatacccaaccttccaggataagaccctgaatttttcaaactatggtgttacactgaaagctgtgctacgtcagtcaaagatcgactacttcctggaatacttcaagggggacactatcgccttgctcggcgagggcaaagtcaaggcaattggccagtcaaaggtgaaggaatggtacgtgggagtgctacggggcaagattggactggttcactgcaaaaacgtgaaagtaataagcaaagagcaggtaatgttcatgtcagatagtgtctttacaacgcggaatctgctggagcagattgtgttgcctctgaagaaactaacctatatttattccgtcgtgttgacgctagtgtccgagaaggtatacgactggaaggtgttggcagatgtactgggctactctcacctctctctcgaggacttcgaccagattcaagccgataaggagagtgagaaggtgagctacgtcattaaaaagttgaaagaggactgccacaccgagaggaataccagaaaattcctctatgaacttattgtggctttgctcaaaatggattgccaggagctggtggcaaggctgatccaggaggctgccgtgctcacaagcgccgtcaaactgggtaagggttggagggagctagcagagaaactcgtgagactgaccaaacaacagatggaggcctacgaaatcccccaccggggtaacacaggggacgtggccgtggaaatgatgtggaaaccagcctatgacttcctttacacctggtcagcccattatgggaacaactatagggacgtcttgcaggacctacagagcgccctggatcgaatgaagaaccccgtgaccaagcattggagagaactgactggtgttctgattttggtgaacagtttagaagtcctgcgtgtgacggcattttcaacgagcgaggaggtctag

SEQ ID NO: 256836 - DNA, 2559 bp, Artificial Sequence
  derived and/or modified sequence
atgctcattaccgagcgcaagcatttccgctccggtcgtatcgcccagtctatgagcgaggccaatttgattgatatggaggctggaaaactaagtaaaagttgtaacattacagagtgccaggaccccgatctgctccacaattggcctgacgccttcaccctcaggggcaataacgcaagtaaggtggctaatccgttctggaaccagctctcagccagtaacccattcctcgatgatattacccagttgagaaacaaccggaaaaggaataacatttcaattctcaaagaggacccgtttctgttttgtagagaaatcgagaacggcaactctttcgactcttcgggcgacgagttggacgtacatcagcttctccggcagacgtcttctcggaattccggccggtcaaagagtgtgtctgagctgctagatattctggacgacactgcacacgctcatcaatccatccacaattctgaccagatcctcctgcatgaccttgaatggttaaaaaacgaccgtgaggcctataaaatggcgtggctgagtcagaggcagttagcgcggtcttgtctcgacctgaacaccatctcacagagcccgggctgggcccagacacagctggcggaagttaccatcgcctgtaaggttaatcaccagggtggtagtgtgcaattgcctgagagcgacatcactgtacacgtgcctcagggccatgttgccgtgggcgagttccaggaggtatcccttagggcttttctcgaccccccccatatgctgaatcacgatctgtcatgcactgtctcccctttgttggaaatcatgcttggcaacctgaacaccatggaagctctgctactggaaatgaagattggtgctgaagtgaggaaggacccttttagccaggtgatgacagaaatggtctgcctccattccctgggtaaagaggggccattcaaggtgctaagcaactgttatatctacaaggataccatccaagtcaaattgatagacctgtcacaagtgatgtatctggtagtcgctgcccaagcaaaagcactgccatcccctgccgccactatctgggactatattcataagaccaccagtatagggatatatgggcccaagtatatccacccaagttttactgtagtgcttaccgtctgtgggcataattatatgcctgggcagctgaccatctctgacattaagaaaggaggaaaaaacatcagccccgtggtgttccagttgtgggggaagcaaagttttctgctggacaagcctcaggatttaagtattagcatctttagctgtgatcccgattttgaggtgaagactgaaggcgagaggaaggagatcaaacagaagcagctggaagccggagaagtggtgcaccagcagttcctctttagcttagtggagcatagagaaatgcacctttttgacttctgtgtacaggttgaacctcccaacggagagccagtcgcacagtttagcattacgactccagatcccacaccgaacctgaagcgtctctctaatcttccaggctatctgcagaaaaaagaggaaatcaagtcggccccgctgtcccctaagatcctagtcaagtacccgacttttcaggacaagaccctcaacttctccaactacggggtgacactaaaagctgtgctccgccagagtaagatcgactactttttagaatattttaagggggacacaattgccttattgggggaaggcaaagtaaaagctattgggcaatctaaggtgaaagaatggtatgtgggcgtgctgcggggcaagatcgggctagttcattgcaaaaacgtgaaggtcatctctaaggaacaagtaatgttcatgagcgacagcgtgtttacaacacgaaatctcctggaacaaattgtcctgcctctaaaaaaactcacatacatttacagcgtcgtgctgacactcgtatccgaaaaggtgtatgattggaaagtactcgccgatgtcttgggctatagtcaccttagtctggaagatttcgaccagattcaggccgataaggaatccgaaaaggtatcttacgtcatcaagaaattgaaagaggactgtcacaccgagagaaacacaagaaagttcctgtacgagctgattgtggccctgttgaaaatggattgtcaggaactggtggctaggctgattcaggaagcagcagtgttaacatcagccgttaaactgggaaaaggctggcgggagctcgccgagaagttagtgcgcctaacaaagcagcagatggaagcgtatgagattccgcatcgagggaacactggcgatgtggccgttgagatgatgtggaagccagcgtacgattttctctacacatggtcagctcattatggaaataactatagggatgtactacaggatctgcagtctgcactggatagaatgaagaacccagtgacaaagcattggagagaattaacaggggttcttattctagtgaatagtctggaggtcctccgtgttaccgccttctccacgtctgaggaggtatag

SEQ ID NO: 256837 - DNA, 2559 bp, Artificial Sequence
  derived and/or modified sequence
atgctgatcacagagaggaagcacttccgcagcggccgcatcgcccagagcatgtctgaggccaacctgattgacatggaggccggcaagctgagcaagagctgcaacatcacagagtgccaggaccctgacctgctgcacaactggccagatgccttcaccctgcggggcaacaatgccagcaaggtggccaaccccttctggaaccagctgagcgccagcaaccccttcctggatgacatcacccagctgaggaacaacaggaagaggaacaacatcagcatcctgaaggaggaccccttcctgttctgccgggagattgaaaatggaaacagctttgacagcagtggagatgagctggatgtgcaccagctgctgcggcagaccagcagcaggaacagcggccgcagcaagtctgtgtctgagctgctggacatcctggatgacacagcccacgcccaccagagcatccacaacagcgaccagatcctgctgcatgacctggagtggctgaagaatgaccgggaggcctacaagatggcctggctgagccagaggcagctggcccggagctgcctggacctgaacaccatcagccagagccctggctgggcccagacccagctggccgaggtgaccatcgcctgcaaggtgaaccaccagggcggctctgtgcagctgcctgagagtgacatcaccgtgcacgtgccccagggccacgtggccgtgggggagttccaggaggtgtccctgcgggccttcctggaccccccccacatgctgaaccacgacctgagctgcaccgtgagccccctgctggagatcatgctgggcaacctgaacaccatggaggccctgctgctggagatgaagatcggggctgaggtgaggaaggaccccttcagccaggtgatgacagagatggtgtgcctgcacagcctgggcaaggagggccccttcaaggtgctgagcaactgctacatctacaaggacaccatccaggtgaagctgattgacctgagccaggtgatgtacctggtggtggccgcccaggccaaggccctgcccagccctgctgccaccatctgggactacatccacaagaccaccagcatcggcatctacggccccaagtacatccaccccagcttcaccgtggtgctgactgtgtgtggccacaactacatgcctggccagctgaccatcagtgacatcaagaagggcggcaagaacatcagccctgtggtgttccagctgtggggcaagcagagcttcctgctggacaagccccaggacctgagcatcagcatcttcagctgtgaccctgactttgaggtgaagacagaaggagagaggaaggagatcaagcagaagcagctggaggccggggaggtggtgcaccagcagttcctgttcagcctggtggagcaccgggagatgcacctgtttgacttctgtgtgcaggtggagcccccaaatggagagcctgtggcccagttcagcatcaccaccccagaccccacccccaacctgaagaggctgagcaacctgcccggctacctgcagaagaaggaggagatcaagagcgcccccctgagccccaagatcctggtgaagtaccccaccttccaggacaagaccctgaacttcagcaactatggagtgaccctgaaggctgtgctgcggcagagcaagattgactacttcctggagtacttcaagggggacaccatcgccctgctgggggagggcaaggtgaaggccatcggccagagcaaggtgaaggagtggtacgtgggcgtgctgcggggcaagattggcctggtgcactgcaagaatgtgaaggtgatcagcaaggagcaggtgatgttcatgtctgacagcgtcttcaccaccaggaacctgctggagcagatcgtgctgcccctgaagaagctgacctacatctacagcgtggtgctgaccctggtgtctgagaaggtgtatgactggaaggtgctggctgatgtgctgggctacagccacctgagcctggaggactttgaccagatccaggccgacaaggagagcgagaaggtgtcctatgtgatcaagaagctgaaggaggactgccacacagagaggaacaccaggaagttcctgtatgagctgattgtggccctgctgaagatggactgccaggagctggtggcccggctcatccaggaggccgctgtgctgaccagcgctgtgaagctgggcaagggctggagggagctggccgagaagctggtgcggctgaccaagcagcagatggaggcctatgagatcccccaccggggcaacacaggagatgtggccgtggagatgatgtggaagccagcctatgacttcctgtacacctggagcgcccactacggcaacaactacagagatgtgctgcaggacctgcagagcgccctggacaggatgaagaaccctgtgaccaagcactggagggagctgactggagtgctgatcctggtgaacagcctggaggtgctgcgggtgacagccttcagcaccagcgaggaggtgtag

SEQ ID NO: 256838 - DNA, 2994 bp, Artificial Sequence
  derived and/or modified sequence
atacggagcaaggcatgtttgaagagtacccgggtttggtagagtgacttctattcactaaaaccatgtgtctgaactgaagaagcttgggctcacttccacaaatgtggaaaaatgctaatcactgaaagaaaacattttcggtcaggaagaattgcacaaagtatgtctgaagcaaatttgattgacatggaagctggaaaactctcaaaaagttgcaatattacagaatgccaggacccagacttgcttcacaattggccggatgctttcacccttcgtggtaataatgcttccaaagttgcaaatccattctggaatcaactgtctgcttctaacccatttttggatgacataactcaactaagaaataacaggaagagaaataatatttccatcttaaaggaagatccttttcttttctgtagagaaatagaaaatggaaattcttttgattcctccggtgatgaacttgatgtgcatcagttacttaggcagacttcctcaagaaattctggaagatctaaaagtgtttcagaacttctggacattttagacgacacagcacatgcccatcagagtatacataactctgaccagatcctactacacgacttagagtggcttaaaaatgatcgggaggcttataaaatggcttggttaagtcaacgccagctggcccgctcctgccttgatttgaatacaattagtcagagccctggatgggcccagacacaacttgcggaggtcaccatagcttgcaaagtaaaccatcaaggagggtcagtacaattacctgaatcagacatcactgttcatgtgccccaaggtcatgtggctgtgggagaattccaagaggtgtctctaagggctttccttgatccgccacacatgcttaaccatgatctttcgtgcactgtgagcccgttgttggaaatcatgttaggcaacctcaatacaatggaagcccttttgctggagatgaaaattggggctgaagtaagaaaggatcctttcagccaagtcatgacagaaatggtgtgtttacacagcttgggtaaagaaggcccttttaaagttttaagcaactgctacatttataaagacaccatccaagtcaagctaatcgacttgagtcaggtaatgtatctagtggttgctgcacaagctaaagctcttccgtcaccagctgccaccatttgggattatatccacaaaaccacctcaattggaatttatggacccaaatatatccatcccagttttactgttgttttaacagtttgtggacacaattatatgccaggacagcttacaatttctgatattaagaagggtggaaaaaacatatctccagttgtgtttcagctctgggggaagcagtcatttttacttgacaagccacaagatttaagtatttctattttttcctgtgatcctgattttgaagtaaagacagaaggagaaaggaaagaaattaaacaaaagcagttggaagcaggtgaagtagttcatcaacaatttttattttctttagttgagcacagagagatgcacttgtttgatttttgtgttcaagtggagcctcccaatggtgaaccagttgcacagttctctatcactactcctgatccaaccccaaacctaaaaagactctcgaatctgccaggctatttgcagaagaaggaggaaatcaagtctgctcctttatcaccaaaaattcttgttaaatatcctacatttcaagataaaacattgaactttagcaactatggggtaaccctgaaggcagtgctaagacaaagcaagattgattacttccttgaatatttcaaaggggacacaatagctctcctcggggaaggtaaggtaaaagctattggtcagtccaaagtgaaagaatggtatgtaggagtcctcagaggtaagattggacttgtacactgcaaaaatgtcaaggtgatttcaaaggagcaagtaatgtttatgtcagatagtgtctttacaaccagaaatcttcttgaacagattgtcctgcctttaaaaaaattgacttatatctactcagttgtattaaccttggtgtcagaaaaagtttatgattggaaagttttagctgatgtcctgggttactcacatctgtccctggaagattttgatcaaattcaagcagacaaagaatcagagaaagtttcttatgttataaagaagttaaaggaagattgccacacagagagaaatacaaggaagtttctgtatgaacttattgtggctcttctgaaaatggattgccaagagttagtcgcacgtctcatccaagaagctgctgttctgacttcagctgtcaagcttggaaaaggctggagggaactagctgaaaagttagtacgactcacaaagcaacaaatggaggcatatgaaattcctcatcgaggaaacactggagatgttgctgttgagatgatgtggaaacctgcctatgattttctgtatacctggagtgctcactatggaaataactacagagatgtgttacaagaccttcagtcagctttggacagaatgaaaaaccctgtgactaaacactggagagaattaactggagttttaatactagtaaattctttggaggttttgagagtaactgcattctccacttctgaggaagtatagaaacaaagcgtgtgtttttgatgggagggaaaatgaggtaatggtgtgtgtgtgtgtgtgtctgtgtgtgtctgtgtgtgtctctgtgtgtctgtgtgtgtgtgtctgtgtgtgtgtgtctgtgtgtgtgtgtgtgtgtgtgtaggaaagaaagaatctcagaaaagcattatattaattttcttcatgctcaaaaccagtttttttttcctgatgaaagcacagcctaactgataaccaagatgggttttatcctcaaatatgtatttttgtgtatgtttcaaatacaagtattaggctgctttgttcttagaaaggaaa

SEQ ID NO: 256839 - DNA, 7417 bp, Artificial Sequence
  derived and/or modified sequence
atgtttgaagagtacccgggtttggtagagtgacttctattcactaaaaccatgtgtctgaactgaagaagcttgggctcacttccacaaatgtagccttgtcagatgatatgcaaatgattcacatcagtgtttgaagttcaaaccaaggaaaactatcagaaaaggcttctgctttctttaaaaaataaaactacttgaaaagaaaaaaatcaagaattagaaagaagagtataacaataaagaaggaggggtcacaggtgaacgagatgtggtcaacacacacaaaggagaacaaaaagtggaaaaatgctaatcactgaaagaaaacattttcggtcaggaagaattgcacaaagtatgtctgaagcaaatttgattgacatggaagctggaaaactctcaaaaagttgcaatattacagaatgccaggacccagacttgcttcacaattggccggatgctttcacccttcgtggtaataatgcttccaaagttgcaaatccattctggaatcaactgtctgcttctaacccatttttggatgacataactcaactaagaaataacaggaagagaaataatatttccatcttaaaggaagatccttttcttttctgtagagaaatagaaaatggaaattcttttgattcctccggtgatgaacttgatgtgcatcagttacttaggcagacttcctcaagaaattctggaagatctaaaagtgtttcagaacttctggacattttagacgacacagcacatgcccatcagagtatacataactctgaccagatcctactacacgacttagagtggcttaaaaatgatcgggaggcttataaaatggcttggttaagtcaacgccagctggcccgctcctgccttgatttgaatacaattagtcagagccctggatgggcccagacacaacttgcggaggtcaccatagcttgcaaagtaaaccatcaaggagggtcagtacaattacctgaatcagacatcactgttcatgtgccccaaggtcatgtggctgtgggagaattccaagaggtgtctctaagggctttccttgatccgccacacatgcttaaccatgatctttcgtgcactgtgagcccgttgttggaaatcatgttaggcaacctcaatacaatggaagcccttttgctggagatgaaaattggggctgaagtaagaaaggatcctttcagccaagtcatgacagaaatggtgtgtttacacagcttgggtaaagaaggcccttttaaagttttaagcaactgctacatttataaagacaccatccaagtcaagctaatcgacttgagtcaggtaatgtatctagtggttgctgcacaagctaaagctcttccgtcaccagctgccaccatttgggattatatccacaaaaccacctcaattggaatttatggacccaaatatatccatcccagttttactgttgttttaacagtttgtggacacaattatatgccaggacagcttacaatttctgatattaagaagggtggaaaaaacatatctccagttgtgtttcagctctgggggaagcagtcatttttacttgacaagccacaagatttaagtatttctattttttcctgtgatcctgattttgaagtaaagacagaaggagaaaggaaagaaattaaacaaaagcagttggaagcaggtgaagtagttcatcaacaatttttattttctttagttgagcacagagagatgcacttgtttgatttttgtgttcaagtggagcctcccaatggtgaaccagttgcacagttctctatcactactcctgatccaaccccaaacctaaaaagactctcgaatctgccaggctatttgcagaagaaggaggaaatcaagtctgctcctttatcaccaaaaattcttgttaaatatcctacatttcaagataaaacattgaactttagcaactatggggtaaccctgaaggcagtgctaagacaaagcaagattgattacttccttgaatatttcaaaggggacacaatagctctcctcggggaaggtaaggtaaaagctattggtcagtccaaagtgaaagaatggtatgtaggagtcctcagaggtaagattggacttgtacactgcaaaaatgtcaaggtgatttcaaaggagcaagtaatgtttatgtcagatagtgtctttacaaccagaaatcttcttgaacagattgtcctgcctttaaaaaaattgacttatatctactcagttgtattaaccttggtgtcagaaaaagtttatgattggaaagttttagctgatgtcctgggttactcacatctgtccctggaagattttgatcaaattcaagcagacaaagaatcagagaaagtttcttatgttataaagaagttaaaggaagattgccacacagagagaaatacaaggaagtttctgtatgaacttattgtggctcttctgaaaatggattgccaagagttagtcgcacgtctcatccaagaagctgctgttctgacttcagctgtcaagcttggaaaaggctggagggaactagctgaaaagttagtacgactcacaaagcaacaaatggaggcatatgaaattcctcatcgaggaaacactggagatgttgctgttgagatgatgtggaaacctgcctatgattttctgtatacctggagtgctcactatggaaataactacagagatgtgttacaagaccttcagtcagctttggacagaatgaaaaaccctgtgactaaacactggagagaattaactggagttttaatactagtaaattctttggaggttttgagagtaactgcattctccacttctgaggaagtatagaaacaaagcgtgtgtttttgatgggagggaaaatgaggtaatggtgtgtgtgtgtgtgtgtctgtgtgtgtctgtgtgtgtctctgtgtgtctgtgtgtgtgtgtctgtgtgtgtgtgtctgtgtgtgtgtgtgtgtgtgtgtaggaaagaaagaatctcagaaaagcattatattaattttcttcatgctcaaaaccagtttttttttcctgatgaaagcacagcctaactgataaccaagatgggttttatcctcaaatatgtatttttgtgtatgtttcaaatacaagtattaggctgctttgttcttagaaaggaaagaaaaaagaaaagtgccctctctctctttcagtgttattttaaatttactaagtcaaagctgtttgaataattacatcacacagatatctgggtaaactagagactatcaacatgatcaaggcagtgttcccaggaggcagctagaaagaggggaagcaagcacacaccctgtggccagtcacggctgcccgctttccacacctgacctcttcagttcatcagtggggttcaccagcatcacccccatttttcatggggagaaactcagaagtggagagaacgtctgaggctacatagccagtacaaagtaggttttctgcttgaaaaacctgtttctatttctttttaaaaaatcatactgcataacagaatagtaaaaacaaaatgcgtgttaagacttacagggaaacagttgccgtttcattttaagtgagacttgctactctttttcatcgtctcttgaaagactgacagaaggaaaatatgacttatcagaaatctgttgtctgcatgcatggacctagtgttttcatcagctcccttcagcatcttgggacctctctaatcctgcctaatttgggactttttctgcaggattgtaatgtaaaatagttctttagctcttggagatttttaataatacgagttattaaaaaccaccaccaccagaaacttgattaacttgattaccctgttgagtagagaggtcttaaccaccgaaaacactgatatctttatgttggcatgctcatgcaaacacatgtgtgtgtgtgtgtgtgtgtgtgtgtgtgtgtgtgtaccacagtgttttataaagcacagcctaattgattatataggacaaaaattgtataggaccctgggtcagtataaatgctaatggctgacaaagttcacaaagagatgtattttgcttactcctctgttcaatcctctggttgcctgccagtgtttatgtgtgtatttggacagacattcatttattgtcattcagtcaataggtagagtatatgtgtctattttttggcaggcatatagatgcttgaggctaatgggaaaaaaccagcatgaactctgactttagtagtgctaagtaatagataattttaaaaaatgacaccgttaaatagaaaatggcatgcatactaacagttgcaatggagaggctgtgatgctacgagatataaacgtagagatgccatcatgtgaaactggaagtgggggtgggtcagggaaatttgttcttggaaagaaataatgaacctcaaggaagagtaggcattgtcctggtgtggtggggtgtaagcggtgatcccacaaagcactgaagctcttagatgggtgggagctgaataggtgcagatagcaggggtgaaggagtgaaaggataaaagattcaaggttgagatgaggatggagcaagaagaagccacattagggccattaaggctgctagaatttagaaagaaaacacacagcctcaaagaaatgtgggtaagccaaagaaggattttgttttgggaacctgaataaaagatgtccatttggctaaaaagtaaaagcagaatctttttagggcttttaatatacccaccctgggatatttggtatgctggcaatggtaattcaaattggcgtttaagaataatcttggccgggcgcgatggctcatgcctgaaatcccagcactttgggaggccgaggcgggcagatcactaggtcaggagatcgagaccatcctggctaacgcggtgaaaccccgtctctactaaaaatacaaaaaattagccgggcgtggtggcaggcgcctgtagtcccagctactcaggaggctgaggcaggagaatggcgtgaacccgggaggcggagcttgcagtgagccgagttcatgccactgcactccagcctgggtgacaggctgtctcaaaaaaaaaaaaaggaataatctgtacggctttcagtatttatatttgattataagggaacacagcctgaccaaataattatgtatacacattcaaggacagaatttattttaattaaaaataaattatgagagaaggaaaaaaaagcacagtttttactttcagaacacagtccttttttgtggtgattttgctttctttagaacattcttggaatcttattaacatgtcagctaaccagagaattttgggaagggatagtggggattaataactgggtttttccaggctccaagatctaagaagacagagatcttgttagctgattagtgtagtaagattaaataaataatttaaggtttacattgcatcatgtattatgattgtgattgagaataataagagtttaaaaaaatgaaaaacaagatctctgtaatttgaggatgaaacaatggttctaatattaatacacacaaatatattttataatcttgtaacaaatccttccaggggaaattttttttttttttttttttttttttttttgagccagagtctggctctgttgcccagactggagtgcggtgtttcaatcttgactcactgcaacctccacctcctgggttcaaaagatccttctgcctccgcctcccaagtagctgggattacaggcatgcaccaccttgtccgggtaatttttgtatttttagtggagacaaggttttaccattttggccagactggtctggaactcctgacctcaggtcatccacctgcctcggcctcccagagtgctaggattacaggcatgagccactgctcccagccttccagaggaattttaagcccatgtccaaacattctgtttgtataaatatattctaatttttaaataaatagtttctacttttctgaactttatattttttcttgctataatggattttcataatcagaaaagattaaattagtaatcatgaattgccttcaatatttggcagtaagtcaatgaaataataaggcacttatataccatctttgacatcattaaaagtatcaaatcccattaatctaaaacttctttaagcattttgaaagcagaaaatgtttacatggttctttcagttcctcaggctttttgtctaatgatgcgtgacttaggataagatttgaattaagtgcccagcttgaaacataataatttttctgtataagccacagatcctctacctcctttgtgttaaagcctttatatgaaacaattaagtagaagcattcaatagtgtgtcattaactgttcatactaataaatggatacagcacattttcatggcctgtaatgtagaacatactatataaagttctcagtttggggatgactaggtttctggaaggaatagaatgctaaatcaatggatggcattgggctgagaaacactgctgctactaatcagccttgaatgtgtaatgtgaacatgcaaaagagaacatgcatacactcaaatttgtacaatgctataactggaagttgaaggacttgaatttttatattgtgctattgttatgttttctgtaattgtttatatctaaggaatttttgaggtaatataaaagaaaaagagaataatgaacaatgatgtcactggagggtttttacattaaattagatcatttttcttcttattcacaataataatcttaatctttaagaattaattataatttaatattataattcataatctttaagaattaataattataatttaatattataattaataatctttaagaattaataatataatttaatattataattaataatctttaagaattaataattacaattaataattaataataatcttaatctttaagaattaataataatccttaatcgcaataataatcgcaaggaggagaagtaagtccctcctccttctgtatgaacttttctcccacatgctgctgtatggtttagtgagagtgaagttctaaagaacatcaatatgattggtgggataatccaaagacattttttcagaatcaaatggcatgtcgaaggtttgtttcttgcatatgtatttactggtccacagcacaaaataaagtgaccacatatacataggaaagttgaatttgtacacatacagcatctgaaatgtatctgatgttcagcatcaagatttcactgaacattgtagaaatgtgtatcttttgcatgtatattttacattgattttctatttatgtacatctagaaagttttaaccctaataaatagttttgtaattttgaa

SEQ ID NO: 256840 - DNA, 2559 bp, Artificial Sequence
  derived and/or modified sequence
atgctgatcaccgagcggaagcacttccggagcggccggatcgcccaatccatgtccgaggccaatctgatagacatggaagccggaaagcttagcaagtcttgcaacatcaccgagtgccaggatcccgacctactgcataattggcccgatgccttcaccctgcgaggcaacaatgcgtctaaagtggcgaaccccttctggaatcagctctcagcctccaacccttttttagatgatatcacacagctgaggaataaccggaaacggaacaatatttcaatcctgaaagaagacccttttttgttttgtcgggaaattgaaaatgggaattcatttgacagcagtggggacgagcttgatgtgcaccaattgctgcgacagacaagttcccgaaactccggcaggagcaagtcagtctccgaactattagatattttggatgacacagcacatgcccatcagtcaattcacaatagtgaccagatactccttcatgatctggaatggctgaagaatgatagggaggcgtataagatggcatggctctcccagcggcagctggcgcgcagttgcttggacctgaatactatttctcaatctccaggttgggcccagacacaactcgctgaggtgacaatcgcctgcaaggtgaatcaccagggcggcagtgtgcagttgcccgaaagcgacatcacagtccatgtgcctcagggccacgtggctgtgggagaattccaggaagtgagcctgagagcattcctcgatcctccacacatgctgaatcacgaccttagctgtactgtctccccacttttagaaataatgctgggtaatctgaataccatggaggccctgctccttgagatgaagattggcgccgaagtgagaaaagatccctttagccaggttatgaccgaaatggtgtgtcttcattctctggggaaggagggtccattcaaagttctgtctaactgctacatttataaagacacaatccaggtcaagctcatcgatctgtctcaagtgatgtaccttgtagtcgcggcacaggccaaagctttgccaagtcctgcggcgacgatctgggactacatccacaagacaacctcgatcggtatttatgggcctaagtacattcaccctagcttcactgtggtgcttactgtgtgcggacacaactatatgccgggccaactgactatctctgatatcaagaagggcgggaagaatatttccccggtcgtattccagctttgggggaagcaaagtttcttacttgacaaacctcaggacctctccataagtattttctcctgcgacccagatttcgaggtgaagacagagggagagcggaaggaaattaagcaaaaacagctcgaggctggggaggtggtacaccagcagtttttatttagcctcgttgaacatcgcgaaatgcacctgtttgacttttgcgtgcaggtcgagccccctaacggagaacctgtagcacagttcagtataacgacccccgacccaacccccaacctgaagagattgtccaatcttcctggctacctgcaaaaaaaagaggaaatcaagtccgccccactgagtccaaagatcctggtcaaatatcccacgttccaagacaagacactcaacttttctaactacggggtgaccctgaaggccgtgctccggcagtcaaagattgattattttctggaatacttcaaaggggacactatagcactactgggcgagggcaaggttaaggctattgggcaatctaaagtcaaagagtggtatgtaggagtgctccggggtaaaatcggactggtacactgtaagaacgtgaaagtgatttcaaaggagcaagtaatgttcatgagcgacagtgtgtttaccacccgtaacttgcttgagcaaatagtattaccactcaagaagctcacctatatttacagcgtcgtgttgacgttggtttctgagaaagtgtacgattggaaagtgctcgcggatgttctaggatactcccacctgagcctggaggattttgaccagatccaggcagacaaagaatcagagaaggtctcctacgtcatcaagaagcttaaagaagactgccatacagagagaaacacccgcaaatttctgtacgagttgatagtggccctgctaaagatggattgtcaggagttagtagccagacttatccaggaagcggccgtgctaaccagcgctgtgaagctggggaagggctggcgggagctggctgagaaactggtcaggctgacaaagcagcagatggaagcgtacgagatcccccacagggggaacaccggagacgtggctgtggagatgatgtggaagcctgcatatgacttcctgtacacatggtctgcgcactacggaaacaactatagggacgtgctccaagatctccaatctgccctggaccgtatgaaaaaccccgtgacgaaacattggcgcgagctcaccggggtactgatcctcgtcaattcactggaggtgcttagagtcacagctttttcaacaagtgaagaggtttag

SEQ ID NO: 256841 - DNA, 2559 bp, Artificial Sequence
  derived and/or modified sequence
atgctgatcaccgagcggaagcacttccggagcggccggatcgcccagtcaatgagcgaggccaacctgattgatatggaggcaggcaaactgagcaagtcatgcaacatcactgaatgtcaggatccagacctgttacataattggcctgatgcttttaccctgcgaggcaacaacgcatctaaggttgccaatccgttctggaaccagctgagcgcgagcaacccatttctagatgatatcactcagttgagaaataatcgcaaaaggaacaatatatccattttgaaggaggatccttttctattctgccgcgaaattgagaatggtaactcctttgattcttctggcgacgagctcgacgtccatcagttactaagacagacttcatctcggaattcaggccggagcaagtccgtgagcgagttacttgatattctcgacgataccgcccacgcgcaccaatccatacataattccgaccaaattctccttcatgatttagagtggcttaaaaacgacagggaggcctataaaatggcttggcttagtcaaaggcagctagcacggtcctgtctggatctcaatactattagccaatccccggggtgggctcagactcagcttgcggaggtgacaattgcctgtaaagtgaaccaccaaggcggctcagtgcagcttccagaatcggatattaccgtccacgtcccccagggccatgtcgccgtaggcgaatttcaggaggtgagcctccgggcattcctggacccccctcatatgctaaatcacgacttatcatgtaccgtgagccccctcctggagattatgctcggaaacctcaacacgatggaagccttgttgctcgagatgaagattggtgctgaggtgagaaaagatcctttcagccaggttatgactgaaatggtgtgcctgcattccctgggcaaagaaggccctttcaaggtcctgagtaactgctatatctataaggatacaatccaggtgaagcttatcgatctgtcgcaggttatgtatctcgtggtggccgctcaggctaaggcactgccctctcccgctgctacaatttgggactatattcacaagacaactagcattggcatttatgggcccaaatatatccacccttcctttactgtggtcctcacagtgtgcggccataattacatgccggggcagctgactatctccgatatcaaaaagggaggtaaaaacataagccctgtggtgttccagctgtggggcaagcagagctttctgcttgataaaccccaggatctgagcatctctatcttctcttgtgatccagatttcgaggttaaaaccgagggggaacggaaagagatcaagcagaagcaactcgaggctggagaggttgtccatcaacaattcctcttctcccttgttgaacaccgcgaaatgcatctctttgatttttgtgtgcaggtggaacctccgaacggcgagcctgtggcccaattcagtataaccacccctgatccaacccctaacctgaaacgcctgtcaaatctgccaggctatctgcagaaaaaggaggagatcaaaagcgcacccctgagtccaaaaatactggtaaagtaccccacctttcaggacaaaactctcaacttctccaactatggcgtgactttgaaggccgttcttcgtcagagcaagattgattacttccttgagtactttaaaggggacacgatcgcactgcttggcgagggtaaggttaaagccatcgggcagagcaaagtgaaagagtggtatgttggagtgctgcggggcaagatcggcctcgttcactgtaagaacgttaaagtgatctccaaagaacaggtcatgttcatgagtgacagcgtttttactactaggaacctcctggagcagatcgtgcttcctctgaagaagctgacctacatttatagtgtcgtcttaacattggtttccgagaaggtgtatgattggaaggtgcttgcagacgtcctgggctatagccatctttccctcgaagattttgatcagatacaggctgacaaggagtctgagaaagtgtcctatgtcattaaaaagctgaaagaagactgccatactgagcgaaatactcgtaagttcttgtacgagctaattgtggcgcttctgaaaatggactgtcaggagctagtggcgaggctgattcaggaagcagctgtcttgaccagtgccgttaaacttggaaaggggtggagggagttggctgagaagctggttcggcttacaaagcaacagatggaggcctacgagataccccatcgaggaaataccggagatgtggccgttgagatgatgtggaaacctgcatacgacttcctttacacatggtccgcccactatgggaacaactatcgagacgtcctccaagacctacaaagcgctctagacaggatgaaaaaccccgtcacaaaacactggcgggagctcaccggagtcctgatattggtcaacagtcttgaggtcctgagggtcacagccttctccacctccgaagaggtatag

SEQ ID NO: 256842 - DNA, 2559 bp, Artificial Sequence
  derived and/or modified sequence
atgctgatcactgagaggaagcactttcggtcggggaggatcgcacagagtatgtctgaagccaacctaatagacatggaggcaggcaagctgagtaagagctgtaacattaccgagtgccaggaccctgacctcctgcataattggcccgacgcatttaccctccgcggaaacaatgcatctaaggtggccaacccgttttggaatcagttaagcgcgtcaaacccatttctggatgacattacgcaattacgcaacaatcggaagcgcaacaatatttcgatcctgaaagaagacccttttctgttctgccgggaaattgaaaatggaaatagcttcgatagttcaggtgacgagctcgacgtgcaccagctgttgcgccagacctccagtaggaattccggcagaagcaagagtgtttctgaactgctcgatattcttgacgacaccgcccacgcacatcaatccattcacaacagtgaccaaatcctgctgcacgatctagagtggttaaaaaatgaccgcgaggcctacaaaatggcctggttaagccaacgtcagcttgctaggtcctgcctggatttgaatacaatctcacagtctccaggatgggcccagacacagctggccgaagtgacaatcgcgtgcaaggtaaaccaccaaggcggaagcgtgcaactaccagagagcgatattactgtgcacgtgccacagggacacgttgccgtcggcgagtttcaggaagtcagcctccgggctttcctggacccgccacacatgctcaatcatgatctgagctgtactgtgtccccgctgttagagattatgctaggcaacctaaacaccatggaagccctgctactggagatgaaaattggcgcagaggtcagaaaggaccccttctcgcaggtgatgactgagatggtgtgtctccacagcctgggcaaggaggggcctttcaaagtcctgtccaactgctatatatataaggatacgatccaggttaaactgatcgacctttctcaggtcatgtacttagttgtggcagcccaagcgaaagcgttgccaagcccggctgctacgatttgggattatatacacaagaccacatcgattggaatttacgggcctaagtacatccacccctctttcacggtcgtcctgactgtctgtgggcacaactacatgccagggcaactgactatttccgacattaagaagggcggtaaaaatattagtcccgtggtatttcagctgtggggtaaacaaagttttcttctcgacaagccacaggacctgtctatttccatcttttcctgtgaccctgattttgaagttaaaaccgagggtgaaagaaaggaaatcaagcagaaacaactcgaggccggtgaagtcgttcaccagcagtttctgttctcactagtggaacaccgtgagatgcatttattcgatttttgcgtgcaggtggagccacccaatggggagcccgtggcacagttcagcattactacccccgacccgactccgaatctgaagcgtctgagcaacctccctggatacctacagaagaaagaagagattaaatctgcaccactcagtcctaagatcctggttaagtaccccactttccaggataagacacttaatttctcaaattatggcgttacccttaaagcagtccttagacagtctaaaatcgactatttcctcgagtatttcaaaggagacacaatcgccttgctgggcgagggcaaagtgaaggcgatcggacagtcaaaagtgaaggagtggtacgtcggggtcctgagggggaaaattggactggtccactgcaagaacgttaaggtgatttctaaagagcaggttatgtttatgtcagattccgttttcacaaccaggaatctactggagcagatcgtgttacctctcaaaaagctgacttatatatatagcgtggtactaacgctcgtgagtgagaaggtctacgattggaaggttttagccgatgtgctggggtattcccacctgagcctggaggactttgatcagatccaggcagacaaggagagcgagaaggtttcctacgtcatcaaaaagttgaaagaggactgccatactgagagaaatacccgcaagttcctctacgaacttattgtagcactcttaaagatggattgccaggagctggtggccagacttatccaggaggccgctgtgttaacctccgcagttaaactgggaaaaggctggcgagagttggccgagaaactggtccgcctgaccaagcaacagatggaagcgtatgagattccacacaggggcaacacgggagacgtggccgtggaaatgatgtggaagcctgcatacgacttcctgtatacctggtccgctcattacggcaataattacagggacgtgctccaagacctgcagagcgctctcgacagaatgaagaaccctgtgactaagcattggcgtgagttaaccggcgtccttattctagtgaactctctcgaagtgcttcgtgtcactgctttctctacttccgaggaagtctag

SEQ ID NO: 256843 - DNA, 2559 bp, Artificial Sequence
  derived and/or modified sequence
atgctgatcacagaacggaaacattttcggtccggccgtatcgcacagtccatgtccgaggcgaatttgatcgatatggaggccggaaagttgagcaagtcctgtaacataaccgaatgccaagatccagacttgttgcacaattggcccgacgcgttcactctcagggggaacaacgccagcaaagtagctaatcccttttggaaccagctctccgcaagcaaccccttcttagacgatatcactcagctaagaaacaacagaaagcgcaataacatctcaatcctcaaggaggaccccttcctgttttgtagagagatcgagaacgggaactctttcgactccagtggcgatgaactcgatgtccaccagctcctaaggcagacatcgtccagaaattcaggcaggagcaagtctgtgtctgagctactagatatcctggacgacacggcccatgcacaccagtccatacataattccgaccagatcctgcttcacgatctggagtggctgaagaatgatcgagaggcatataaaatggcctggcttagtcagcggcaacttgccagatcatgcctggatctgaataccatctcccaatcaccaggttgggcccagactcaactcgccgaggtgacaatagcctgcaaggtcaatcaccagggagggtctgtgcagctaccagaaagtgatattaccgtgcacgtgcctcagggccacgtggcggttggtgagttccaggaggtgtccttacgagccttcctggaccctcctcatatgctgaatcacgacctgagctgtaccgtgtctccactgctggagatcatgctggggaacctgaataccatggaggccctgttattggagatgaagattggagccgaggttcgtaaggaccccttttcccaagtgatgacagaaatggtttgcctgcactctctcgggaaggagggacctttcaaagttctgtccaattgctacatttacaaagacactatccaagtgaagcttatagatctttcacaagtgatgtaccttgtggtcgcagcgcaggccaaagcgctgccttcaccagccgctacaatttgggactacattcacaagaccacctctatcggtatttacgggcctaagtacatccacccttcatttaccgtggtactgactgtgtgcggccacaattacatgcccggtcagctaaccataagtgatattaagaaaggaggaaagaacatctcacctgttgtgtttcagctctggggcaaacaaagctttttgctcgataaaccccaggatctgagcatttcaattttctcctgcgatccagactttgaggtcaagactgagggtgaaagaaaggagattaaacagaagcagctggaggctggggaggttgtgcatcaacaatttctttttagcctggtggagcacagagagatgcatttgtttgatttctgtgtgcaggtcgagccacctaatggcgaaccggttgctcagttttcgattaccaccccagatcccacccccaacctcaagcgcctgagcaatctccctggctacctgcagaaaaaagaagagatcaagtcagccccactgagcccaaaaattctcgtgaagtaccccacctttcaagataaaacattgaacttttcaaactacggggtgacattgaaagcagtgttgcggcagagcaaaatcgactacttccttgaatatttcaagggagatactatcgccctgttgggtgagggaaaggtgaaggccattggacagagtaaggtgaaggagtggtatgtcggcgtgctcaggggcaaaatcggactggtccattgtaagaacgtcaaggtgatctctaaagaacaggttatgtttatgtctgacagtgtcttcacaactcgcaatctcttagagcagatagttctgccactgaaaaagttaacctacatttatagtgtggtccttaccctggtaagtgaaaaggtttacgactggaaagtcctcgccgacgttttgggttattcccatctgtccttagaagatttcgatcagattcaggccgacaaagaatcagaaaaagtctcctatgtcataaagaagctcaaggaagattgtcacacagagcgcaacacccggaagttcttgtacgagttgattgtggctctgctgaaaatggattgccaggagctcgtcgcccgactcatccaagaggcagccgtgttaaccagcgctgtaaagttaggaaaaggctggagagaacttgcggagaaactagtccggctaacaaaacaacagatggaagcctacgaaatcccccatcgtggcaatacaggagacgtcgcggttgagatgatgtggaaacccgcttacgatttcttgtatacatggtcagctcattacggcaataactaccgggatgttttacaggacctccagtctgctctggacagaatgaagaaccctgttacaaaacattggcgcgaactgacaggagtgttgatcctcgtcaatagcctggaagtgctgcgcgtgacggcattctccacaagcgaggaggtctag

SEQ ID NO: 256844 - DNA, 2559 bp, Artificial Sequence
  derived and/or modified sequence
atgctgatcaccgagagaaagcacttcagaagcggcagaatcgcccagagcatgagcgaggccaacctgatcgacatggaggccggcaagctgagcaagagctgcaacatcaccgagtgccaggaccccgacctgctgcacaactggcccgacgccttcaccctgagaggcaacaacgccagcaaggtggccaaccccttctggaaccagctgagcgccagcaaccccttcctggacgacatcacccagctgagaaacaacagaaagagaaacaacatcagcatcctgaaggaggaccccttcctgttctgcagagagatcgagaacggcaacagcttcgacagcagcggcgacgagctggacgtgcaccagctgctgagacagaccagcagcagaaacagcggcagaagcaagagcgtgagcgagctgctggacatcctggacgacaccgcccacgcccaccagagcatccacaacagcgaccagatcctgctgcacgacctggagtggctgaagaacgacagagaggcctacaagatggcctggctgagccagagacagctggccagaagctgcctggacctgaacaccatcagccagagccccggctgggcccagacccagctggccgaggtgaccatcgcctgcaaggtgaaccaccagggcggcagcgtgcagctgcccgagagcgacatcaccgtgcacgtgccccagggccacgtggccgtgggcgagttccaggaggtgagcctgagagccttcctggaccccccccacatgctgaaccacgacctgagctgcaccgtgagccccctgctggagatcatgctgggcaacctgaacaccatggaggccctgctgctggagatgaagatcggcgccgaggtgagaaaggaccccttcagccaggtgatgaccgagatggtgtgcctgcacagcctgggcaaggagggccccttcaaggtgctgagcaactgctacatctacaaggacaccatccaggtgaagctgatcgacctgagccaggtgatgtacctggtggtggccgcccaggccaaggccctgcccagccccgccgccaccatctgggactacatccacaagaccaccagcatcggcatctacggccccaagtacatccaccccagcttcaccgtggtgctgaccgtgtgcggccacaactacatgcccggccagctgaccatcagcgacatcaagaagggcggcaagaacatcagccccgtggtgttccagctgtggggcaagcagagcttcctgctggacaagccccaggacctgagcatcagcatcttcagctgcgaccccgacttcgaggtgaagaccgagggcgagagaaaggagatcaagcagaagcagctggaggccggcgaggtggtgcaccagcagttcctgttcagcctggtggagcacagagagatgcacctgttcgacttctgcgtgcaggtggagccccccaacggcgagcccgtggcccagttcagcatcaccacccccgaccccacccccaacctgaagagactgagcaacctgcccggctacctgcagaagaaggaggagatcaagagcgcccccctgagccccaagatcctggtgaagtaccccaccttccaggacaagaccctgaacttcagcaactacggcgtgaccctgaaggccgtgctgagacagagcaagatcgactacttcctggagtacttcaagggcgacaccatcgccctgctgggcgagggcaaggtgaaggccatcggccagagcaaggtgaaggagtggtacgtgggcgtgctgagaggcaagatcggcctggtgcactgcaagaacgtgaaggtgatcagcaaggagcaggtgatgttcatgagcgacagcgtgttcaccaccagaaacctgctggagcagatcgtgctgcccctgaagaagctgacctacatctacagcgtggtgctgaccctggtgagcgagaaggtgtacgactggaaggtgctggccgacgtgctgggctacagccacctgagcctggaggacttcgaccagatccaggccgacaaggagagcgagaaggtgagctacgtgatcaagaagctgaaggaggactgccacaccgagagaaacaccagaaagttcctgtacgagctgatcgtggccctgctgaagatggactgccaggagctggtggccagactgatccaggaggccgccgtgctgaccagcgccgtgaagctgggcaagggctggagagagctggccgagaagctggtgagactgaccaagcagcagatggaggcctacgagatcccccacagaggcaacaccggcgacgtggccgtggagatgatgtggaagcccgcctacgacttcctgtacacctggagcgcccactacggcaacaactacagagacgtgctgcaggacctgcagagcgccctggacagaatgaagaaccccgtgaccaagcactggagagagctgaccggcgtgctgatcctggtgaacagcctggaggtgctgagagtgaccgccttcagcaccagcgaggaggtgtag

SEQ ID NO: 256845 - protein, 720 aa, Artificial Sequence
  derived and/or modified sequence
MPPPSDIVKVAIEWPGANAQLLEIDQKRPLASIIKEVCDGWSLPNPEYYTLRYADGPQLYITEQTRSDIKNGTILQLAISPSRAARQLMERTQSSNMETRLDAMKELAKLSADVTFATEFINMDGIIVLTRLVESGTKLLSHYSEMLAFTLTAFLELMDHGIVSWDMVSITFIKQIAGYVSQPMVDVSILQRSLAILESMVLNSQSLYQKIAEEITVGQLISHLQVSNQEIQTYAIALINALFLKAPEDKRQDMANAFAQKHLRSIILNHVIRGNRPIKTEMAHQLYVLQVLTFNLLEERMMTKMDPNDQAQRDIIFELRRIAFDAESDPSNAPGSGTEKRKAMYTKDYKMLGFTNHINPAMDFTQTPPGMLALDNMLYLAKVHQDTYIRIVLENSSREDKHECPFGRSAIELTKMLCEILQVGELPNEGRNDYHPMFFTHDRAFEELFGICIQLLNKTWKEMRATAEDFNKVMQVVREQITRALPSKPNSLDQFKSKLRSLSYSEILRLRQSERMSQDDFQSPPIVELREKIQPEILELIKQQRLNRLCEGSSFRKIGNRRRQERFWYCRLALNHKVLHYGDLDDNPQGEVTFESLQEKIPVADIKAIVTGKDCPHMKEKSALKQNKEVLELAFSILYDPDETLNFIAPNKYEYCIWIDGLSALLGKDMSSELTKSDLDTLLSMEMKLRLLDLENIQIPEAPPPIPKEPSSYDFVYHYG

SEQ ID NO: 256846 - protein, 718 aa, Artificial Sequence
  derived and/or modified sequence
MPPPSDIVKVAIEWPGANAQLLEIDQKRPLASIIKEVCDGWSLPNPEYYTLRYADGPQLYITEQTRSDIKNGTILQLAISPSRAARQLMERTQSSNMETRLDAMKELAKLSADVTFATEFINMDGIIVLTRLVESGTKLLSHEMLAFTLTAFLELMDHGIVSWDMVSITFIKQIAGYVSQPMVDVSILQRSLAILESMVLNSQSLYQKIAEEITVGQLISHLQVSNQEIQTYAIALINALFLKAPEDKRQDMANAFAQKHLRSIILNHVIRGNRPIKTEMAHQLYVLQVLTFNLLEERMMTKMDPNDQAQRDIIFELRRIAFDAESDPSNAPGSGTEKRKAMYTKDYKMLGFTNHINPAMDFTQTPPGMLALDNMLYLAKVHQDTYIRIVLENSSREDKHECPFGRSAIELTKMLCEILQVGELPNEGRNDYHPMFFTHDRAFEELFGICIQLLNKTWKEMRATAEDFNKVMQVVREQITRALPSKPNSLDQFKSKLRSLSYSEILRLRQSERMSQDDFQSPPIVELREKIQPEILELIKQQRLNRLCEGSSFRKIGNRRRQERFWYCRLALNHKVLHYGDLDDNPQGEVTFESLQEKIPVADIKAIVTGKDCPHMKEKSALKQNKEVLELAFSILYDPDETLNFIAPNKYEYCIWIDGLSALLGKDMSSELTKSDLDTLLSMEMKLRLLDLENIQIPEAPPPIPKEPSSYDFVYHYG

SEQ ID NO: 256847 - protein, 267 aa, Artificial Sequence
  derived and/or modified sequence
EEITVGQLISHLQVSNQEIQTYAIALINALFLKAPEDKRQDMANAFAQKHLRSIILNHVIRGNRPIKTEMAHQLYVLQVLTFNLLEERMMTKMDPNDQAQRDIIFELRRIAFDAESDPSNAPGSGTEKRKAMYTKDYKMLGFTNHINPAMDFTQTPPGMLALDNMLYLAKVHQDTYIRIVLENSSREDKHECPFGRSAIELTKMLCEILQVGELPNEGRNDYHPMFFTHDRAFEELFGICIQLLNKTWKEMRATAEDFNKVSVSGLL

SEQ ID NO: 256848 - protein, 732 aa, Artificial Sequence
  derived and/or modified sequence
MPPPSDIVKVAIEWPGANAQLLEIDQKRPLASIIKEVCDGWSLPNPEYYTLRYADGPQLYITEQTRSDIKNGTILQLAISPSRAARQLMERTQSSNMETRLDAMKELAKLSADVTFATEFINMDGIIVLTRLVESGTKLLSHYSEMLAFTLTAFLELMDHGIVSWDMVSITFIKQIAGYVSQPMVDVSILQRSLAILESMVLNSQSLYQKIAEEITVGQLISHLQVSNQEIQTYAIALINALFLKAPEDKRQDKHLNPLDLPVTDMANAFAQKHLRSIILNHVIRGNRPIKTEMAHQLYVLQVLTFNLLEERMMTKMDPNDQAQRDIIFELRRIAFDAESDPSNAPGSGTEKRKAMYTKDYKMLGFTNHINPAMDFTQTPPGMLALDNMLYLAKVHQDTYIRIVLENSSREDKHECPFGRSAIELTKMLCEILQVGELPNEGRNDYHPMFFTHDRAFEELFGICIQLLNKTWKEMRATAEDFNKVMQVVREQITRALPSKPNSLDQFKSKLRSLSYSEILRLRQSERMSQDDFQSPPIVELREKIQPEILELIKQQRLNRLCEGSSFRKIGNRRRQERFWYCRLALNHKVLHYGDLDDNPQGEVTFESLQEKIPVADIKAIVTGKDCPHMKEKSALKQNKEVLELAFSILYDPDETLNFIAPNKYEYCIWIDGLSALLGKDMSSELTKSDLDTLLSMEMKLRLLDLENIQIPEAPPPIPKEPSSYDFVYHYG

SEQ ID NO: 256849 - protein, 338 aa, Artificial Sequence
  derived and/or modified sequence
MPPPSDIVKVAIEWPGANAQLLEIDQKRPLASIIKEVCDGWSLPNPEYYTLRYADGPQLYITEQTRSDIKNGTILQLAISPSRAARQLMERTQSSNMETRLDAMKELAKLSADVTFATEFINMDGIIVLTRLVESGTKLLSHYSEMLAFTLTAFLELMDHGIVSWDMVSITFIKQIAGYVSQPMVDVSILQRSLAILESMVLNSQSLYQKIAEEITVGQLISHLQVSNQEIQTYAIALINALFLKAPEDKRQDMANAFAQKHLRSIILNHVIRGNRPIKTEMAHQLYVLQVLTFNLLEERMMTKMDPNDQAQRDIIFELRRIAFDAESDPSNAPGSGT

SEQ ID NO: 256850 - DNA, 2163 bp, Artificial Sequence
  derived and/or modified sequence
atgccccccccatccgacatagttaaagtcgcaatcgaatggcccggggcgaatgctcagcttttagaaatagaccagaaacgtcccctggccagcatcatcaaagaggtgtgtgacggctggtctttacctaacccagagtactacacgcttagatacgccgacggcccccagttgtatattactgagcaaacccgctccgatattaagaatggaaccatcctgcagctggccataagtccgtctagggccgccaggcagctgatggagcgcacgcagagctcaaacatggaaactcgcctggacgccatgaaggagttagctaaactgtccgctgacgtcacctttgctacagaattcattaatatggatgggattatcgtgctcaccagacttgtggagtcagggaccaagctcctctctcattactcagagatgctggcatttaccttgaccgcattcttagagttaatggaccacggtattgtatcctgggacatggtgtcaatcacttttataaagcagatcgcgggctacgtgagccagccaatggttgatgtctcaatcctgcagaggtccctggccatcctcgagagcatggtgctaaattcccagtcattgtatcagaagatcgccgaggagataacggtgggacagctgatttcacacctgcaggtgtccaaccaggagattcagacttacgcgatcgcactgatcaatgccttgttcttgaaagcacctgaggacaagcggcaggatatggctaacgccttcgcccaaaaacaccttaggagtatcatactcaatcacgttatccgaggcaatcgtccaatcaaaacggagatggcacaccagctctacgtacttcaagtactgacctttaatctcctagaagagcggatgatgaccaagatggacccaaacgaccaggcccagcgcgacatcattttcgaactaaggaggatcgccttcgacgctgagtccgacccatctaacgcaccagggtccgggaccgaaaagcgcaaggccatgtatactaaggactataaaatgcttggatttacaaaccacatcaatcccgccatggattttacacagactccgccaggaatgctggcactggacaacatgctgtacctggcaaaagtgcaccaggacacttatatccgaattgtgcttgaaaactctagccgggaggataaacacgagtgtccctttggacgcagcgctattgagcttacaaagatgctgtgtgagatcctccaggtgggagagctacctaacgaaggtagaaatgactatcacccaatgttctttacccacgacagagcctttgaggagctgttcggcatttgtattcagttgctgaataagacctggaaggagatgcgcgccacggccgaggattttaacaaggtgatgcaggtcgtgcgagagcaaatcacaagggccctgccttcgaagccaaattccttggaccaattcaaatccaagcttaggtctctgtcgtactctgagatactgcgcctgcgtcagagtgagcgcatgtcccaggacgacttccagtcacctcctatcgtcgaactgagggagaaaattcagccagagatcctagaactgattaaacaacagcgtctcaatcgcttatgcgagggatcttccttccggaaaattggcaatcgaagacggcaggagcggttttggtactgtcgattagcgctgaaccataaggtcctgcactacggagatctggacgacaatccgcagggagaggtcacatttgaatctttgcaggagaagatacccgtggcagacatcaaagctatagtgaccggcaaagactgtcctcacatgaaggaaaaatcagccctcaagcaaaataaggaggtcttggagttagcattctccatcttatacgaccctgacgagacccttaacttcatagccccaaataagtatgagtactgtatttggatagacggcctgagcgctctgttgggtaaagacatgagttctgagctaacaaagtcggacttagacaccctgcttagcatggaaatgaagctccgcctcctcgacttggagaatattcaaatcccagaggccccgccgcccattcctaaggagccctcctcatatgatttcgtatatcattatgggtag

SEQ ID NO: 256851 - DNA, 2157 bp, Artificial Sequence
  derived and/or modified sequence
atgccccccccgtctgatattgtcaaagtggccatagagtggcccggtgcaaacgcacagttgctcgagatagatcagaagcggcctctggcttctatcataaaggaagtgtgcgacggctggagcttgcccaatcctgaatattacaccttaaggtacgcagatggaccacagttgtacataactgaacagactcgcagcgacattaaaaacggaacaatcctccagttagctatcagcccatctagggccgcccgacagctgatggagcgcacacagagcagtaacatggagacgcggttagatgctatgaaagaactcgctaaattgagtgccgacgtgactttcgccacggagtttattaatatggacggcattatcgtgctgactaggctcgtggagtccggaactaagttgctgtcccacgagatgctagcgttcaccttgaccgcatttctggagctgatggatcatggcatcgttagttgggacatggtgtctataaccttcattaagcaaattgcgggatacgtgtctcaacccatggtggacgtctccattctgcagcgtagtcttgcaatactggaaagtatggtcctgaattcccaaagcctctaccagaaaatcgcggaggaaataacagttgggcaactgataagccacttacaagtttccaatcaagagattcagacatacgctattgcactcatcaatgccttattcttgaaggctcctgaggacaagaggcaggatatggctaatgcattcgcgcagaagcacttgcgatcgatcattctcaaccatgtgatccgcggcaaccgtcctattaaaacggagatggcacaccagctgtatgtgttacaggtcctgacgtttaacctcctcgaggaaaggatgatgaccaagatggaccccaacgaccaagcccaacgcgacattatctttgagctccgccgaatcgcttttgatgcagagtccgatcccagcaacgcgcccggtagtggtacggagaagaggaaagccatgtatactaaggattacaagatgcttggttttaccaatcacattaatcccgcaatggactttacccagaccccccctggaatgcttgccctagacaacatgctttacctggcgaaagtgcaccaagacacctacataaggatagttctcgaaaacagcagcagggaagacaagcacgagtgcccttttgggcgctccgcaatcgaactgactaagatgctttgcgagattttgcaagtgggagagctacctaacgagggccggaatgactaccacccaatgtttttcacgcacgatcgcgcgttcgaagaactctttggaatttgtatccagttgcttaacaagacgtggaaagagatgagggccaccgccgaagatttcaacaaagtcatgcaggtggtgcgcgagcagatcacacgggcactcccaagtaagccgaactcactggatcagttcaagtccaaactcaggagcttgtcctattccgagattctcaggctgcgacagtctgagagaatgtcccaggatgattttcaaagtccgcccattgtagagttgagagaaaagattcagccagagatactggagctgattaagcaacagcgattaaatcggctttgcgagggctctagcttccgcaagattggaaatagacggcgccaagagcggttctggtactgcagacttgccctgaatcacaaggttctccactacggcgacctggacgacaatccacagggagaggtcacgttcgaatctctgcaggaaaagattcctgtggctgacataaaagctatagtgacagggaaagactgcccacacatgaaggagaaatccgcattgaaacaaaataaggaggttctggagctggctttctccatcttatacgatcctgatgagacgttgaacttcattgcgccaaataaatacgagtactgcatctggatagacggtctatctgccctgctgggaaaagatatgagcagcgagctgacaaagtcagatctcgacacactgttgtccatggaaatgaaactgaggctcctggatctggaaaacattcaaattcctgaagctccccctcctatccctaaagagccttcctcttatgatttcgtgtaccactacgggtag

SEQ ID NO: 256852 - DNA, 2163 bp, Artificial Sequence
  derived and/or modified sequence
atgccccctcccagtgatattgtcaaggttgccattgagtggccgggtgctaacgctcagttactggagattgatcagaagaggcctctcgcctccatcattaaagaagtttgtgacgggtggagtctcccgaatcctgaatattacacgctgcggtacgccgatggacctcagctgtacatcacagagcaaacccgcagtgacataaaaaacgggactatccttcagttggccattagtccatccagagccgcgaggcagctgatggaaaggactcagagttctaatatggaaaccaggctcgacgccatgaaggagctcgccaaactttctgccgacgttaccttcgcgacagagtttattaacatggatggcattattgtgcttacaagacttgtagagtccggcactaagcttctgagccactattctgagatgcttgcattcactttgaccgctttccttgagcttatggatcacggaattgtttcctgggatatggtgagcatcacattcatcaagcagatcgctggctatgtctctcagcccatggtggatgtgtctatcctgcagagatccctggccatactggagtccatggtgctgaattcccaatctctgtaccagaagattgctgaagagattaccgtgggccaacttatctctcatctccaagtgtccaatcaggaaatccagacttatgcgatcgccctgataaatgcgctgttcctgaaggcaccggaagataaacgtcaggacatggctaacgctttcgctcagaaacacttgcgttcaattatcctgaaccatgtcatacgaggcaatagaccgataaagacagagatggcccaccagctctacgtactgcaggtcctcacctttaacctgctggaggagagaatgatgaccaaaatggatccaaatgaccaagcccaacgggacattatttttgaactacggcggatcgcattcgacgctgaatccgatccatcaaatgcacctggttcgggtaccgaaaagcgcaaagctatgtatacgaaggattacaagatgctagggttcactaatcacatcaacccagccatggactttacccagaccccacctggaatgctagcactcgataatatgctatacctggctaaggttcaccaggacacgtacatacgaatcgtgctggagaatagctcgcgcgaggacaagcacgaatgccccttcggccgctcggctatagagctcacaaaaatgctgtgcgagatcctgcaggtcggggagctgccgaacgaaggccgcaatgactatcatcccatgttttttactcatgaccgcgcatttgaggagctgtttggaatctgcatccagttgctgaacaagacctggaaggagatgcgcgctaccgccgaggatttcaataaggtgatgcaggtggtcagagagcaaatcaccagggctctccccagtaaaccaaactcgttggaccagtttaagagtaagctgcggtcactgtcttattccgaaatcctgagacttagacagtccgaacgcatgtcacaggacgatttccaaagccctcccatcgtcgagctacgggaaaaaattcagcctgagatcctcgaactcattaagcagcaaagactcaatcgcttgtgtgaggggtcttcctttagaaaaattggaaatcggagaagacaggagcgcttttggtattgcagactggctcttaatcacaaggtcctgcattacggcgacttggatgataaccctcaaggtgaagttacattcgagagcctccaggaaaaaatcccagtcgctgacatcaaagcaatagtgaccgggaaagactgtcctcatatgaaggaaaagagcgctttaaagcaaaacaaagaagtgctcgaactcgcgttcagcattttatatgacccagacgagacactcaatttcatcgcgccaaataagtatgagtactgcatctggatcgatggccttagtgccctcctcgggaaggatatgtcctctgagcttacaaagtctgacctggacaccttgttatccatggagatgaagctccgccttttggatcttgaaaatatccagatccctgaagctcctccacccattccgaaggaacctagcagttatgacttcgtttatcattacggctag

SEQ ID NO: 256853 - DNA, 2199 bp, Artificial Sequence
  derived and/or modified sequence
atgccacccccaagtgatattgtgaaagtcgctatcgaatggcccggagccaacgcgcagctcctcgagatcgaccagaagaggcccctcgctagcatcataaaagaggtctgtgatggctggtcgctccctaatcccgaatattatacacttagatatgccgacgggccacaactttacatcacggagcagaccagatcagacattaaaaatgggactattctccagctggctataagcccctcaagggctgcaaggcaactcatggagagaacacagagttcaaatatggaaacccgtttggatgcaatgaaagagctggccaagttatccgccgatgtcacctttgccactgagttcatcaacatggatggaattatcgtgctaactcgcctggtggaatccggtacgaaactgctgagtcactattccgaaatgttagcgtttactctgacagctttcttggaattgatggatcacggcattgtgtcgtgggacatggtttccattacttttattaaacagatcgcgggatacgtgtcccagcctatggttgacgtgtccatcttacaaaggtcccttgccatcctagagagcatggttcttaactcacagtccctgtaccagaagatcgctgaggaaattaccgtgggacagctgatttcccatctgcaggtgtccaaccaggaaatacagacatatgccatcgctctcattaatgccctgttcctgaaagcgccggaggacaagcgtcaagataaacacttgaacccattggacctgccggtgacggacatggccaacgcctttgcccagaagcatctcaggtccatcatcctcaaccacgtcattaggggcaacagaccaattaagaccgagatggcacatcaactatatgtcctgcaggtgctcaccttcaatttgctggaagagcggatgatgactaagatggaccccaatgaccaggctcagagggatatcatcttcgaattgcgaaggattgcattcgacgctgaaagcgatccctccaatgctcccggctctggtaccgaaaaacgcaaagctatgtacaccaaggactataaaatgctgggattcactaatcatatcaatccagccatggatttcacgcagacccctccaggtatgctggctcttgacaatatgctgtacctggctaaggttcatcaagacacctacattaggattgtcctcgaaaactcatctcgggaggacaaacacgaatgtcccttcggccggtccgccatcgaactaaccaaaatgttatgcgagattctgcaggtgggcgaactgcctaacgagggccgcaacgattaccaccctatgtttttcacccatgaccgggcattcgaggagctcttcggcatctgtatccagcttttaaataagacctggaaagagatgagagccacggccgaggatttcaataaagtcatgcaggtggttcgcgagcagatcaccagggcgctgccctccaagcccaactctctggatcagtttaaatctaaactccgctctctaagctactctgagatcctccggttaaggcagtcagaacggatgtcccaggacgatttccagtccccgcctattgtggaactgcgcgagaagattcagcccgagattcttgagctgattaagcagcagcggctgaaccgtctgtgcgaggggagttcctttagaaaaatcggaaaccgccggcgtcaggagaggttttggtactgtcgtcttgcccttaatcacaaggttctgcactatggggatttggacgacaatccacagggagaagtcaccttcgagtccctccaggaaaagattcccgtggccgacatcaaggcaatagtcacaggcaaggactgtcctcacatgaaagagaaatccgcccttaagcagaataaagaggtactcgagctagccttctccatcctttacgacccagatgagacattaaattttattgccccaaacaagtatgaatactgcatctggattgacggcctctccgcactgctgggcaaggatatgtcttctgagctcacaaaatcagatctcgatacgttgttaagtatggagatgaaactgagattactggatctcgagaatattcagatccccgaggcccctcccccaattcccaaagaaccatcctcctacgacttcgtttatcactacggttag

SEQ ID NO: 256854 - DNA, 1017 bp, Artificial Sequence
  derived and/or modified sequence
atgccacccccctccgacatcgtcaaagtggctatcgagtggcccggggcgaacgcccagctcttagagatcgatcaaaaacgtcctcttgctagtatcatcaaagaagtgtgcgatggttggagcctgccaaaccccgagtattataccttgcgctacgctgatggcccgcaactatacatcaccgagcagacacgctccgatataaagaacggaaccattctccagctggccatctctccaagcagggcggcacgccaattgatggaaaggactcagtcctccaacatggagacccggctagacgctatgaaggaactggcaaagctctccgccgacgtgacatttgccacagagttcattaatatggatgggatcatagtcttaacacgtctggtggaaagtggtaccaagcttctttcacactattccgaaatgctggccttcacgctcaccgctttcctggaactaatggatcatgggatcgtgagctgggatatggtaagtattacattcatcaagcagatagccgggtatgtctcccaacctatggtggatgtgagcattctgcagcggtctctagccatcctggagtcgatggtgctcaactctcagagcttgtaccagaaaattgctgaagaaattacagtaggacagctgatctcacacctccaagtgagtaaccaggaaatccagacttacgccatcgccctgatcaatgcactgttcctgaaagcccccgaggataagagacaagacatggctaacgcttttgctcagaagcacctgagaagcattatcttgaatcatgtgattcgtggcaaccggccaattaagactgagatggctcatcagctgtatgtgctacaggttctgacctttaatctcttggaggaacgcatgatgaccaaaatggatcctaacgaccaggcccagcgggatatcatttttgagctcaggagaatcgcatttgacgccgaatcggatccctccaatgcccctggtagcggcacctag

SEQ ID NO: 256855 - DNA, 2163 bp, Artificial Sequence
  derived and/or modified sequence
atgcctcctccaagtgacatcgtgaaggtggccatcgagtggccaggggccaatgcccagctgctggagattgaccagaagaggcccctggccagcatcatcaaggaggtgtgtgatggctggagcctgcccaaccctgagtactacaccctgcgctatgcagatggcccccagctgtacatcacagagcagaccaggagtgacatcaagaatggcaccatcctgcagctggccatcagccccagccgggccgcccggcagctgatggagaggacccagagcagcaacatggagacccggctggatgccatgaaggagctggccaagctgtctgcagatgtgacctttgccacagagttcatcaacatggatggcatcatcgtgctgacccggctggtggagagcggcaccaagctgctgagccactacagcgagatgctggccttcaccctgacagccttcctggagctgatggaccacggcatcgtgtcctgggacatggtgtccatcaccttcatcaagcagattgctggctacgtgtcccagcccatggtggatgtgtccatcctgcagaggagcctggccatcctggagagcatggtgctgaacagccagagcctgtaccagaagattgctgaggagatcaccgtgggccagctgatcagccacctgcaggtgagcaaccaggagatccagacctacgccatcgccctgatcaatgccctcttcctgaaggcccctgaggacaagaggcaggacatggccaatgcctttgcccagaagcacctgcggagcatcatcctgaaccacgtgatccggggcaaccggcccatcaagacagagatggcccaccagctgtatgtgctgcaggtgctgaccttcaacctgctggaggagaggatgatgaccaagatggaccccaatgaccaggcccagagggacatcatctttgagctgcggcgcatcgcctttgatgctgagagtgaccccagcaatgcccctggcagcggcacagagaagaggaaggccatgtacaccaaggactacaagatgctgggcttcaccaaccacatcaacccagccatggacttcacccagaccccacctggcatgctggccctggacaacatgctgtacctggccaaggtgcaccaggacacctacatcagaattgtgctggagaacagcagccgggaggacaagcatgaatgtcccttcggccgcagcgccatcgagctgaccaagatgctgtgtgagatcctgcaggtgggggagctgcccaatgaaggaagaaatgactaccaccccatgttcttcacccatgaccgggcctttgaggagctgtttggcatctgcatccagctgctgaacaagacctggaaggagatgagggccacagctgaggacttcaacaaggtgatgcaggtggtgcgggagcagatcacccgggccctgcccagcaagcccaacagcctggaccagttcaagagcaagctgcggagcctgagctacagcgagatcctgcggctgcggcagagcgagaggatgagccaggatgacttccagagcccccccatcgtggagctgcgggagaagatccagcctgagatcctggagctgatcaagcagcagaggctgaaccggctgtgtgagggcagcagcttcaggaagattggcaacagaagacggcaggagcgcttctggtactgccgcctggccctgaaccacaaggtgctgcactatggagacctggatgacaacccccagggcgaggtgacctttgagagcctgcaggagaagatccctgtggccgacatcaaggccatcgtgacaggcaaggactgcccccacatgaaggagaagagcgccctgaagcagaacaaggaggtgctggagctggccttcagcatcctgtatgaccctgatgagaccctgaacttcatcgcccccaacaagtatgagtactgcatctggattgatggcctgagcgccctgctgggcaaggacatgagcagcgagctgaccaagagtgacctggacaccctgctgtccatggagatgaagctgcggctgctggacctggagaacatccagatccctgaggcccccccacccatccccaaggagcccagcagctatgactttgtgtaccactatggatag

SEQ ID NO: 256856 - DNA, 2157 bp, Artificial Sequence
  derived and/or modified sequence
atgcctcctccaagtgacatcgtgaaggtggccatcgagtggccaggggccaatgcccagctgctggagattgaccagaagaggcccctggccagcatcatcaaggaggtgtgtgatggctggagcctgcccaaccctgagtactacaccctgcgctatgcagatggcccccagctgtacatcacagagcagaccaggagtgacatcaagaatggcaccatcctgcagctggccatcagccccagccgggccgcccggcagctgatggagaggacccagagcagcaacatggagacccggctggatgccatgaaggagctggccaagctgtctgcagatgtgacctttgccacagagttcatcaacatggatggcatcatcgtgctgacccggctggtggagagcggcaccaagctgctgagccatgagatgctggccttcaccctgacagccttcctggagctgatggaccacggcatcgtgtcctgggacatggtgtccatcaccttcatcaagcagattgctggctacgtgtcccagcccatggtggatgtgtccatcctgcagaggagcctggccatcctggagagcatggtgctgaacagccagagcctgtaccagaagattgctgaggagatcaccgtgggccagctgatcagccacctgcaggtgagcaaccaggagatccagacctacgccatcgccctgatcaatgccctcttcctgaaggcccctgaggacaagaggcaggacatggccaatgcctttgcccagaagcacctgcggagcatcatcctgaaccacgtgatccggggcaaccggcccatcaagacagagatggcccaccagctgtatgtgctgcaggtgctgaccttcaacctgctggaggagaggatgatgaccaagatggaccccaatgaccaggcccagagggacatcatctttgagctgcggcgcatcgcctttgatgctgagagtgaccccagcaatgcccctggcagcggcacagagaagaggaaggccatgtacaccaaggactacaagatgctgggcttcaccaaccacatcaacccagccatggacttcacccagaccccacctggcatgctggccctggacaacatgctgtacctggccaaggtgcaccaggacacctacatcagaattgtgctggagaacagcagccgggaggacaagcatgaatgtcccttcggccgcagcgccatcgagctgaccaagatgctgtgtgagatcctgcaggtgggggagctgcccaatgaaggaagaaatgactaccaccccatgttcttcacccatgaccgggcctttgaggagctgtttggcatctgcatccagctgctgaacaagacctggaaggagatgagggccacagctgaggacttcaacaaggtgatgcaggtggtgcgggagcagatcacccgggccctgcccagcaagcccaacagcctggaccagttcaagagcaagctgcggagcctgagctacagcgagatcctgcggctgcggcagagcgagaggatgagccaggatgacttccagagcccccccatcgtggagctgcgggagaagatccagcctgagatcctggagctgatcaagcagcagaggctgaaccggctgtgtgagggcagcagcttcaggaagattggcaacagaagacggcaggagcgcttctggtactgccgcctggccctgaaccacaaggtgctgcactatggagacctggatgacaacccccagggcgaggtgacctttgagagcctgcaggagaagatccctgtggccgacatcaaggccatcgtgacaggcaaggactgcccccacatgaaggagaagagcgccctgaagcagaacaaggaggtgctggagctggccttcagcatcctgtatgaccctgatgagaccctgaacttcatcgcccccaacaagtatgagtactgcatctggattgatggcctgagcgccctgctgggcaaggacatgagcagcgagctgaccaagagtgacctggacaccctgctgtccatggagatgaagctgcggctgctggacctggagaacatccagatccctgaggcccccccacccatccccaaggagcccagcagctatgactttgtgtaccactatggatag

SEQ ID NO: 256857 - DNA, 2199 bp, Artificial Sequence
  derived and/or modified sequence
atgcctcctccaagtgacatcgtgaaggtggccatcgagtggccaggggccaatgcccagctgctggagattgaccagaagaggcccctggccagcatcatcaaggaggtgtgtgatggctggagcctgcccaaccctgagtactacaccctgcgctatgcagatggcccccagctgtacatcacagagcagaccaggagtgacatcaagaatggcaccatcctgcagctggccatcagccccagccgggccgcccggcagctgatggagaggacccagagcagcaacatggagacccggctggatgccatgaaggagctggccaagctgtctgcagatgtgacctttgccacagagttcatcaacatggatggcatcatcgtgctgacccggctggtggagagcggcaccaagctgctgagccactacagcgagatgctggccttcaccctgacagccttcctggagctgatggaccacggcatcgtgtcctgggacatggtgtccatcaccttcatcaagcagattgctggctacgtgtcccagcccatggtggatgtgtccatcctgcagaggagcctggccatcctggagagcatggtgctgaacagccagagcctgtaccagaagattgctgaggagatcaccgtgggccagctgatcagccacctgcaggtgagcaaccaggagatccagacctacgccatcgccctgatcaatgccctcttcctgaaggcccctgaggacaagaggcaggacaagcacctgaaccccctggacctgcctgtgacagacatggccaatgcctttgcccagaagcacctgcggagcatcatcctgaaccacgtgatccggggcaaccggcccatcaagacagagatggcccaccagctgtatgtgctgcaggtgctgaccttcaacctgctggaggagaggatgatgaccaagatggaccccaatgaccaggcccagagggacatcatctttgagctgcggcgcatcgcctttgatgctgagagtgaccccagcaatgcccctggcagcggcacagagaagaggaaggccatgtacaccaaggactacaagatgctgggcttcaccaaccacatcaacccagccatggacttcacccagaccccacctggcatgctggccctggacaacatgctgtacctggccaaggtgcaccaggacacctacatcagaattgtgctggagaacagcagccgggaggacaagcatgaatgtcccttcggccgcagcgccatcgagctgaccaagatgctgtgtgagatcctgcaggtgggggagctgcccaatgaaggaagaaatgactaccaccccatgttcttcacccatgaccgggcctttgaggagctgtttggcatctgcatccagctgctgaacaagacctggaaggagatgagggccacagctgaggacttcaacaaggtgatgcaggtggtgcgggagcagatcacccgggccctgcccagcaagcccaacagcctggaccagttcaagagcaagctgcggagcctgagctacagcgagatcctgcggctgcggcagagcgagaggatgagccaggatgacttccagagcccccccatcgtggagctgcgggagaagatccagcctgagatcctggagctgatcaagcagcagaggctgaaccggctgtgtgagggcagcagcttcaggaagattggcaacagaagacggcaggagcgcttctggtactgccgcctggccctgaaccacaaggtgctgcactatggagacctggatgacaacccccagggcgaggtgacctttgagagcctgcaggagaagatccctgtggccgacatcaaggccatcgtgacaggcaaggactgcccccacatgaaggagaagagcgccctgaagcagaacaaggaggtgctggagctggccttcagcatcctgtatgaccctgatgagaccctgaacttcatcgcccccaacaagtatgagtactgcatctggattgatggcctgagcgccctgctgggcaaggacatgagcagcgagctgaccaagagtgacctggacaccctgctgtccatggagatgaagctgcggctgctggacctggagaacatccagatccctgaggcccccccacccatccccaaggagcccagcagctatgactttgtgtaccactatggatag

SEQ ID NO: 256858 - DNA, 1017 bp, Artificial Sequence
  derived and/or modified sequence
atgcctcctccaagtgacatcgtgaaggtggccatcgagtggccaggggccaatgcccagctgctggagattgaccagaagaggcccctggccagcatcatcaaggaggtgtgtgatggctggagcctgcccaaccctgagtactacaccctgcgctatgcagatggcccccagctgtacatcacagagcagaccaggagtgacatcaagaatggcaccatcctgcagctggccatcagccccagccgggccgcccggcagctgatggagaggacccagagcagcaacatggagacccggctggatgccatgaaggagctggccaagctgtctgcagatgtgacctttgccacagagttcatcaacatggatggcatcatcgtgctgacccggctggtggagagcggcaccaagctgctgagccactacagcgagatgctggccttcaccctgacagccttcctggagctgatggaccacggcatcgtgtcctgggacatggtgtccatcaccttcatcaagcagattgctggctacgtgtcccagcccatggtggatgtgtccatcctgcagaggagcctggccatcctggagagcatggtgctgaacagccagagcctgtaccagaagattgctgaggagatcaccgtgggccagctgatcagccacctgcaggtgagcaaccaggagatccagacctacgccatcgccctgatcaatgccctcttcctgaaggcccctgaggacaagaggcaggacatggccaatgcctttgcccagaagcacctgcggagcatcatcctgaaccacgtgatccggggcaaccggcccatcaagacagagatggcccaccagctgtatgtgctgcaggtgctgaccttcaacctgctggaggagaggatgatgaccaagatggaccccaatgaccaggcccagagggacatcatctttgagctgcggcgcatcgcctttgatgctgagagtgaccccagcaatgcccctggcagcggcacctag

SEQ ID NO: 256859 - DNA, 2163 bp, Artificial Sequence
  derived and/or modified sequence
atgcccccccccagcgacatcgtgaaggtggccatcgagtggcccggcgctaatgcacagctgctcgagattgatcaaaaaaggccactggccagtattatcaaagaggtttgtgacggctggtctctaccgaacccagagtactatacactgcgctatgccgatgggccccagttatacattactgagcaaacccgctcagatattaaaaatgggacaattcttcaactcgccataagtccaagcagagccgcccgccagctaatggaacgaacgcagtctagtaacatggaaaccagactcgacgctatgaaagagctggctaagctttccgccgatgtaacctttgctacagaatttatcaacatggatggaatcatcgtgttaactcgcttagtggagtccggcacaaaactgttgagtcattacagtgagatgttagcctttacccttaccgcatttctcgaactgatggaccacggtatcgtctcttgggacatggtgagtatcacattcatcaaacaaatcgccgggtacgtcagtcaacccatggtggatgtcagcatcttgcagcgatcactcgctattctggagtctatggtgctgaacagccagtctctgtaccagaaaattgcagaagaaattaccgtgggccaactcatctcccatttgcaggtctcaaaccaggaaatccagacatatgctattgccctgatcaacgctctattccttaaggcacctgaggacaaaaggcaggacatggctaacgccttcgcacagaagcacctcagaagtattattctgaaccatgtaatcagaggcaaccggccgataaagactgaaatggcccatcagttatacgtgctgcaggtgctcacattcaatctgttggaggagaggatgatgacaaagatggaccccaatgaccaggcacagagggacatcatttttgaactgcgccgcattgctttcgacgctgaatccgatccatcaaacgcgccaggctctgggactgaaaaaaggaaggcaatgtatactaaagattacaaaatgctggggttcaccaaccatattaaccctgcaatggacttcacgcagaccccccccggaatgctagccttggacaacatgctgtatctggcaaaggtgcatcaggacacttatattagaatcgtgctagagaacagctccagggaggacaaacacgagtgtcctttcggcaggtctgctattgaattaaccaaaatgctttgtgagattctgcaagtgggtgaactcccaaatgaagggaggaacgactatcatcctatgttcttcactcacgatagggcttttgaggagctttttgggatttgcatacagctgctgaacaaaacatggaaggagatgcgggccaccgctgaagactttaataaagtgatgcaggttgtgcgggaacaaattacacgggccctaccgagcaaacccaattctctcgatcagttcaaaagcaagctgaggagcctgagctattctgaaatactcaggttacgccaaagtgaaaggatgtctcaggacgatttccaatcccccccaatcgtggagctcagagagaagatccaaccggaaattctggagttgattaaacagcagcgcttaaaccgactgtgcgagggaagctcctttagaaagatcggcaaccggcgtagacaggaacgcttttggtactgcagactggcattgaaccataaggttttacactatggagacctggacgacaaccctcagggggaagtgacttttgagtccctccaggaaaaaattcccgtcgctgatattaaggccatcgttacagggaaggactgtcctcatatgaaggagaagtctgcacttaagcagaacaaggaagtactcgagctcgctttcagcatcctgtatgatcctgacgagaccttgaacttcatagctcccaacaagtatgagtactgtatttggattgacgggcttagtgccctcttagggaaagatatgtcctctgagcttactaagagtgatttagatacgctgttatctatggagatgaaacttaggcttctcgatttggaaaacatccagattccagaagcacctcctcctattcctaaggagcctagcagctacgattttgtctaccattatggctag

SEQ ID NO: 256860 - DNA, 2157 bp, Artificial Sequence
  derived and/or modified sequence
atgcccccccccagcgacatcgtgaaggtggccatcgagtggcccggagcaaacgcccagttgctggaaatcgaccagaagcgcccacttgcctctatcatcaaggaggtctgcgatgggtggagcctccccaaccccgagtactataccttgaggtacgccgatgggccccagctgtatatcactgaacaaactagaagtgatatcaagaacggaactatcttgcagttggcaatctccccatccagagcagcccgacagttaatggagcgaacccagagctcaaatatggagacccgcctagatgccatgaaagagttagctaaactaagtgccgacgtcaccttcgcaactgagttcattaatatggatggtatcattgtgctcacgaggttggtcgaaagtgggactaagctcttgtctcacgagatgctcgccttcacattgaccgcttttctcgagctgatggaccacggaatcgtctcttgggatatggtttccatcacctttatcaagcagattgccgggtacgtgtcacagcccatggtggacgtgtccatcctgcaaaggtctctggcaatactggaatctatggtcctaaatagccagagcctgtaccagaagattgctgaggagatcacggtggggcaattaatctcccacctgcaagtgtcaaaccaggaaattcaaacctatgcaatcgccttgatcaacgctctcttccttaaggcccctgaggataagaggcaggacatggcgaacgccttcgcacagaaacacctcagaagtatcattctgaatcacgtgatacgagggaatcggcctattaagaccgagatggctcatcaactgtatgttcttcaagtcttgacctttaacctgctagaagagaggatgatgacgaagatggatcctaatgatcaagctcagcgggacatcatctttgagctgcgtagaatcgcattcgacgcagaaagtgacccatccaacgcacccggctccggaacagagaagagaaaggccatgtacacaaaggactataagatgctgggtttcactaatcacattaaccctgcgatggacttcacccagacgcctcccgggatgctcgcccttgataatatgctctacttggccaaggtgcaccaggatacttacatccggatagtgcttgagaattcttcacgggaagataaacacgaatgtccattcgggagatccgcaatcgagctgactaagatgctgtgcgaaattcttcaagtgggggaactccccaatgagggacgcaacgattaccacccaatgtttttcacccacgacagagcatttgaggagctgttcggtatttgtatacagctgctgaataagacttggaaggagatgcgggccactgccgaggacttcaataaagtcatgcaagtggttcgcgaacagatcacccgggctctaccttcaaaacccaacagcttagatcagttcaaatccaagctgcgcagcctgagctatagcgagattctcagactcagacagagcgaacggatgtctcaggatgactttcaatctccccccatagtcgagttacgcgaaaagattcagcccgaaatccttgagctcataaaacagcagcgactgaacagactgtgcgaggggtcttcgttccggaaaatcggcaaccggcgaagacaggaacgcttctggtattgcagattagcccttaaccacaaagttctgcactacggggacctggacgataatccccagggggaggtaacattcgaaagcctgcaggaaaaaatacccgtggcagacataaaagccattgtcactgggaaggattgcccccacatgaaggagaagtctgcccttaagcagaataaggaggtgctcgaacttgccttcagcatcctctacgatcctgacgagaccttgaacttcatcgcccccaacaaatatgaatactgtatttggattgatgggctctccgccctgctgggtaaggacatgtcgagtgagttgaccaaatccgatctggacaccctcctctccatggagatgaaactgcgccttctggacctagagaatatccagattcccgaggcccccccacccatccctaaagagccctccagttacgactttgtgtatcactacggatag

SEQ ID NO: 256861 - DNA, 2163 bp, Artificial Sequence
  derived and/or modified sequence
atgcccccccccagcgacatcgtgaaggtggccatcgagtggcccggagctaacgctcagctgctcgagatagaccagaagagacccctggccagcatcatcaaagaagtgtgcgacggctggtcactccccaacccagagtactatacccttaggtacgcagatggcccccagctgtatatcacagaacaaacgaggtccgatattaagaatggaactatcctgcagctggcaattagcccttcacgtgccgcacggcagctgatggagaggactcagtcaagtaatatggaaaccaggctggacgccatgaaggaactggcaaagctgtcagccgatgtgacatttgccacagaatttatcaacatggatggaattatagtgcttacacgattagtggagtccggaacgaagctgctgtcacattattccgagatgcttgcattcactttgacggcctttcttgaactgatggaccacggaatcgtgtcctgggatatggtgagcattactttcatcaaacagattgcagggtatgtgtcacagccaatggttgatgtgagcatactccagagaagtctcgccatcctggagagtatggtgctgaatagccagtcattatatcagaagattgccgaggaaattaccgttggccagctgatctcacacttacaagtgtctaaccaggaaatccagacctatgctatagcactgataaacgctctttttcttaaggcacctgaggataaacgccaggacatggcaaacgcattcgctcagaaacacctgcgtagtattatcttgaatcatgtgatccgcgggaaccgcccgataaagacagaaatggcacatcagctgtatgtgttgcaggttttaacgttcaatctactggaggaaaggatgatgacaaaaatggaccccaacgaccaggctcaacgcgacattatcttcgagctacgaagaatcgccttcgacgcagagagcgatcccagcaatgcaccaggatccggcacagagaaacgcaaagctatgtacaccaaggactacaaaatgttagggtttacgaatcacattaaccccgctatggatttcacacagacaccgccaggcatgctagccttggataacatgttgtatctggcaaaggtccatcaagatacctatattcgcatcgtgctcgagaattccagccgtgaggacaaacacgagtgcccattcggccggagcgccattgagcttacaaagatgctgtgtgaaatattacaggtaggcgagcttccaaatgagggaagaaacgactaccaccccatgttttttactcatgatagggccttcgaggaactgttcggcatatgcatccagttgctgaacaagacatggaaagagatgagagcaacagctgaggacttcaacaaggttatgcaggtcgtgcgagaacaaatcactagagccctgccctccaaacctaactctctggaccaattcaagagcaaactcagatcactcagctacagcgagattcttcgattgcgccagtctgagaggatgagtcaggatgactttcagagcccgccaatagtggaactacgggaaaagatccagcctgagatcttagaactaatcaaacagcagcggctgaaccgcctctgtgaaggctctagcttcagaaaaatcggtaataggagacgccaagaacgtttctggtattgtaggttggcattgaatcacaaggtgcttcactacggcgaccttgatgacaatccccagggcgaagtgacattcgaatcccttcaggaaaaaattcctgttgccgatattaaggcaatcgtgaccggcaaagactgtcctcacatgaaagagaaaagcgctctcaagcagaataaggaggtacttgaactggctttctccatattgtatgacccagacgagaccctgaatttcattgctcccaacaagtacgagtactgcatttggatcgacggactgtcagcccttcttggcaaagatatgagttcagagctgactaaaagcgatctggacactctgttaagcatggaaatgaagctgcgccttcttgacctagagaatatccaaatccccgaggctccgcctccaattcctaaggagccctcgtcctacgatttcgtgtaccactacggctag

SEQ ID NO: 256862 - DNA, 2199 bp, Artificial Sequence
  derived and/or modified sequence
atgcccccccccagcgacatcgtgaaggtggccatcgagtggcccggcgccaatgcccagctgctggagatagaccaaaagcgacccctagctagcatcatcaaagaagtgtgtgatgggtggagtctacccaaccctgaatactatactttgagatacgctgacgggccccagttgtacattaccgagcaaactagatctgacatcaaaaatgggacgatcctacagctcgcaatctcgccaagccgcgcagcacgccagctgatggaaagaacccagtcatcaaacatggaaaccagacttgatgccatgaaagagttagccaagctctccgccgacgtcaccttcgcgaccgaattcattaatatggatggaatcatcgtgctgacccgacttgttgagtctggaacaaaactgctcagtcattactcagaaatgctggcttttacactgactgcttttcttgagctcatggatcacgggatcgtctcctgggacatggtatccataacattcattaagcagatcgcaggttacgtctcccagcctatggtagacgtatctattctgcaaagaagcctggctattttagagtctatggttttgaacagtcagtcgctctatcagaagattgctgaggagatcaccgtcggtcaattaatatcacacttgcaagttagtaatcaagagatccagacctacgccattgccctgattaatgctttgtttctgaaagccccagaggacaagagacaagacaaacacttaaatcccctggatctgcccgtgacagatatggccaacgcttttgctcagaagcacttacggagcattatcctgaatcatgtcatccggggtaaccgccctattaagactgagatggcgcatcagctgtacgtgttgcaagttttgaccttcaaccttctggaagagcgcatgatgactaaaatggatcctaacgaccaagctcagcgagacataatctttgagctgaggcggatcgcattcgatgccgagagtgacccctcaaatgcgcctgggtcgggtactgagaagcgcaaggcaatgtacacaaaagattataaaatgctgggattcacgaatcacatcaatccagccatggatttcacccagacgccccccgggatgctcgctctggacaacatgctgtacctggcaaaagtgcaccaggacacttacattcgtattgtgctggagaactctagtcgtgaggacaaacacgagtgcccctttggcagatctgccatcgaactgacaaaaatgttgtgtgagattcttcaggttggggagctcccaaacgaagggaggaatgactatcatccaatgttctttacccacgacagggcctttgaagaattgtttggaatctgcatccagttgcttaataagacctggaaagaaatgagggcaaccgcggaggatttcaataaggtgatgcaggtggtccgggagcagattacccgcgccttaccttcaaagcccaattcactcgaccagttcaaatctaaacttaggagtctgtcatactcggagattttacgactgcgacagagcgagcgtatgtctcaggatgactttcaaagcccccctatcgtggaacttcgagagaagatccagccagagatacttgagttgatcaagcagcagcgcctgaatcgattatgcgagggctcttcattcagaaagatcggtaatagaaggagacaggaaaggttctggtattgtcggctggctctaaatcataaggtcctccactatggcgacttagacgacaacccccaaggagaagtgaccttcgagagtctgcaggagaagatcccggtcgccgatatcaaggcaattgtgacaggcaaggattgtccgcacatgaaagagaaaagtgcactgaaacagaataaggaagttctggagctggcgtttagcatcctgtacgacccagatgaaacccttaacttcattgcaccgaacaagtacgagtactgcatttggattgatggactgtccgcgctactgggaaaggacatgtcaagtgaactgacaaagtccgacttagacaccctcctgagcatggaaatgaaattgcggctgctggacctggaaaacatccagatccccgaggcgcctccacccattcctaaagagccgagttcctacgatttcgtttaccactatgggtag

SEQ ID NO: 256863 - DNA, 1017 bp, Artificial Sequence
  derived and/or modified sequence
atgcccccccccagcgacatcgtgaaggtggccatcgagtggcccggtgctaatgcccagctgctggaaattgaccagaagagaccactggcatctatcatcaaggaggtgtgcgatggatggtcattgccaaatccagagtactacaccctgcgctacgccgatggaccacagctatacatcacagaacagacacgctcagacattaagaatggaaccatcctgcagctggctatctcccccagccgagccgccagacaactgatggaaagaacacagtcgtcaaatatggagactcgattggacgccatgaaggagctcgctaaacttagcgccgacgtcacattcgccaccgaattcattaacatggatgggattatcgtgctcactcggttggtggagagcggtactaagctgctctcacactactctgagatgctggcatttacactgaccgctttcctcgagcttatggaccatggaattgtaagctgggatatggtgtctatcacctttatcaagcagatcgcggggtacgtaagccaacccatggtagacgtttcaatcctgcagagatccctggccatcctggaatctatggtcctaaactctcagtcactctaccagaagattgccgaagagattacagtgggacagctgataagccatctacaggtctccaaccaagagatccagacctatgcgatagctctcataaacgccctctttctgaaggctccagaggacaagaggcaagacatggccaatgccttcgctcaaaaacacctgagaagtataattttgaaccacgttatacgcggcaatcgccctattaagaccgaaatggcgcaccagctttatgtcttacaggttctgacatttaatctcctggaagaaagaatgatgaccaaaatggaccccaacgatcaagcccagcgtgatataatatttgagctgaggcgcatcgccttcgatgcagaatccgaccccagtaatgccccagggtctggcacttag

SEQ ID NO: 256864 - DNA, 2163 bp, Artificial Sequence
  derived and/or modified sequence
atgccaccacctagcgacattgtcaaagtcgccatagagtggccaggtgctaatgcccagttgctggagattgaccagaagcgaccactggctagcattataaaggaggtgtgtgatgggtggtctctgcccaaccccgagtactacacgctgcgttacgcagacggcccacagttgtacattactgaacaaaccagatccgatataaagaacgggacaatcctgcaactggctatctctccctctagggctgcgaggcagttaatggaacgcactcagtcctctaatatggagactaggctggacgcaatgaaagagctggctaaattgtccgccgacgtcaccttcgccaccgagtttattaatatggatggcatcatcgtgcttacgagattggttgaatctgggacgaagctcttaagtcactactctgaaatgctggcatttacactgaccgctttcctggaattaatggaccatggcattgtgtcttgggatatggtgagtatcacttttattaagcagattgcagggtatgtctcccagcccatggtagacgtgagtatccttcagagaagccttgccatcctggagtcaatggtgttgaatagccagtcgctgtaccagaaaatagctgaggagatcactgttggacaactgattagtcatctccaagtcagtaaccaggagatccaaacctacgcaatcgcacttattaatgctctctttctgaaggctcccgaagataagagacaggatatggctaacgcatttgcccagaagcacctgcggtcaatcattctgaatcacgttataaggggaaatagaccgattaagacagaaatggcccaccagctttacgttctccaggtgctgacatttaatctactggaagagcggatgatgaccaagatggatccaaatgaccaggcccagcgggatattatttttgaactgcggagaatcgcgtttgatgccgagtctgacccttcaaatgcgccaggttccggaacggaaaaacgaaaagcaatgtacacgaaagactataagatgctgggatttacgaatcatatcaaccctgccatggattttacgcagaccccacctgggatgctggccttggataatatgctctacctcgctaaggttcaccaggatacttacattcgcatagtcctggagaatagctccagagaggataaacacgagtgcccatttggcagatccgccattgagctgacaaaaatgctatgtgagatcttacaagtcggcgaactccccaacgaaggcaggaacgactatcaccctatgttcttcacccacgacagggcctttgaggaactgttcgggatctgtattcagctgctgaataaaacctggaaagagatgcgggcaactgccgaggatttcaataaggtgatgcaggttgttcgagaacagattactagggcactccccagcaaacccaattcgttggaccagttcaagagcaagctcagaagtctgtcctacagcgaaattctgaggctacggcagtccgagcggatgtctcaggacgacttccagagccccccaattgtcgagctaagagagaagatccagcctgagatacttgagttgatcaagcaacaaagactgaataggctctgtgaaggctcaagtttccgtaaaatcggaaataggcgtcggcaggaaagattttggtattgtcggcttgctctgaaccacaaggtgcttcattatggagaccttgacgacaatcctcagggagaggtaacctttgaaagccttcaggagaaaattcccgtcgccgacattaaggctatcgtaacaggcaaagactgtcctcacatgaaagaaaagagtgcacttaaacagaataaggaggtactggaactggccttcagcatcctgtacgatcccgatgagacactcaacttcattgccccaaacaagtacgagtactgcatctggattgatggactgtcagccctcctggggaaggatatgagcagtgagcttactaagagcgatctcgatacactgctgagcatggaaatgaaactgcggctgcttgacctggagaatattcaaatcccggaggcccctccaccgattcccaaggagccgtcttcgtatgatttcgtgtaccactatggctag

SEQ ID NO: 256865 - DNA, 2157 bp, Artificial Sequence
  derived and/or modified sequence
atgccgcctcctagtgatatcgtaaaagtagccatcgaatggcctggtgctaacgcccagctgttagagatcgatcaaaagcgacccttggccagtatcatcaaagaagtgtgtgatggttggagcctgcctaaccctgaatactacacactgagatacgccgatggaccgcagctctacatcaccgaacaaactcgatctgatatcaagaacggaacaatcttgcaactcgccatctcgccaagccgagctgcaagacaattgatggaacgaactcaatccagcaacatggagacacgtctggatgcgatgaaggaactggcaaaattatctgcagatgtcacttttgccactgagttcatcaacatggatggaataattgtgctgacccgactcgtagaatctggcaccaagttgttatcgcatgaaatgctcgcctttacactgacggctttcctggagttaatggaccatggtatcgtcagctgggatatggtatcaataacattcataaagcagatcgccggttatgtgtcacaacccatggtcgacgtgtccatcctgcaaaggagcctggccatcctggaatcaatggtcctgaatagccagtctctgtaccagaagatcgcggaggaaatcaccgtgggacagctgatcagccacctgcaggtgtcaaatcaggaaatccaaacatacgctatagccttgataaatgcgctgttcctgaaggctcctgaggacaagcggcaggacatggccaatgcctttgcccagaaacacctcaggagcattatcctaaaccatgttattagaggaaatcgacccattaagacagagatggcccaccagctctatgtcctgcaggtcttgacgttcaaccttctcgaagaacggatgatgacgaagatggatcctaacgaccaggcccagagggacattatcttcgagttgaggcggatcgctttcgatgcggagtcggatccctccaacgcaccaggcagcgggaccgagaagcggaaagccatgtatacaaaagactacaaaatgttagggtttactaatcacatcaatccagccatggatttcacgcaaactccccctggtatgttggcacttgacaatatgttataccttgcaaaggtgcaccaagatacctacattaggattgttctggaaaattcctcccgggaagataagcacgagtgcccatttgggaggtctgccatcgagctgacaaaaatgctttgtgagatcctgcaagtgggtgagctccccaatgaaggtcggaacgactaccatcctatgtttttcacgcacgacagagcgtttgaagaattgtttggcatttgtatccagctgctgaataagacatggaaggagatgagggccaccgctgaggatttcaataaggtaatgcaggtggttagagagcagattacaagggccttacctagtaagcctaattcgctcgatcagtttaagagcaaattgagatcacttagctacagcgaaatcctcagattgcggcaatcagagcgcatgtcgcaggacgatttccagtccccaccaatcgtggagctgcgcgaaaaaatccagccagaaattcttgagctgattaagcagcagcggctgaatcggctatgtgaggggtcttcattcaggaaaattggcaaccggaggcgacaggagcgcttctggtattgcaggttagctctgaatcacaaggtgttgcactacggggatttagacgacaatcctcaaggcgaggtcaccttcgagagtcttcaggaaaagatacctgtcgctgacattaaagccatcgtgacaggtaaagactgcccccatatgaaagaaaagtccgcgctgaagcagaacaaagaagtcctcgagctcgccttctccatactctacgatcctgatgagactcttaacttcatcgcccctaataaatatgagtattgcatctggattgacggcctgagcgctcttctgggaaaagacatgtcttcagaactgacaaaatcagatctcgacactctcctgtcaatggaaatgaagcttcgcctattagatctggaaaatattcaaattcctgaggcacccccacccatccccaaggagccgtcctcctatgactttgtgtaccattacgggtag

SEQ ID NO: 256866 - DNA, 2163 bp, Artificial Sequence
  derived and/or modified sequence
atgccacccccatcagacatcgtgaaggtcgcgatcgagtggcccggagctaacgctcagttgctagagatcgaccaaaaacgtccactggcatctattatcaaagaggtctgtgatggttggagcctgcccaaccctgaatactataccctccgctatgccgacggaccccagctgtacatcactgaacaaacgagaagcgatattaaaaatgggaccattctgcagttagccatttctccctccagagccgcacgtcagctgatggagagaacgcagagctcaaacatggaaacacgcctggacgccatgaaggagctggcgaaactgagcgccgatgtcacctttgccacggaattcatcaacatggacgggatcatcgtcctgactcggttggtcgaatctggcaccaaactcttgagtcactattcggaaatgctggccttcaccctgactgcatttttagagctgatggatcatggcattgtgtcctgggacatggtgagcattactttcattaaacaaatagctggctatgtatcccagcctatggttgacgttagtatactgcagagatcattggccattctggagagcatggtccttaatagccagtcgctataccagaagatagcagaagagatcacagtggggcagctgatctcgcatctacaagtctccaatcaggagatacagacatacgctattgctctgatcaatgcgcttttccttaaggcaccagaggataaacgtcaggatatggcaaacgcattcgcccagaagcaccttaggtccattatccttaaccatgtcatcaggggaaacaggcctatcaagactgaaatggcgcaccaactgtatgtactccaggttctgacctttaacctcctcgaggagagaatgatgactaaaatggacccaaacgatcaggcacaaagagatattatttttgaactgcgcaggattgcctttgacgccgaatccgatccaagtaacgcccctgggtccgggaccgagaaacggaaagccatgtacacgaaggactacaaaatgctgggcttcacaaaccacatcaaccccgcaatggacttcacgcagaccccacctggaatgctcgcattggacaacatgttataccttgccaaggttcaccaggatacttacattcgaatcgtcctggaaaactcttccagggaggataaacatgagtgcccttttggacgcagtgctatcgaacttaccaagatgctttgtgagattcttcaggtgggggagctgccgaacgaaggcaggaacgactatcacccaatgttttttactcatgatcgggctttcgaggaactgttcggcatctgcattcagctcttgaataaaacctggaaagagatgcgtgcaacagcggaggatttcaacaaagttatgcaggtcgtgagggagcagattacccgtgccctgcccagtaaacccaacagtctggaccaattcaagtcaaagttacggtctctaagctactccgaaattctgcgtctgcgacaaagcgagaggatgagtcaggacgacttccaatcaccacccatagtcgagcttcgggaaaagatccagccggagatccttgaactgattaaacaacagcgcctaaaccgcttgtgcgagggttctagtttccgaaaaatagggaataggaggcgccaggaacggttctggtactgccggctcgccctaaatcataaggtgctacactacggagatttggacgacaacccccagggagaggtgacatttgaatccttgcaggagaagattcctgtagccgatattaaagccattgtgaccgggaaggactgtccccatatgaaggaaaagagtgccctcaaacaaaacaaagaggtgctcgagctcgccttttctatcctgtatgaccctgatgagacattgaactttattgcacctaacaaatatgagtattgcatatggattgacggtctcagcgccttgctcggaaaggatatgagttcagagcttactaagtccgatctcgatactctcctctctatggagatgaaactccgcttgctcgacctagaaaacattcagatccccgaggcccctccaccaattcccaaagagccgagtagctacgattttgtgtaccattatggatag

SEQ ID NO: 256867 - DNA, 2199 bp, Artificial Sequence
  derived and/or modified sequence
atgcctcctccttcagacattgtgaaagtcgcaatcgagtggcccggagctaacgcccagcttctcgagatcgaccaaaagagaccattagcgtctataatcaaagaggtgtgcgatggctggagcctgcccaaccctgagtactacactctgcgatacgccgatggccctcagctttacatcacggagcagaccagaagcgacattaagaatggtacaatcctccaactcgcgatttctccctctcgggcagctcgccaactgatggagaggactcaaagctcaaatatggagacacgcctggacgctatgaaagagctcgctaagctgagcgctgacgtgacctttgccaccgagtttataaatatggatgggataatcgtcttgactagactggtggagtcaggcactaaactgctctcacattatagcgaaatgttagcattcacgctgactgctttcctggaattaatggaccacggcatcgtttcctgggacatggtgagcatcacgttcatcaagcaaatagccggatacgtcagccagcccatggtcgatgtctccattctgcagcgctctctagcaatcctcgagtcaatggtcttgaacagccagtccctatatcagaaaatagccgaggagatcacagtgggtcaactgatttctcatctccaggtaagcaaccaggagatccagacctacgccatagctctgatcaacgcactctttctgaaggctcctgaagacaagagacaagacaaacacctcaatccactcgaccttccggtcactgatatggccaatgcatttgcgcaaaaacatttgcggagcatcattctgaatcatgtcattagagggaaccgacctataaagaccgagatggcccaccaactgtatgtgctccaggtactcacctttaacttattagaggagcgtatgatgacgaaaatggatcccaatgatcaggctcagcgggacattattttcgagttgcggagaatcgcgtttgacgctgagtcagacccctctaatgcgcctggatccggaactgaaaagagaaaggcaatgtacactaaagactacaaaatgctggggttcaccaaccacatcaatcccgctatggatttcacccaaacacctcctggaatgcttgccctggacaacatgctctatctggccaaggtccatcaggatacatacatccgaatcgtcctggaaaacagctcacgcgaggacaaacacgaatgtccctttgggaggtccgctatagagctgacaaagatgttatgtgaaattctgcaagtgggagaactacctaacgagggacgcaacgattatcacccaatgttctttacccatgatcgcgcttttgaagaactcttcggcatctgcattcagctgctgaacaagacttggaaggagatgagagcgacagcagaggattttaacaaagtgatgcaggtggttagggaacagattactcgagccctgccctcaaaacctaactccctcgatcagtttaaaagtaaactgaggagcctgtcgtatagcgagattctgaggttgaggcagtctgagaggatgagtcaggatgatttccagtcacctcctatcgtggagctgagggagaaaatccagcctgagatactggaactgataaaacagcagaggttgaatagactatgtgaaggctcaagtttcaggaaaattggtaaccggcgtaggcaggagcgtttttggtactgtcggcttgctctgaatcacaaagttcttcactatggagatcttgatgataatccgcagggggaggtgacgttcgagagtctccaggagaagatccccgtggcagacatcaaagctatcgtgactggcaaggactgtcctcatatgaaggaaaaatccgctctgaagcagaataaggaggttttggagttggcatttagcattctatacgaccccgacgagactctgaacttcatcgcaccaaataagtacgagtactgcatctggatcgatggcctctccgctctgctgggaaaagatatgtcctctgagctgaccaagagcgacctcgatactttgctgagtatggagatgaaacttcgccttctcgatttagagaacattcagattcccgaggctccgcctcctataccaaaagaaccatcttcctacgatttcgtgtatcactatggctag

SEQ ID NO: 256868 - DNA, 1017 bp, Artificial Sequence
  derived and/or modified sequence
atgcctcctcccagtgacatcgtgaaagttgcaattgagtggccaggtgcaaacgctcagttattagaaatcgaccagaagcgcccacttgcgagcattataaaagaggtctgcgacggttggtcgttgcccaatcccgagtactacacgcttagatacgccgacggtccccaactgtacatcactgaacagactagatccgatattaagaacggtaccatcctgcagttagctatcagtcccagccgtgctgcccgtcagttaatggaacgaacccaatcttccaacatggaaaccaggctcgatgcaatgaaggaactggccaagctgagcgccgatgtcacattcgcgacagagtttattaacatggatggcatcatcgtgcttactcggttggtcgagtctggtacaaaactgttatcacactattctgagatgctggcctttaccctgacagcctttttagagctgatggatcatgggatcgtgagttgggacatggtgtcaatcaccttcattaagcagatagctgggtacgttagtcagcccatggtggatgtgagtattctgcagaggtccctggctattctagagagtatggtgcttaacagccagagcctttatcagaagatcgcggaggagatcacagtcgggcagctcattagtcacctccaagtatcaaatcaggagattcagacgtacgccatcgctctcatcaatgccctgtttcttaaggcccctgaggacaaacgccaggacatggccaacgcgttcgcacaaaaacacctccgctcaataattcttaatcacgtgatccggggaaaccgaccaataaagaccgagatggcacaccaactgtatgtcttacaggtccttacctttaatctattggaggagaggatgatgacgaagatggatccaaacgaccaagcccagcgagacattatctttgagttgagaagaatcgcatttgatgctgagtccgacccaagcaacgcacccggttcaggtacttag

SEQ ID NO: 256869 - DNA, 2163 bp, Artificial Sequence
  derived and/or modified sequence
atgcccccccccagcgacatcgtgaaggtggccatcgagtggcccggcgccaacgcccagctgctggagatcgaccagaagagacccctggccagcatcatcaaggaggtgtgcgacggctggagcctgcccaaccccgagtactacaccctgagatacgccgacggcccccagctgtacatcaccgagcagaccagaagcgacatcaagaacggcaccatcctgcagctggccatcagccccagcagagccgccagacagctgatggagagaacccagagcagcaacatggagaccagactggacgccatgaaggagctggccaagctgagcgccgacgtgaccttcgccaccgagttcatcaacatggacggcatcatcgtgctgaccagactggtggagagcggcaccaagctgctgagccactacagcgagatgctggccttcaccctgaccgccttcctggagctgatggaccacggcatcgtgagctgggacatggtgagcatcaccttcatcaagcagatcgccggctacgtgagccagcccatggtggacgtgagcatcctgcagagaagcctggccatcctggagagcatggtgctgaacagccagagcctgtaccagaagatcgccgaggagatcaccgtgggccagctgatcagccacctgcaggtgagcaaccaggagatccagacctacgccatcgccctgatcaacgccctgttcctgaaggcccccgaggacaagagacaggacatggccaacgccttcgcccagaagcacctgagaagcatcatcctgaaccacgtgatcagaggcaacagacccatcaagaccgagatggcccaccagctgtacgtgctgcaggtgctgaccttcaacctgctggaggagagaatgatgaccaagatggaccccaacgaccaggcccagagagacatcatcttcgagctgagaagaatcgccttcgacgccgagagcgaccccagcaacgcccccggcagcggcaccgagaagagaaaggccatgtacaccaaggactacaagatgctgggcttcaccaaccacatcaaccccgccatggacttcacccagaccccccccggcatgctggccctggacaacatgctgtacctggccaaggtgcaccaggacacctacatcagaatcgtgctggagaacagcagcagagaggacaagcacgagtgccccttcggcagaagcgccatcgagctgaccaagatgctgtgcgagatcctgcaggtgggcgagctgcccaacgagggcagaaacgactaccaccccatgttcttcacccacgacagagccttcgaggagctgttcggcatctgcatccagctgctgaacaagacctggaaggagatgagagccaccgccgaggacttcaacaaggtgatgcaggtggtgagagagcagatcaccagagccctgcccagcaagcccaacagcctggaccagttcaagagcaagctgagaagcctgagctacagcgagatcctgagactgagacagagcgagagaatgagccaggacgacttccagagcccccccatcgtggagctgagagagaagatccagcccgagatcctggagctgatcaagcagcagagactgaacagactgtgcgagggcagcagcttcagaaagatcggcaacagaagaagacaggagagattctggtactgcagactggccctgaaccacaaggtgctgcactacggcgacctggacgacaacccccagggcgaggtgaccttcgagagcctgcaggagaagatccccgtggccgacatcaaggccatcgtgaccggcaaggactgcccccacatgaaggagaagagcgccctgaagcagaacaaggaggtgctggagctggccttcagcatcctgtacgaccccgacgagaccctgaacttcatcgcccccaacaagtacgagtactgcatctggatcgacggcctgagcgccctgctgggcaaggacatgagcagcgagctgaccaagagcgacctggacaccctgctgagcatggagatgaagctgagactgctggacctggagaacatccagatccccgaggcccccccccccatccccaaggagcccagcagctacgacttcgtgtaccactacggctag

SEQ ID NO: 256870 - DNA, 2157 bp, Artificial Sequence
  derived and/or modified sequence
atgcccccccccagcgacatcgtgaaggtggccatcgagtggcccggcgccaacgcccagctgctggagatcgaccagaagagacccctggccagcatcatcaaggaggtgtgcgacggctggagcctgcccaaccccgagtactacaccctgagatacgccgacggcccccagctgtacatcaccgagcagaccagaagcgacatcaagaacggcaccatcctgcagctggccatcagccccagcagagccgccagacagctgatggagagaacccagagcagcaacatggagaccagactggacgccatgaaggagctggccaagctgagcgccgacgtgaccttcgccaccgagttcatcaacatggacggcatcatcgtgctgaccagactggtggagagcggcaccaagctgctgagccacgagatgctggccttcaccctgaccgccttcctggagctgatggaccacggcatcgtgagctgggacatggtgagcatcaccttcatcaagcagatcgccggctacgtgagccagcccatggtggacgtgagcatcctgcagagaagcctggccatcctggagagcatggtgctgaacagccagagcctgtaccagaagatcgccgaggagatcaccgtgggccagctgatcagccacctgcaggtgagcaaccaggagatccagacctacgccatcgccctgatcaacgccctgttcctgaaggcccccgaggacaagagacaggacatggccaacgccttcgcccagaagcacctgagaagcatcatcctgaaccacgtgatcagaggcaacagacccatcaagaccgagatggcccaccagctgtacgtgctgcaggtgctgaccttcaacctgctggaggagagaatgatgaccaagatggaccccaacgaccaggcccagagagacatcatcttcgagctgagaagaatcgccttcgacgccgagagcgaccccagcaacgcccccggcagcggcaccgagaagagaaaggccatgtacaccaaggactacaagatgctgggcttcaccaaccacatcaaccccgccatggacttcacccagaccccccccggcatgctggccctggacaacatgctgtacctggccaaggtgcaccaggacacctacatcagaatcgtgctggagaacagcagcagagaggacaagcacgagtgccccttcggcagaagcgccatcgagctgaccaagatgctgtgcgagatcctgcaggtgggcgagctgcccaacgagggcagaaacgactaccaccccatgttcttcacccacgacagagccttcgaggagctgttcggcatctgcatccagctgctgaacaagacctggaaggagatgagagccaccgccgaggacttcaacaaggtgatgcaggtggtgagagagcagatcaccagagccctgcccagcaagcccaacagcctggaccagttcaagagcaagctgagaagcctgagctacagcgagatcctgagactgagacagagcgagagaatgagccaggacgacttccagagcccccccatcgtggagctgagagagaagatccagcccgagatcctggagctgatcaagcagcagagactgaacagactgtgcgagggcagcagcttcagaaagatcggcaacagaagaagacaggagagattctggtactgcagactggccctgaaccacaaggtgctgcactacggcgacctggacgacaacccccagggcgaggtgaccttcgagagcctgcaggagaagatccccgtggccgacatcaaggccatcgtgaccggcaaggactgcccccacatgaaggagaagagcgccctgaagcagaacaaggaggtgctggagctggccttcagcatcctgtacgaccccgacgagaccctgaacttcatcgcccccaacaagtacgagtactgcatctggatcgacggcctgagcgccctgctgggcaaggacatgagcagcgagctgaccaagagcgacctggacaccctgctgagcatggagatgaagctgagactgctggacctggagaacatccagatccccgaggcccccccccccatccccaaggagcccagcagctacgacttcgtgtaccactacggctag

SEQ ID NO: 256871 - DNA, 2199 bp, Artificial Sequence
  derived and/or modified sequence
atgcccccccccagcgacatcgtgaaggtggccatcgagtggcccggcgccaacgcccagctgctggagatcgaccagaagagacccctggccagcatcatcaaggaggtgtgcgacggctggagcctgcccaaccccgagtactacaccctgagatacgccgacggcccccagctgtacatcaccgagcagaccagaagcgacatcaagaacggcaccatcctgcagctggccatcagccccagcagagccgccagacagctgatggagagaacccagagcagcaacatggagaccagactggacgccatgaaggagctggccaagctgagcgccgacgtgaccttcgccaccgagttcatcaacatggacggcatcatcgtgctgaccagactggtggagagcggcaccaagctgctgagccactacagcgagatgctggccttcaccctgaccgccttcctggagctgatggaccacggcatcgtgagctgggacatggtgagcatcaccttcatcaagcagatcgccggctacgtgagccagcccatggtggacgtgagcatcctgcagagaagcctggccatcctggagagcatggtgctgaacagccagagcctgtaccagaagatcgccgaggagatcaccgtgggccagctgatcagccacctgcaggtgagcaaccaggagatccagacctacgccatcgccctgatcaacgccctgttcctgaaggcccccgaggacaagagacaggacaagcacctgaaccccctggacctgcccgtgaccgacatggccaacgccttcgcccagaagcacctgagaagcatcatcctgaaccacgtgatcagaggcaacagacccatcaagaccgagatggcccaccagctgtacgtgctgcaggtgctgaccttcaacctgctggaggagagaatgatgaccaagatggaccccaacgaccaggcccagagagacatcatcttcgagctgagaagaatcgccttcgacgccgagagcgaccccagcaacgcccccggcagcggcaccgagaagagaaaggccatgtacaccaaggactacaagatgctgggcttcaccaaccacatcaaccccgccatggacttcacccagaccccccccggcatgctggccctggacaacatgctgtacctggccaaggtgcaccaggacacctacatcagaatcgtgctggagaacagcagcagagaggacaagcacgagtgccccttcggcagaagcgccatcgagctgaccaagatgctgtgcgagatcctgcaggtgggcgagctgcccaacgagggcagaaacgactaccaccccatgttcttcacccacgacagagccttcgaggagctgttcggcatctgcatccagctgctgaacaagacctggaaggagatgagagccaccgccgaggacttcaacaaggtgatgcaggtggtgagagagcagatcaccagagccctgcccagcaagcccaacagcctggaccagttcaagagcaagctgagaagcctgagctacagcgagatcctgagactgagacagagcgagagaatgagccaggacgacttccagagcccccccatcgtggagctgagagagaagatccagcccgagatcctggagctgatcaagcagcagagactgaacagactgtgcgagggcagcagcttcagaaagatcggcaacagaagaagacaggagagattctggtactgcagactggccctgaaccacaaggtgctgcactacggcgacctggacgacaacccccagggcgaggtgaccttcgagagcctgcaggagaagatccccgtggccgacatcaaggccatcgtgaccggcaaggactgcccccacatgaaggagaagagcgccctgaagcagaacaaggaggtgctggagctggccttcagcatcctgtacgaccccgacgagaccctgaacttcatcgcccccaacaagtacgagtactgcatctggatcgacggcctgagcgccctgctgggcaaggacatgagcagcgagctgaccaagagcgacctggacaccctgctgagcatggagatgaagctgagactgctggacctggagaacatccagatccccgaggcccccccccccatccccaaggagcccagcagctacgacttcgtgtaccactacggctag

SEQ ID NO: 256872 - DNA, 1017 bp, Artificial Sequence
  derived and/or modified sequence
atgcccccccccagcgacatcgtgaaggtggccatcgagtggcccggcgccaacgcccagctgctggagatcgaccagaagagacccctggccagcatcatcaaggaggtgtgcgacggctggagcctgcccaaccccgagtactacaccctgagatacgccgacggcccccagctgtacatcaccgagcagaccagaagcgacatcaagaacggcaccatcctgcagctggccatcagccccagcagagccgccagacagctgatggagagaacccagagcagcaacatggagaccagactggacgccatgaaggagctggccaagctgagcgccgacgtgaccttcgccaccgagttcatcaacatggacggcatcatcgtgctgaccagactggtggagagcggcaccaagctgctgagccactacagcgagatgctggccttcaccctgaccgccttcctggagctgatggaccacggcatcgtgagctgggacatggtgagcatcaccttcatcaagcagatcgccggctacgtgagccagcccatggtggacgtgagcatcctgcagagaagcctggccatcctggagagcatggtgctgaacagccagagcctgtaccagaagatcgccgaggagatcaccgtgggccagctgatcagccacctgcaggtgagcaaccaggagatccagacctacgccatcgccctgatcaacgccctgttcctgaaggcccccgaggacaagagacaggacatggccaacgccttcgcccagaagcacctgagaagcatcatcctgaaccacgtgatcagaggcaacagacccatcaagaccgagatggcccaccagctgtacgtgctgcaggtgctgaccttcaacctgctggaggagagaatgatgaccaagatggaccccaacgaccaggcccagagagacatcatcttcgagctgagaagaatcgccttcgacgccgagagcgaccccagcaacgcccccggcagcggcacctag

SEQ ID NO: 256873 - DNA, 3669 bp, Artificial Sequence
  derived and/or modified sequence
gcgggcggaggctggaggagccgccgagcggagacccgggagcaggagctgggcctaggtctgcgccctggagggaggtgtagaaagaggtacatggagaacaagtttgtcaatccgtctgaacttcagttgccttacctgtaaggcagccgtgtctgtgtttttgtctcgcagaattagagcccattgggaacgatgccaccaccgtcagacattgtcaaagtggccattgagtggccaggtgctaacgcccagctccttgaaatcgaccagaaacggcccctggcatccattatcaaggaagtttgtgatgggtggtcgttgccaaacccagagtattataccctccgttatgcagatggtcctcagctgtacatcaccgaacagactcgcagtgacattaagaatgggacaatcttacaactggctatctccccgtcccgggctgcacgccagctgatggagaggacccagtcatccaacatggagacccggctggatgccatgaaggagctggccaagctctctgccgacgtgactttcgctactgagttcatcaacatggatggcatcattgtgctgacaaggctcgtggaaagtggaaccaagctcttgtcccactacagtgagatgctggcattcaccctgactgccttcctagagctcatggaccatggcattgtctcctgggacatggtttcaatcacctttattaagcagattgcagggtatgtgagccagcccatggtggacgtgtcaatccttcagaggtccctggccatcctggagagcatggtcttgaacagccagagtctgtaccagaagatagccgaggaaatcaccgtgggacagctcatctcacacctccaggtctccaaccaggagattcagacctacgccattgcactgattaatgcactttttctgaaggctcctgaggacaaacgacaggatatggcaaatgcatttgcacagaagcatctccggtctataatcctgaatcatgtgatccgagggaaccgccccatcaaaactgagatggcccatcagctatatgtccttcaagtcctaacctttaaccttctggaagaaaggatgatgaccaagatggaccccaatgaccaggctcaaagggacatcatatttgaactgaggaggattgcatttgacgcagagtctgatcctagcaatgcccctgggagtgggaccgaaaaacgcaaagccatgtacacaaaggactacaaaatgctgggatttaccaaccacatcaatccagccatggactttacccagactcctcctggaatgctggccttggacaacatgctgtacttggctaaagtccaccaggacacctacatccggattgtcttggagaacagtagccgggaagacaaacatgaatgcccctttggccgcagtgccattgagctcaccaaaatgctctgtgaaatcctgcaggttggggaactaccaaatgaaggacgcaatgactaccacccgatgttctttacccatgaccgagcctttgaagagctctttggaatctgcatccagctgttgaacaagacctggaaggagatgagggcaacagcagaggacttcaacaaggttatgcaagtcgtccgagagcaaatcactcgagctttgccctccaaacccaactctttggatcagttcaagagcaaattgcgtagcctgagttactctgagattctacgactgcgccagtctgagaggatgagtcaggatgacttccagtccccgccaattgtggagctgagggagaagatccagcccgagatccttgagctgatcaagcagcagcgcctgaaccggctctgtgagggcagcagcttccgaaagattgggaaccgccgaaggcaagaacggttctggtactgccggttggcactgaaccacaaggtccttcactatggtgacttggatgacaacccacaaggggaggtgacatttgaatccctgcaggagaaaattcctgttgcagacattaaggccattgtcactgggaaagattgtccccacatgaaagagaaaagtgctctgaaacagaacaaggaggtgttggaattggccttctccatcctgtatgaccctgatgagaccttaaacttcatcgcacctaataaatatgagtactgcatctggattgatggcctcagtgcccttctggggaaggacatgtccagtgagctgaccaagagtgacctggacaccctgctgagcatggagatgaagctgcggctcctggacctggagaacatccagattcccgaagccccaccccccatccccaaggagcccagcagctatgactttgtctatcactatggctgagcctggagccagaaacgacggtacccaggagaagggattttgggcccaggagaaacacttacattctggtgccttgtcttttgcttgtacagaatctgtagtgattttggtggccagtaaatgccagccatttctcaaacccacctcggaccacccagagtttcctcttggtccctgtctactaagagtcatgaaggcagggtgctctgcccactccatcaccatgaagcctgggattgggccacgaggaacaaacagcagatgcccttgccttccagtccaagaaactgcttcttgaaatggatttaacaacagccactcaccttttcctcctgagcctgctctctgatcagctggatccccacgtgagcaacagctggcccaggaaaggctgcctgcagaggacaggtgtgttgggcgtgttgagagccttgaagtgactacctgtatcttagatctgagtacaagcctgaggcttttgcttttgtcttttttgatgagggctcactccagcttcatatggtgccaagacgttgctgcttctgaggttggctctaacatctctggtctttagagccaccagatctctctggcccatacagatatcagagcagacggaaatttctccctgcaagcgctcagtctcatcccagcaagtcaaagacctcctggccaagtcctgccctcttaagtctccaggaacgctgcagggaaaacccagctgaggcctgggcctagactgtggtgaggtcactagattctactgctcttcccccacattaataccttttccttcctcagagagaaatctcccctaacctgaattgcagccccctccagtttgctttcctttggccttccagaccccaggaagttggccttcccttcctagtgctatggtttctgccattggccatgatttcagggagctggctgaggccggctgaggccacacctgtgccagtggggcttccctggtgctgcagcacttgtaaaccacacacacagcctctctccctggacatacgttagcacattggcattcagtattggtggcctggcatggtaggtactacccaatgaagagtgtactatatattttcattactataggccatacttatacagacgtgtatatatatttatataagatctacctatcttaggatggaaccttggggaaaaataaaattgaggggaagtaaaaagtatgtaacacttccagttgtgagccaagattgtaaccagagagcagccaggagcttcctgtcagtaaccatgttttcaataaatactctttcatgtacaaac

SEQ ID NO: 256874 - DNA, 2157 bp, Artificial Sequence
  derived and/or modified sequence
atgccaccaccgtcagacattgtcaaagtggccattgagtggccaggtgctaacgcccagctccttgaaatcgaccagaaacggcccctggcatccattatcaaggaagtttgtgatgggtggtcgttgccaaacccagagtattataccctccgttatgcagatggtcctcagctgtacatcaccgaacagactcgcagtgacattaagaatgggacaatcttacaactggctatctccccgtcccgggctgcacgccagctgatggagaggacccagtcatccaacatggagacccggctggatgccatgaaggagctggccaagctctctgccgacgtgactttcgctactgagttcatcaacatggatggcatcattgtgctgacaaggctcgtggaaagtggaaccaagctcttgtcccatgagatgctggcattcaccctgactgccttcctagagctcatggaccatggcattgtctcctgggacatggtttcaatcacctttattaagcagattgcagggtatgtgagccagcccatggtggacgtgtcaatccttcagaggtccctggccatcctggagagcatggtcttgaacagccagagtctgtaccagaagatagccgaggaaatcaccgtgggacagctcatctcacacctccaggtctccaaccaggagattcagacctacgccattgcactgattaatgcactttttctgaaggctcctgaggacaaacgacaggatatggcaaatgcatttgcacagaagcatctccggtctataatcctgaatcatgtgatccgagggaaccgccccatcaaaactgagatggcccatcagctatatgtccttcaagtcctaacctttaaccttctggaagaaaggatgatgaccaagatggaccccaatgaccaggctcaaagggacatcatatttgaactgaggaggattgcatttgacgcagagtctgatcctagcaatgcccctgggagtgggaccgaaaaacgcaaagccatgtacacaaaggactacaaaatgctgggatttaccaaccacatcaatccagccatggactttacccagactcctcctggaatgctggccttggacaacatgctgtacttggctaaagtccaccaggacacctacatccggattgtcttggagaacagtagccgggaagacaaacatgaatgcccctttggccgcagtgccattgagctcaccaaaatgctctgtgaaatcctgcaggttggggaactaccaaatgaaggacgcaatgactaccacccgatgttctttacccatgaccgagcctttgaagagctctttggaatctgcatccagctgttgaacaagacctggaaggagatgagggcaacagcagaggacttcaacaaggttatgcaagtcgtccgagagcaaatcactcgagctttgccctccaaacccaactctttggatcagttcaagagcaaattgcgtagcctgagttactctgagattctacgactgcgccagtctgagaggatgagtcaggatgacttccagtccccgccaattgtggagctgagggagaagatccagcccgagatccttgagctgatcaagcagcagcgcctgaaccggctctgtgagggcagcagcttccgaaagattgggaaccgccgaaggcaagaacggttctggtactgccggttggcactgaaccacaaggtccttcactatggtgacttggatgacaacccacaaggggaggtgacatttgaatccctgcaggagaaaattcctgttgcagacattaaggccattgtcactgggaaagattgtccccacatgaaagagaaaagtgctctgaaacagaacaaggaggtgttggaattggccttctccatcctgtatgaccctgatgagaccttaaacttcatcgcacctaataaatatgagtactgcatctggattgatggcctcagtgcccttctggggaaggacatgtccagtgagctgaccaagagtgacctggacaccctgctgagcatggagatgaagctgcggctcctggacctggagaacatccagattcccgaagccccaccccccatccccaaggagcccagcagctatgactttgtctatcactatggctga

SEQ ID NO: 256875 - DNA, 3678 bp, Artificial Sequence
  derived and/or modified sequence
gtctgcgccctggagggaggtgtagaaagaggtacatggagaacaagtttgtcaatccgtctgaacttcagttgccttacctgtaaggcagccgtgtctgtgtttttgtctcgcagaattagagcccattgggaacgatgccaccaccgtcagacattgtcaaagtggccattgagtggccaggtgctaacgcccagctccttgaaatcgaccagaaacggcccctggcatccattatcaaggaagtttgtgatgggtaggttgaaatggacctcgttttcaacagtggcagctccgactgaaagagcactcctacaccttgaggtggtcgttgccaaacccagagtattataccctccgttatgcagatggtcctcagctgtacatcaccgaacagactcgcagtgacattaagaatgggacaatcttacaactggctatctccccgtcccgggctgcacgccagctgatggagaggacccagtcatccaacatggagacccggctggatgccatgaaggagctggccaagctctctgccgacgtgactttcgctactgagttcatcaacatggatggcatcattgtgctgacaaggctcgtggaaagtggaaccaagctcttgtcccactacagtgagatgctggcattcaccctgactgccttcctagagctcatggaccatggcattgtctcctgggacatggtttcaatcacctttattaagcagattgcagggtatgtgagccagcccatggtggacgtgtcaatccttcagaggtccctggccatcctggagagcatggtcttgaacagccagagtctgtaccagaagatagccgaggaaatcaccgtgggacagctcatctcacacctccaggtctccaaccaggagattcagacctacgccattgcactgattaatgcactttttctgaaggctcctgaggacaaacgacaggatatggcaaatgcatttgcacagaagcatctccggtctataatcctgaatcatgtgatccgagggaaccgccccatcaaaactgagatggcccatcagctatatgtccttcaagtcctaacctttaaccttctggaagaaaggatgatgaccaagatggaccccaatgaccaggctcaaagggacatcatatttgaactgaggaggattgcatttgacgcagagtctgatcctagcaatgcccctgggagtgggaccgaaaaacgcaaagccatgtacacaaaggactacaaaatgctgggatttaccaaccacatcaatccagccatggactttacccagactcctcctggaatgctggccttggacaacatgctgtacttggctaaagtccaccaggacacctacatccggattgtcttggagaacagtagccgggaagacaaacatgaatgcccctttggccgcagtgccattgagctcaccaaaatgctctgtgaaatcctgcaggttggggaactaccaaatgaaggacgcaatgactaccacccgatgttctttacccatgaccgagcctttgaagagctctttggaatctgcatccagctgttgaacaagacctggaaggagatgagggcaacagcagaggacttcaacaaggttatgcaagtcgtccgagagcaaatcactcgagctttgccctccaaacccaactctttggatcagttcaagagcaaattgcgtagcctgagttactctgagattctacgactgcgccagtctgagaggatgagtcaggatgacttccagtccccgccaattgtggagctgagggagaagatccagcccgagatccttgagctgatcaagcagcagcgcctgaaccggctctgtgagggcagcagcttccgaaagattgggaaccgccgaaggcaagaacggttctggtactgccggttggcactgaaccacaaggtccttcactatggtgacttggatgacaacccacaaggggaggtgacatttgaatccctgcaggagaaaattcctgttgcagacattaaggccattgtcactgggaaagattgtccccacatgaaagagaaaagtgctctgaaacagaacaaggaggtgttggaattggccttctccatcctgtatgaccctgatgagaccttaaacttcatcgcacctaataaatatgagtactgcatctggattgatggcctcagtgcccttctggggaaggacatgtccagtgagctgaccaagagtgacctggacaccctgctgagcatggagatgaagctgcggctcctggacctggagaacatccagattcccgaagccccaccccccatccccaaggagcccagcagctatgactttgtctatcactatggctgagcctggagccagaaacgacggtacccaggagaagggattttgggcccaggagaaacacttacattctggtgccttgtcttttgcttgtacagaatctgtagtgattttggtggccagtaaatgccagccatttctcaaacccacctcggaccacccagagtttcctcttggtccctgtctactaagagtcatgaaggcagggtgctctgcccactccatcaccatgaagcctgggattgggccacgaggaacaaacagcagatgcccttgccttccagtccaagaaactgcttcttgaaatggatttaacaacagccactcaccttttcctcctgagcctgctctctgatcagctggatccccacgtgagcaacagctggcccaggaaaggctgcctgcagaggacaggtgtgttgggcgtgttgagagccttgaagtgactacctgtatcttagatctgagtacaagcctgaggcttttgcttttgtcttttttgatgagggctcactccagcttcatatggtgccaagacgttgctgcttctgaggttggctctaacatctctggtctttagagccaccagatctctctggcccatacagatatcagagcagacggaaatttctccctgcaagcgctcagtctcatcccagcaagtcaaagacctcctggccaagtcctgccctcttaagtctccaggaacgctgcagggaaaacccagctgaggcctgggcctagactgtggtgaggtcactagattctactgctcttcccccacattaataccttttccttcctcagagagaaatctcccctaacctgaattgcagccccctccagtttgctttcctttggccttccagaccccaggaagttggccttcccttcctagtgctatggtttctgccattggccatgatttcagggagctggctgaggccggctgaggccacacctgtgccagtggggcttccctggtgctgcagcacttgtaaaccacacacacagcctctctccctggacatacgttagcacattggcattcagtattggtggcctggcatggtaggtactacccaatgaagagtgtactatatattttcattactataggccatacttatacagacgtgtatatatatttatataagatctacctatcttaggatggaaccttggggaaaaataaaattgaggggaagtaaaaagtatgtaacacttccagttgtgagccaagattgtaaccagagagcagccaggagcttcctgtcagtaaccatgttttcaataaatactctttcatgtacaaa

SEQ ID NO: 256876 - DNA, 3574 bp, Artificial Sequence
  derived and/or modified sequence
tcccaagaaggcggggcgggcggaggctggaggagccgccgagcggagacccgggagcaggagctgggcctaggtctgcgccctgaattagagcccattgggaacgatgccaccaccgtcagacattgtcaaagtggccattgagtggccaggtgctaacgcccagctccttgaaatcgaccagaaacggcccctggcatccattatcaaggaagtttgtgatgggtggtcgttgccaaacccagagtattataccctccgttatgcagatggtcctcagctgtacatcaccgaacagactcgcagtgacattaagaatgggacaatcttacaactggctatctccccgtcccgggctgcacgccagctgatggagaggacccagtcatccaacatggagacccggctggatgccatgaaggagctggccaagctctctgccgacgtgactttcgctactgagttcatcaacatggatggcatcattgtgctgacaaggctcgtggaaagtggaaccaagctcttgtcccactacagtgagatgctggcattcaccctgactgccttcctagagctcatggaccatggcattgtctcctgggacatggtttcaatcacctttattaagcagattgcagggtatgtgagccagcccatggtggacgtgtcaatccttcagaggtccctggccatcctggagagcatggtcttgaacagccagagtctgtaccagaagatagccgaggaaatcaccgtgggacagctcatctcacacctccaggtctccaaccaggagattcagacctacgccattgcactgattaatgcactttttctgaaggctcctgaggacaaacgacaggatatggcaaatgcatttgcacagaagcatctccggtctataatcctgaatcatgtgatccgagggaaccgccccatcaaaactgagatggcccatcagctatatgtccttcaagtcctaacctttaaccttctggaagaaaggatgatgaccaagatggaccccaatgaccaggctcaaagggacatcatatttgaactgaggaggattgcatttgacgcagagtctgatcctagcaatgcccctgggagtgggaccgaaaaacgcaaagccatgtacacaaaggactacaaaatgctgggatttaccaaccacatcaatccagccatggactttacccagactcctcctggaatgctggccttggacaacatgctgtacttggctaaagtccaccaggacacctacatccggattgtcttggagaacagtagccgggaagacaaacatgaatgcccctttggccgcagtgccattgagctcaccaaaatgctctgtgaaatcctgcaggttggggaactaccaaatgaaggacgcaatgactaccacccgatgttctttacccatgaccgagcctttgaagagctctttggaatctgcatccagctgttgaacaagacctggaaggagatgagggcaacagcagaggacttcaacaaggttatgcaagtcgtccgagagcaaatcactcgagctttgccctccaaacccaactctttggatcagttcaagagcaaattgcgtagcctgagttactctgagattctacgactgcgccagtctgagaggatgagtcaggatgacttccagtccccgccaattgtggagctgagggagaagatccagcccgagatccttgagctgatcaagcagcagcgcctgaaccggctctgtgagggcagcagcttccgaaagattgggaaccgccgaaggcaagaacggttctggtactgccggttggcactgaaccacaaggtccttcactatggtgacttggatgacaacccacaaggggaggtgacatttgaatccctgcaggagaaaattcctgttgcagacattaaggccattgtcactgggaaagattgtccccacatgaaagagaaaagtgctctgaaacagaacaaggaggtgttggaattggccttctccatcctgtatgaccctgatgagaccttaaacttcatcgcacctaataaatatgagtactgcatctggattgatggcctcagtgcccttctggggaaggacatgtccagtgagctgaccaagagtgacctggacaccctgctgagcatggagatgaagctgcggctcctggacctggagaacatccagattcccgaagccccaccccccatccccaaggagcccagcagctatgactttgtctatcactatggctgagcctggagccagaaacgacggtacccaggagaagggattttgggcccaggagaaacacttacattctggtgccttgtcttttgcttgtacagaatctgtagtgattttggtggccagtaaatgccagccatttctcaaacccacctcggaccacccagagtttcctcttggtccctgtctactaagagtcatgaaggcagggtgctctgcccactccatcaccatgaagcctgggattgggccacgaggaacaaacagcagatgcccttgccttccagtccaagaaactgcttcttgaaatggatttaacaacagccactcaccttttcctcctgagcctgctctctgatcagctggatccccacgtgagcaacagctggcccaggaaaggctgcctgcagaggacaggtgtgttgggcgtgttgagagccttgaagtgactacctgtatcttagatctgagtacaagcctgaggcttttgcttttgtcttttttgatgagggctcactccagcttcatatggtgccaagacgttgctgcttctgaggttggctctaacatctctggtctttagagccaccagatctctctggcccatacagatatcagagcagacggaaatttctccctgcaagcgctcagtctcatcccagcaagtcaaagacctcctggccaagtcctgccctcttaagtctccaggaacgctgcagggaaaacccagctgaggcctgggcctagactgtggtgaggtcactagattctactgctcttcccccacattaataccttttccttcctcagagagaaatctcccctaacctgaattgcagccccctccagtttgctttcctttggccttccagaccccaggaagttggccttcccttcctagtgctatggtttctgccattggccatgatttcagggagctggctgaggccggctgaggccacacctgtgccagtggggcttccctggtgctgcagcacttgtaaaccacacacacagcctctctccctggacatacgttagcacattggcattcagtattggtggcctggcatggtaggtactacccaatgaagagtgtactatatattttcattactataggccatacttatacagacgtgtatatatatttatataagatctacctatcttaggatggaaccttggggaaaaataaaattgaggggaagtaaaaagtatgtaacacttccagttgtgagccaagattgtaaccagagagcagccaggagcttcctgtcagtaaccatgttttcaataaatactctttcatgt

SEQ ID NO: 256877 - DNA, 2635 bp, Artificial Sequence
  derived and/or modified sequence
gaaggcggggcgggcggaggctggaggagccgccgagcggagacccgggagcaggagctgggcctaggtctgcgccctggagggaggtgtagaaagaggtacatggagaacaagtttgtcaatccgtctgaacttcagttgccttacctgtaaggcagccgtgtctgtgtttttgtctcgcagaattagagcccattgggaacgatgccaccaccgtcagacattgtcaaagtggccattgagtggccaggtgctaacgcccagctccttgaaatcgaccagaaacggcccctggcatccattatcaaggaagtttgtgatgggtggtcgttgccaaacccagagtattataccctccgttatgcagatggtcctcagctgtacatcaccgaacagactcgcagtgacattaagaatgggacaatcttacaactggctatctccccgtcccgggctgcacgccagctgatggagaggacccagtcatccaacatggagacccggctggatgccatgaaggagctggccaagctctctgccgacgtgactttcgctactgagttcatcaacatggatggcatcattgtgctgacaaggctcgtggaaagtggaaccaagctcttgtcccactacagtgagatgctggcattcaccctgactgccttcctagagctcatggaccatggcattgtctcctgggacatggtttcaatcacctttattaagcagattgcagggtatgtgagccagcccatggtggacgtgtcaatccttcagaggtccctggccatcctggagagcatggtcttgaacagccagagtctgtaccagaagatagccgaggaaatcaccgtgggacagctcatctcacacctccaggtctccaaccaggagattcagacctacgccattgcactgattaatgcactttttctgaaggctcctgaggacaaacgacaggacaagcaccttaatcctctagacctgcctgtcactgatatggcaaatgcatttgcacagaagcatctccggtctataatcctgaatcatgtgatccgagggaaccgccccatcaaaactgagatggcccatcagctatatgtccttcaagtcctaacctttaaccttctggaagaaaggatgatgaccaagatggaccccaatgaccaggctcaaagggacatcatatttgaactgaggaggattgcatttgacgcagagtctgatcctagcaatgcccctgggagtgggaccgaaaaacgcaaagccatgtacacaaaggactacaaaatgctgggatttaccaaccacatcaatccagccatggactttacccagactcctcctggaatgctggccttggacaacatgctgtacttggctaaagtccaccaggacacctacatccggattgtcttggagaacagtagccgggaagacaaacatgaatgcccctttggccgcagtgccattgagctcaccaaaatgctctgtgaaatcctgcaggttggggaactaccaaatgaaggacgcaatgactaccacccgatgttctttacccatgaccgagcctttgaagagctctttggaatctgcatccagctgttgaacaagacctggaaggagatgagggcaacagcagaggacttcaacaaggttatgcaagtcgtccgagagcaaatcactcgagctttgccctccaaacccaactctttggatcagttcaagagcaaattgcgtagcctgagttactctgagattctacgactgcgccagtctgagaggatgagtcaggatgacttccagtccccgccaattgtggagctgagggagaagatccagcccgagatccttgagctgatcaagcagcagcgcctgaaccggctctgtgagggcagcagcttccgaaagattgggaaccgccgaaggcaagaacggttctggtactgccggttggcactgaaccacaaggtccttcactatggtgacttggatgacaacccacaaggggaggtgacatttgaatccctgcaggagaaaattcctgttgcagacattaaggccattgtcactgggaaagattgtccccacatgaaagagaaaagtgctctgaaacagaacaaggaggtgttggaattggccttctccatcctgtatgaccctgatgagaccttaaacttcatcgcacctaataaatatgagtactgcatctggattgatggcctcagtgcccttctggggaaggacatgtccagtgagctgaccaagagtgacctggacaccctgctgagcatggagatgaagctgcggctcctggacctggagaacatccagattcccgaagccccaccccccatccccaaggagcccagcagctatgactttgtctatcactatggctgagcctggagccagaaacgacggtacccaggagaagggattttgggcccaggagaaacacttacattctggtgccttgtcttttgcttgtacagaatctgtagtgattttggtggccagtaaatgccagccatttctcaaacccacctcggaccacccagagtttcctcttggtccctgtctactaagagtcatgaaggcagggtgctctgcccactccatcaccatgaagcct

SEQ ID NO: 256878 - DNA, 1168 bp, Artificial Sequence
  derived and/or modified sequence
ggaggagccgccgagcggagacccgggagcaggagctgggcctaggtctgcgccctggagggaggtgtagaaagaggtacatggagaacaagtttgtcaatccgtctgaacttcagttgccttacctgtaagaattagagcccattgggaacgatgccaccaccgtcagacattgtcaaagtggccattgagtggccaggtgctaacgcccagctccttgaaatcgaccagaaacggcccctggcatccattatcaaggaagtttgtgatgggtggtcgttgccaaacccagagtattataccctccgttatgcagatggtcctcagctgtacatcaccgaacagactcgcagtgacattaagaatgggacaatcttacaactggctatctccccgtcccgggctgcacgccagctgatggagaggacccagtcatccaacatggagacccggctggatgccatgaaggagctggccaagctctctgccgacgtgactttcgctactgagttcatcaacatggatggcatcattgtgctgacaaggctcgtggaaagtggaaccaagctcttgtcccactacagtgagatgctggcattcaccctgactgccttcctagagctcatggaccatggcattgtctcctgggacatggtttcaatcacctttattaagcagattgcagggtatgtgagccagcccatggtggacgtgtcaatccttcagaggtccctggccatcctggagagcatggtcttgaacagccagagtctgtaccagaagatagccgaggaaatcaccgtgggacagctcatctcacacctccaggtctccaaccaggagattcagacctacgccattgcactgattaatgcactttttctgaaggctcctgaggacaaacgacaggatatggcaaatgcatttgcacagaagcatctccggtctataatcctgaatcatgtgatccgagggaaccgccccatcaaaactgagatggcccatcagctatatgtccttcaagtcctaacctttaaccttctggaagaaaggatgatgaccaagatggaccccaatgaccaggctcaaagggacatcatatttgaactgaggaggattgcatttgacgcagagtctgatcctagcaatgcccctgggagtgggaccg

SEQ ID NO: 256879 - protein, 776 aa, Artificial Sequence
  derived and/or modified sequence
MSEAVRVPSPATPLVVAAPAPEERKGKESEREKLPPIVSAGAGATAGLDRGAKGQISTFSSFISAVSPKKEAAENRSSPAHLVFPNIKNVREPPPICLDVRQKQRTSMDASSSEMKAPVLPEPILPIQPKTVKDFQEDVEKVKSSGDWKAVHDFYLTTFDSFPELNAAFKKDATASFNTIEDSGINAKFVNAVYDTLLNTPQDVQKTVLKGIINSLLREWKGPRTKDDLRAYFILLQNPQFNNTSTYVIYAHLLRQIATLVEADHHFLVHWFKKLSQKRFKQLVERLLQFISLRLFPAKPEEFPPITKCSWWIPSAAKVLALLNTANNLVHPPLIPYTDFYNSTLDHIDLMEEYHTWQNFGNSHRFSFCQYPFVISVAAKKIIIQRDSEQQMINIARQSLVDKVSRRQRPDMNILFLNMKVRRTHLVSDSLDELTRKRADLKKKLKVTFVGEAGLDMGGLTKEWFLLLIRQIFHPDYGMFTYHKDSHCHWFSSFKCDNYSEFRLVGILMGLAVYNSITLDIRFPPCCYKKLLSPPIIPSDQNIPVGICNVTVDDLCQIMPELAHGLSELLSHEGNVEEDFYSTFQVFQEEFGIIKSYNLKPGGDKISVTNQNRKEYVQLYTDFLLNKSIYKQFAAFYYGFHSVCASNALMLLRPEEVEILVCGSPDLDMHALQRSTQYDGYAKTDLTIKYFWDVVLGFPLDLQKKLLHFTTGSDRVPVGGMADLNFKISKNETSTNCLPVAHTCFNQLCLPPYKSKKDLKQKLIIGISNSEGFGLE

SEQ ID NO: 256880 - protein, 426 aa, Artificial Sequence
  derived and/or modified sequence
MEEYHTWQNFGNSHRFSFCQYPFVISVAAKKIIIQRDSEQQMINIARQSLVDKVSRRQRPDMNILFLNMKVRRTHLVSDSLDELTRKRADLKKKLKVTFVGEAGLDMGGLTKEWFLLLIRQIFHPDYGMFTYHKDSHCHWFSSFKCDNYSEFRLVGILMGLAVYNSITLDIRFPPCCYKKLLSPPIIPSDQNIPVGICNVTVDDLCQIMPELAHGLSELLSHEGNVEEDFYSTFQVFQEEFGIIKSYNLKPGGDKISVTNQNRKEYVQLYTDFLLNKSIYKQFAAFYYGFHSVCASNALMLLRPEEVEILVCGSPDLDMHALQRSTQYDGYAKTDLTIKYFWDVVLGFPLDLQKKLLHFTTGSDRVPVGGMADLNFKISKNETSTNCLPVAHTCFNQLCLPPYKSKKDLKQKLIIGISNSEGFGLE

SEQ ID NO: 256881 - DNA, 2331 bp, Artificial Sequence
  derived and/or modified sequence
atgagcgaggccgtgagagtgcccagccccgccacccccctggtggtggccgcccccgcccccgaggagagaaagggcaaggagagcgagagagagaagctgccccccatcgtgagcgccggcgccggcgccaccgccggcctggacagaggcgccaagggccagatcagcaccttcagcagcttcatcagcgccgtgagccccaagaaggaggccgccgagaacagaagcagccccgcccacctggtgttccccaacatcaagaacgtgagagagcccccccccatctgcctggacgtgagacagaagcagagaaccagcatggacgccagcagcagcgagatgaaggcccccgtgctgcccgagcccatcctgcccatccagcccaagaccgtgaaggacttccaggaggacgtggagaaggtgaagagcagcggcgactggaaggccgtgcacgacttctacctgaccaccttcgacagcttccccgagctgaacgccgccttcaagaaggacgccaccgccagcttcaacaccatcgaggacagcggcatcaacgccaagttcgtgaacgccgtgtacgacaccctgctgaacaccccccaggacgtgcagaagaccgtgctgaagggcatcatcaacagcctgctgagagagtggaagggccccagaaccaaggacgacctgagagcctacttcatcctgctgcagaacccccagttcaacaacaccagcacctacgtgatctacgcccacctgctgagacagatcgccaccctggtggaggccgaccaccacttcctggtgcactggttcaagaagctgagccagaagagattcaagcagctggtggagagactgctgcagttcatcagcctgagactgttccccgccaagcccgaggagttcccccccatcaccaagtgcagctggtggatccccagcgccgccaaggtgctggccctgctgaacaccgccaacaacctggtgcacccccccctgatcccctacaccgacttctacaacagcaccctggaccacatcgacctgatggaggagtaccacacctggcagaacttcggcaacagccacagattcagcttctgccagtaccccttcgtgatcagcgtggccgccaagaagatcatcatccagagagacagcgagcagcagatgatcaacatcgccagacagagcctggtggacaaggtgagcagaagacagagacccgacatgaacatcctgttcctgaacatgaaggtgagaagaacccacctggtgagcgacagcctggacgagctgaccagaaagagagccgacctgaagaagaagctgaaggtgaccttcgtgggcgaggccggcctggacatgggcggcctgaccaaggagtggttcctgctgctgatcagacagatcttccaccccgactacggcatgttcacctaccacaaggacagccactgccactggttcagcagcttcaagtgcgacaactacagcgagttcagactggtgggcatcctgatgggcctggccgtgtacaacagcatcaccctggacatcagattccccccctgctgctacaagaagctgctgagcccccccatcatccccagcgaccagaacatccccgtgggcatctgcaacgtgaccgtggacgacctgtgccagatcatgcccgagctggcccacggcctgagcgagctgctgagccacgagggcaacgtggaggaggacttctacagcaccttccaggtgttccaggaggagttcggcatcatcaagagctacaacctgaagcccggcggcgacaagatcagcgtgaccaaccagaacagaaaggagtacgtgcagctgtacaccgacttcctgctgaacaagagcatctacaagcagttcgccgccttctactacggcttccacagcgtgtgcgccagcaacgccctgatgctgctgagacccgaggaggtggagatcctggtgtgcggcagccccgacctggacatgcacgccctgcagagaagcacccagtacgacggctacgccaagaccgacctgaccatcaagtacttctgggacgtggtgctgggcttccccctggacctgcagaagaagctgctgcacttcaccaccggcagcgacagagtgcccgtgggcggcatggccgacctgaacttcaagatcagcaagaacgagaccagcaccaactgcctgcccgtggcccacacctgcttcaaccagctgtgcctgcccccctacaagagcaagaaggacctgaagcagaagctgatcatcggcatcagcaacagcgagggcttcggcctggagtag

SEQ ID NO: 256882 - DNA, 444 bp, Artificial Sequence
  derived and/or modified sequence
ctgagccagaagagattcaagcagctggtggagagactgctgcagttcatcagcctgagactgttccccgccaagcccgaggagttcccccccatcaccaagtgcagctggtggatccccagcgccgccaaggtgctggccctgctgaacaccgccaacaacctggtgcacccccccctgatcccctacaccgacttctacaacagcaccctggaccacatcgacctgatggaggagtaccacacctggcagaacttcggcaacagccacagaatggccgtgagaatcaagagaaactacacccacaccatcatcctgtacatggtgaagcacaaccccaaggtgatgttctacatcgccaccagaggcaccctggacagcctgagcatcatcctgctgaagatccaccacttcgccttcagcttcttccacctgctgagctag
